United States Patent Application Publication US 2014/0128277 A1 - sequence listing, part 2

SEQ ID NO: 1180 - DNA, 4342 bp, Homo Sapiens
  NM_001044722
actcggctgttttcgctgatgcgggcagcttgggggccgccgccgctaaacagacgctttcctttttaattttttttccatgtgttcacttccgggtccggcgtcgatccggatgcccgaggcagaaggatgtttgacctccggataagcgaggcgctgctgtgcattcattccgggctgcatcggtggcgacagcagaggctcgggcggcgactctccggccagcggcggcggtaggaggcaccagcggcagtgcagggaccgaatccgagcagcgctgcgttacctctctctctcgctccttcccccctacctcgctcgctcgctcgctcgctccctgcgtggctcgctttcctcctccggccgccggcgggtgtgatgtgccgccgccgctgcccccgccggcgctgacggactgggggcgccgcccgcgcccgggaccgacccctctgctcgcggccgcgcctttgagctctctatcaatatcagctcacatcattgaaaagataattttgaagacatgttttgctgaaaagacactaagaaaaattttacgaatgggatgaacatgctccagttaattgactacctactgcaatttgaatgttaacattacccatctggtacagttacctagtgatgtacctattttcacaataccctgtttcagtgtgcttgtcttgattaaagaattcaaagtggagtaccgcaaacttgatatggaaaataaaaagaaagacaaggacaaatcagatgatagaatggcacgacctagtggtcgatcgggacacaacactcgaggaactgggtcttcatcgtctggagttttaatggttggacctaactttagagttggaaaaaaaattggatgtggcaattttggagaattacgattagggaaaaatttatacacaaatgaatatgtggcaattaagttggagcccatgaaatcaagagcaccacagctacatttggaatacagattctataagcagttaggatctggagatggtatacctcaagtttactatttcggcccttgtggtaaatacaatgctatggtgctggaactgctgggacctagtttggaagacttgtttgacttgtgtgacagaacattttctcttaaaacagttctcatgatagctatacaactgatttctcgcatggaatatgtccattcaaagaacttgatatacagagatgtaaaacctgagaacttcttaataggacgaccaggaaacaaaacccagcaagttattcacattatagattttggtttggcaaaggaatatattgatccggagacaaagaaacacataccatacagagaacacaagagccttacaggaacagctagatatatgagcataaacacacatttaggaaaagaacaaagtagaagagacgatttagaagctttaggtcatatgttcatgtattttctgagaggcagtcttccttggcaaggcttaaaggctgacacattaaaggagaggtatcagaaaattggagatacaaaacgggctacaccaatagaagtgttatgtgaaaattttccagaaatggcaacatatcttcgttatgtaagaaggctagatttttttgaaaaaccagactatgactacttaagaaagctttttactgacttgtttgatcgaaaaggatatatgtttgattatgaatatgactggattggtaaacagttgcctactccagtgggtgcagttcagcaagatcctgctctgtcatcaaacagagaagcacatcaacacagagataagatgcaacaatccaaaaaccaggttgtaagttctacaaatggagagttaaacacagatgaccccaccgcaggacgttcaaatgcacccatcacagcccctactgaagtagaagtgatggatgaaaccaagtgctgctgttttttcaaacgaaggaaaaggaaaaccatacagcgccacaaatgactctggacacagacagatcctggggagttacttacatgttcatctgctgtcttgtgattaaaatcatctctgtagtgaccacgtatattttcaaggactcactcttagaaacaaaaatgtcatactttcatacttcattttgtggttgtcttacattctttttctttttttttttttctctaatttaacctttatggaagctttaaagttttgtcaaaacatgagtgctttgcccatcagtgaatggaatggaccaatgaggtggtatcaatgaatatagttccatagaacattttccagaagttcttctgttgtagaaagcagtacagtatcttaagtgtcaaccagttatatacctaatctggttttttataacttctgtaagagcataatcaaacaggaattttcttttctcagtggataatacaacagagaaaacagagttgcccaaatatttaaaagaagttattccttgagaagttcatattttgtgacatctgcattgatttcagtattactgatggtactgttattcataagtcatattaacattctctccgtgaaatcatggtacagtcactgcccagaggtactgaggaaaaagcaatatgggttcggcagatggtggtggtaaaatgaatcttaaggagtgtggtaaatatgtgctccgcttttgttgcatcactatgtgaagtactgtgttgcagaagtggcaaaagcgcttatttttaaaaatgcaaaatatttgtacaatgtaactttatgcttccaaataataatgtatgttagacagcaagaaatgaatactttaaaaagtgatgtatgttggagttataaagaaatacactaaggagaggtagtaaatgtgaaccttgttgcagtgtataaggtggaagcctaaagaaatctcaccgaaacttactgctgaatgattacattctcccttaagcagaaaactttggatgtgccatgcaatggtgtctgtgtaattattttgctctttgattaaaaaaaagacccccagcaataaaaagtgggtcactctatgccctctgtgcacattagtctcttgtattcaactttgctgattctctggaattttcctactctttagcataattttgatgattgaaaaatattttggaaaggatgggtcaggtgctttgcctccatagtcttttgaagtgcctgcatatgaacaacaacaacaacaacaaaaaattctgtaaaaaaggaagcccattccacttttcaagtatgctttgttttaagccataaagacacacatgtagttttgtcacattctactagccaaaattttcaagaagggttaaaacaaagactggctagaaagataattattttgaataaatctcatattcatctttcatttatataattgttacttattcctcccatgcagtctcttcgttgtctttaagtgtgtgcctccaggcatgcttatttatttttattgtctcaaggtaacatttaagatgtatattaaagtaaagctacatttttttacttcattattgcatttacagggatttaattgtactttgtaatttatttttcttattagccaaaagtttaatgcatttttttttgatgaattaggcacccacatgaacaccacaaatcaggacattgtttatcattgttgctatgaatcctatgaatgatcttttttttattttaaagacctacacttaacctacaaaacatttgctgtataatttggtcaacagtttctatctatctgtatactgtcatgatgtcttaaactgcaggagttacatactgagtttatatttttatttgctttgagcaaggtagataaacattttggccattataatgtgaaaccacttcttctttctttacagtatttgaccaaacttgtgtgtctatgatatttgtaaatacatgcgaatatctgtatttcttatcataagcctatttagttttattctcagtagggttttttggattgtacagtgtttatatgatctgaactccttatacataagaaggtgtgtatattaatccaattatggacttaaaatattttaaaagtataaatacccttatttgctgcaaagaccagtgtgtaggcatttgctttttagcaatatttttaagtgctccattttaatgccgaggaataagtcttttggcaacacaaactggtcaataataggtaatgcaggtatgttcaggttaagccaacaatgttttgcatttttatgcttattttctgtcaacactaatgaagtcaacattgcctgaatgtctgaataatgaaacacatccctgtttaaaagtatgtaactgaaaaagaaataaaaaaaaataaaagtagtttttttaaa

SEQ ID NO: 1181 - DNA, 1252 bp, Homo Sapiens
  NM_001045476
gggtcccgcggccgcctaggagggagcccgccggggcggggcggggccgggtgcccatgaacagcggggtcccggccacgctggccgtgcggagagtgaaattcttcggccagcacggcggggaggtcaactcttctgccttctcccctgatggccagatgctgctcacaggctcagaagatggctgcgtgtatggctgggagacccggagtgggcagctgctgtggaggctgggtggccacacaggccccgtgaagttctgccgcttctcccctgatggccacctcttcgccagcgcctcctgtgactgcactgtccgcctgtgggatgtggcaagagcgaagtgtctgcgggtcctgaagggtcaccaacggagtgtggagacggtcagcttcagccctgactcgagacagctggcatcaggtggctgggacaagcgggtgatgctctgggatgtgcagtccggccagatgctgcgcctcttagttgggcaccgtgactccatccagagcagcgacttctcacccacggtgaactgcctggccaccggctcctgggactccaccgtacacatctgggacctgcggatggtgaccccagcagtctcccaccaggcgctagagggacacagtgccaacatcagctgcctgtgctattcagcatccggcctcctggcatccggctcctgggacaagaccatccacatctggaagcccacaaccagcagcctgcttatccaactgaagggccatgtcacctgggtgaagagcatagccttctctcccgacgagctgtggctggccagcgccggctattcccgcatggtcaaagtctgggactgcaacacaggaaagtgccttgagaccctgaagggagtcctggatgtggcccacacctgtgccttcaccccagatgggaaaatcttagtgtctggagctgccgatcagactagacgtcaaatatcccgcacgtccaaatcacccagggaccctcaaacctaacaccaaccaccttagatggtgccgacctcacccgctcccctcagtggcgcacaggcatgccgcttctccccacagacgcaaagtgactgtgctggcatccagcagatccccatggccaggactctccaggccccaccagagcagacaactgtggtgggcaggacgcttgctggaacccatcagacacctggtccccaaaaccagacccacccacctccacccaatcagtggaagtgccaggaaacaaagca

SEQ ID NO: 1182 - DNA, 480 bp, Homo Sapiens
  NM_001045479
gggaagagccaggccgagccttataaagggactgctctttgtccaaacacacacatctcactcatccttcttctcgtgatgcttcccagctctggctttttgaaagcaaagatgaatatccctctaggtgagaaagtcatgttggacatagtcgcgatgtttcgccaatacagtggagatgatggtaggatggacatgccaggtctggtgaacttgatgaaggagaacttccccaacttcctcagtggctgtgaaaaaagcgacatggattacttgtccaatgcccttgagaaaaaagatgataataaggataagaaggttaattattctgagtttctttccttgctgggggatataaccatagaccaccacaagataatgcatggagtggcaccctgttccgggggaagccagtgatcccaccctacccaggggcctctggagacccccatggacaataaagcatctactcccacaaga

SEQ ID NO: 1183 - DNA, 527 bp, Homo Sapiens
  NM_001045548
tggccttttcacaagatggcgctgaaagcaaagaaggaagctcctgcctctcctgaagccgaagccaaagcgaaggctttaaaggccaagaaggcagcgttgaaaggtgtccacagccacataaaaaagaagacccgcacgtcactcaccttccagcggcccaagacactgcgacgccggaggcggcctgaatatccttggaagagcacccccaggagaaacaagcttggccactatgctgtcatcaagtttccgctgaccacggagtcggccgtgaagaggacagaagaaaacaacacgcttttgttcactgtggatgttaaagccaacaagcaccagatcaaacaggctgtgaagaagctctatgacggtgatgtggccgaggtcaccaccctgattccgcctgatggagagaagaaggcatgtgttcgactggctcctgattacgatgcgttggatgttgccaacaaaattgggatcatctaaactgagtccagctgcctaattctaaatatatatatatatat

SEQ ID NO: 1184 - DNA, 3506 bp, Homo Sapiens
  NM_001045556
ctttcaggaaatcacacacacactggaaactcctgcatactcctcttactataatctgtcaccaaagactggatattcctgtgctggggctcgtgccagcgcctcgggctgccaggtgctgctttccaactcccacatgggctgccctccccctactgctacccacagggcccccactccacctgctcccagacgaggccaactcctggccaagcttaggggcacagcggaggcgctctgtttctgatttttctcgccttccttggagatgcctgtgcttggaagggaaggcagaacattgcatcttggaacaaatctgcttttgatcatgcaaatgaatgcctggataatgtaggcagactgtcaatttcaccagttagaaagaaagagaaaagggggagaaattccccatgacagcgactgatgaagaatttcaatagaaagctgctacttcagaaaataagatcatttgctgcgaatggagaacatctcaggcagccctgatgctccaccgtccttgcagagagaagcttgctcagagtggttactgaaaacaggaacctgcccttctgcaagccctgtgccttcctcgttcctagcagaggaagtatgcggccagtttagcaactgcagttcttctgtgtagcatgggctgcttctccacaaccgcgagaagcccggctgcctgtttattctggagcagcagcagttgacagacggagaggcagtgactctgcacccagcaatccctctgcagacagctcccacaggagtcatgcccagtgtgtgaaggctctgggcatcaccagcggccccagggaaaaagaaagaaatgggaaacagcatgaaatccacccctgcgcctgccgagaggcccctgcccaacccggagggactggatagcgacttccttgccgtgctaagtgactacccgtctcctgacatcagccccccgatattccgccgaggggagaaactgcgtgtgatttctgatgaagggggctggtggaaagctatttctcttagcactggtcgagagagttacatccctggaatatgtgtggccagagtttaccatggctggctgtttgagggcctgggcagagacaaggccgaggagctgctgcagctgccagacacaaaggtcggctccttcatgatcagagagagtgagaccaagaaagggttttactcactgtcggtgagacacaggcaggtaaagcattaccgcattttccgtctgcccaacaactggtactacatttccccgaggctcaccttccagtgcctggaggacctggtgaaccactattctgaggtggctgatggcctgtgctgtgtgctcaccacgccctgcctgacacaaagcacggctgccccagcagtgagggcctccagctcacctgtcaccttgcgtcagaagactgtggactggaggagagtgtccagactgcaggaggaccccgagggaacagagaacccgcttggggtagacgagtcccttttcagctatggccttcgagagagcattgcctcttacctgtccctgaccagtgaggacaacacctcctttgatcgaaagaagaaaagcatctccctgatgtatggtggcagcaagagaaagagctcattcttctcatcaccaccttactttgaggactagccaagaacagacacaatggttcatgcccaaaaggaacagaagttccaactattgcctgggatcttgcgaaaagcgaggttccctgatccctgggagcctcacgtattttagaagccaagagaagccacatggagactcaaattcgcatcttctctatccacatcatgaccaaaggaacccctccctggtgtctgatcagggctgtggcatcacgaaacattggatcatgacatgtcgggcgatgcttggaagagcccagcatgtatgtatgcacacattgtgtgtgtgggaaggacaaagccactctcacaagaaagggcaccaggactgctctccaaggaactggacctgtccagacagttacactccaaggtcattggagagaacttctgtatgggcaagcctgagagggagaggaaacaaaagctgtgtcctggcagaaggtctgggtttgcagatgggtgccctgaatggaactactttaactaatccatagggacttctggtatgctttcctctctttttaaaggaacttcgtgacactaaacattagcccaaaggacttcttagccttcaattgggagatacctttggtctgctcctgcaccaaagccatatgggtggaagtcagttggcctccctggttctgcagagggccagaagaatgagagagaggaagactgctggcagggaaatcgaggaggcgagactagaactgcaccagcttccctgatgtctgcagccatggctttgcagcgcagacagagcttctctgggatgctgggattcttgcctgtatgaatgcatcaagtattcatttattgcccgaataggcattgcattaagtcctctgtaaggtgtcaggcaagccaaaaaaaaaaaaaagatgcgtaagtcctaacccccaacagaggtgttcacagtgtagacagggaaaaaatgtataaacaaatgtgtaaaaagagaaatcagctcatggcttaggatggaattagagacaggtgagggacactcaggagctcattttccagctgctcttcagagtggaagggctggctggatcgggtaggtaagaatagctggattttttagaaaagaaatggatacagtctaaagaattaactcacccggtactttattctaagaagggtctggcatccatatgaggaaaaatgctcagctccaggaaagatggggagtccaagtggattaatgatgtcatgcataattttaagagacaagggagaaaacacaatgtatagccagagaaggagaagctcccatccaaatcctactaggaagagagtgggctgcagatgaatctgtgactcatgtttccctgtttcaaagggatcctggggaaggaggggaacatgcttgcagtatctctccctgtctgtctgctcacataagcattccgtccatctgagctcatcgtgctactggtatgtgtatgtgcagttacacagttttctgtatcatagattctagtgtgtttatacaaggagacatctgtggtttccccaaccgttccaaaaggctatttcaaaggaaccagccaacgtatgagaaatgaatgtaacactgtggacattgacttcccgcataaggcagggtgaccccctgaactccagatgtctgcacagtatcttatgtgttgttttccgttgtgacgaatgtgattggaacatttggggagcacccagagggatttctcagtgggaagcattacactttgctaaatcatgtatttattcctgattaaaacaaacctaataaatatttaacccttggcaaaaaaaaaaaaaaaaaaaaaaaaaaaaaaaaaaaaaaaaaaaaaaaa

SEQ ID NO: 1185 - DNA, 3228 bp, Homo Sapiens
  NM_001045557
ctttcaggaaatcacacacacactggaaactcctgcatactcctcttactataatctgtcaccaaagactggatattcctgtgctggggctcgtgccagcgcctcgggctgccaggtgctgctttccaactcccacatgggctgccctccccctactgctacccacagggcccccactccacctgctcccagacgaggccaactcctggccaagcttaggggcacagcggaggcgctctgtttctgatttttctcgccttccttggagatgcctgtgcttggaagggaaggcagaacattgcatcttggaacaaatctgcttttgatcatgcaaatgaatgcctggataatgtaggcagactgtcaatttcaccagttagaaagaaagagaaaagggggagaaattccccatgacagcgactgatgaagaatttcaatagaaagctgctacttcagaaaataagatcatttgctgcgaatggagaacatctcaggcagccctgatgctccaccggctctgggcatcaccagcggccccagggaaaaagaaagaaatgggaaacagcatgaaatccacccctgcgcctgccgagaggcccctgcccaacccggagggactggatagcgacttccttgccgtgctaagtgactacccgtctcctgacatcagccccccgatattccgccgaggggagaaactgcgtgtgatttctgatgaagggggctggtggaaagctatttctcttagcactggtcgagagagttacatccctggaatatgtgtggccagagtttaccatggctggctgtttgagggcctgggcagagacaaggccgaggagctgctgcagctgccagacacaaaggtcggctccttcatgatcagagagagtgagaccaagaaagggttttactcactgtcggtgagacacaggcaggtaaagcattaccgcattttccgtctgcccaacaactggtactacatttccccgaggctcaccttccagtgcctggaggacctggtgaaccactattctgaggtggctgatggcctgtgctgtgtgctcaccacgccctgcctgacacaaagcacggctgccccagcagtgagggcctccagctcacctgtcaccttgcgtcagaagactgtggactggaggagagtgtccagactgcaggaggaccccgagggaacagagaacccgcttggggtagacgagtcccttttcagctatggccttcgagagagcattgcctcttacctgtccctgaccagtgaggacaacacctcctttgatcgaaagaagaaaagcatctccctgatgtatggtggcagcaagagaaagagctcattcttctcatcaccaccttactttgaggactagccaagaacagacacaatggttcatgcccaaaaggaacagaagttccaactattgcctgggatcttgcgaaaagcgaggttccctgatccctgggagcctcacgtattttagaagccaagagaagccacatggagactcaaattcgcatcttctctatccacatcatgaccaaaggaacccctccctggtgtctgatcagggctgtggcatcacgaaacattggatcatgacatgtcgggcgatgcttggaagagcccagcatgtatgtatgcacacattgtgtgtgtgggaaggacaaagccactctcacaagaaagggcaccaggactgctctccaaggaactggacctgtccagacagttacactccaaggtcattggagagaacttctgtatgggcaagcctgagagggagaggaaacaaaagctgtgtcctggcagaaggtctgggtttgcagatgggtgccctgaatggaactactttaactaatccatagggacttctggtatgctttcctctctttttaaaggaacttcgtgacactaaacattagcccaaaggacttcttagccttcaattgggagatacctttggtctgctcctgcaccaaagccatatgggtggaagtcagttggcctccctggttctgcagagggccagaagaatgagagagaggaagactgctggcagggaaatcgaggaggcgagactagaactgcaccagcttccctgatgtctgcagccatggctttgcagcgcagacagagcttctctgggatgctgggattcttgcctgtatgaatgcatcaagtattcatttattgcccgaataggcattgcattaagtcctctgtaaggtgtcaggcaagccaaaaaaaaaaaaaagatgcgtaagtcctaacccccaacagaggtgttcacagtgtagacagggaaaaaatgtataaacaaatgtgtaaaaagagaaatcagctcatggcttaggatggaattagagacaggtgagggacactcaggagctcattttccagctgctcttcagagtggaagggctggctggatcgggtaggtaagaatagctggattttttagaaaagaaatggatacagtctaaagaattaactcacccggtactttattctaagaagggtctggcatccatatgaggaaaaatgctcagctccaggaaagatggggagtccaagtggattaatgatgtcatgcataattttaagagacaagggagaaaacacaatgtatagccagagaaggagaagctcccatccaaatcctactaggaagagagtgggctgcagatgaatctgtgactcatgtttccctgtttcaaagggatcctggggaaggaggggaacatgcttgcagtatctctccctgtctgtctgctcacataagcattccgtccatctgagctcatcgtgctactggtatgtgtatgtgcagttacacagttttctgtatcatagattctagtgtgtttatacaaggagacatctgtggtttccccaaccgttccaaaaggctatttcaaaggaaccagccaacgtatgagaaatgaatgtaacactgtggacattgacttcccgcataaggcagggtgaccccctgaactccagatgtctgcacagtatcttatgtgttgttttccgttgtgacgaatgtgattggaacatttggggagcacccagagggatttctcagtgggaagcattacactttgctaaatcatgtatttattcctgattaaaacaaacctaataaatatttaacccttggcaaaaaaaaaaaaaaaaaaaaaaaaaaaaaaaaaaaaaaaaaaaaaaaa

SEQ ID NO: 1186 - DNA, 6891 bp, Homo Sapiens
  NM_001046
ggtggcctctgtggccgtccaggctagcggcggcccgcaggcggcggggagaaagactctctcacctggtcttgcggctgtggccaccgccggccaggggtgtggagggcgtgctgccggagacgtccgccgggctctgcagttccgccgggggtcgggcagctatggagccgcggcccacggcgccctcctccggcgccccgggactggccggggtcggggagacgccgtcagccgctgcgctggccgcagccagggtggaactgcccggcacggctgtgccctcggtgccggaggatgctgcgcccgcgagccgggacggcggcggggtccgcgatgagggccccgcggcggccggggacgggctgggcagacccttggggcccaccccgagccagagccgtttccaggtggacctggtttccgagaacgccgggcgggccgctgctgcggcggcggcggcggcggcggcagcggcggcggctggtgctggggcgggggccaagcagacccccgcggacggggaagccagcggcgagagcgagccggctaaaggcagcgaggaagccaagggccgcttccgcgtgaacttcgtggacccagctgcctcctcgtcggctgaagacagcctgtcagatgctgccggggtcggagtcgacgggcccaacgtgagcttccagaacggcggggacacggtgctgagcgagggcagcagcctgcactccggcggcggcggcggcagtgggcaccaccagcactactattatgatacccacaccaacacctactacctgcgcaccttcggccacaacaccatggacgctgtgcccaggatcgatcactaccggcacacagccgcgcagctgggcgagaagctgctccggcctagcctggcggagctccacgacgagctggaaaaggaaccttttgaggatggctttgcaaatggggaagaaagtactccaaccagagatgctgtggtcacgtatactgcagaaagtaaaggagtcgtgaagtttggctggatcaagggtgtattagtacgttgtatgttaaacatttggggtgtgatgcttttcattagattgtcatggattgtgggtcaagctggaataggtctatcagtccttgtaataatgatggccactgttgtgacaactatcacaggattgtctacttcagcaatagcaactaatggatttgtaagaggaggaggagcatattatttaatatctagaagtctagggccagaatttggtggtgcaattggtctaatcttcgcctttgccaacgctgttgcagttgctatgtatgtggttggatttgcagaaaccgtggtggagttgcttaaggaacattccatacttatgatagatgaaatcaatgatatccgaattattggagccattacagtcgtgattcttttaggtatctcagtagctggaatggagtgggaagcaaaagctcagattgttcttttggtgatcctacttcttgctattggtgatttcgtcataggaacatttatcccactggagagcaagaagccaaaagggttttttggttataaatctgaaatatttaatgagaactttgggcccgattttcgagaggaagagactttcttttctgtatttgccatcttttttcctgctgcaactggtattctggctggagcaaatatctcaggtgatcttgcagatcctcagtcagccatacccaaaggaacactcctagccattttaattactacattggtttacgtaggaattgcagtatctgtaggttcttgtgttgttcgagatgccactggaaacgttaatgacactatcgtaacagagctaacaaactgtacttctgcagcctgcaaattaaactttgatttttcatcttgtgaaagcagtccttgttcctatggcctaatgaacaacttccaggtaatgagtatggtgtcaggatttacaccactaatttctgcaggtatattttcagccactctttcttcagcattagcatccctagtgagtgctcccaaaatatttcaggctctatgtaaggacaacatctacccagctttccagatgtttgctaaaggttatgggaaaaataatgaacctcttcgtggctacatcttaacattcttaattgcacttggattcatcttaattgctgaactgaatgttattgcaccaattatctcaaacttcttccttgcatcatatgcattgatcaatttttcagtattccatgcatcacttgcaaaatctccaggatggcgtcctgcattcaaatactacaacatgtggatatcacttcttggagcaattctttgttgcatagtaatgttcgtcattaactggtgggctgcattgctaacatatgtgatagtccttgggctgtatatttatgttacctacaaaaaaccagatgtgaattggggatcctctacacaagccctgacttacctgaatgcactgcagcattcaattcgtctttctggagtggaagaccacgtgaaaaactttaggccacagtgtcttgttatgacaggtgctccaaactcacgtccagctttacttcatcttgttcatgatttcacaaaaaatgttggtttgatgatctgtggccatgtacatatgggtcctcgaagacaagccatgaaagagatgtccatcgatcaagccaaatatcagcgatggcttattaagaacaaaatgaaggcattttatgctccagtacatgcagatgacttgagagaaggtgcacagtatttgatgcaggctgctggtcttggtcgtatgaagccaaacacacttgtccttggatttaagaaagattggttgcaagcagatatgagggatgtggatatgtatataaacttatttcatgatgcttttgacatacaatatggagtagtggttattcgcctaaaagaaggtctggatatatctcatcttcaaggacaagaagaattattgtcatcacaagagaaatctcctggcaccaaggatgtggtagtaagtgtggaatatagtaaaaagtccgatttagatacttccaaaccactcagtgaaaaaccaattacacacaaagttgaggaagaggatggcaagactgcaactcaaccactgttgaaaaaagaatccaaaggccctattgtgcctttaaatgtagctgaccaaaagcttcttgaagctagtacacagtttcagaaaaaacaaggaaagaatactattgatgtctggtggctttttgatgatggaggtttgaccttattgataccttaccttctgacgaccaagaaaaaatggaaagactgtaagatcagagtattcattggtggaaagataaacagaatagaccatgaccggagagcgatggctactttgcttagcaagttccggatagacttttctgatatcatggttctaggagatatcaataccaaaccaaagaaagaaaatattatagcttttgaggaaatcattgagccatacagacttcatgaagatgataaagagcaagatattgcagataaaatgaaagaagatgaaccatggcgaataacagataatgagcttgaactttataagaccaagacataccggcagatcaggttaaatgagttattaaaggaacattcaagcacagctaatattattgtcatgagtctcccagttgcacgaaaaggtgctgtgtctagtgctctctacatggcatggttagaagctctatctaaggacctaccaccaatcctcctagttcgtgggaatcatcagagtgtccttaccttctattcataaatgttctatacagtggacagccctccagaatggtacttcagtgcctagtgtagtaactgaaatcttcaatgacacattaacatcacaatggcgaatggtgacttttctttcacgatttcattaatttgaaagcacacaggaaagttgctccattgataacgtgtatggagacttcggttttagtcaattccatatctcaatcttaatggtgattcttctctgttgaactgaagtttgtgagagtagttttcctttgctacttgaatagcaataaaagcgtgttaactttttgattgatgaaagaagtacaaaaagcctttagccttgaggtgccttctgaaattaaccaaatttcatccatatatcctcttttataaacttatagaatgtcaaactttgccttcaactgtttttatttctagtctcttccactttaaaacaaaatgaacactgcttgtcttcttccattgaccatttagtgttgagtactgtatgtgttttgttaattctataaaggtatctgttagatattaaaggtgagaattagggcaggttaatcaaaaatggggaaggggaaatggtaaccaaaaagtaaccccatggtaaggtttatatgagtatatgtgaatatagagctaggaaaaaaagcccccccaaatacctttttaacccctctgattggctattattactatatttattattatttattgaaaccttagggaagattgaagattcatcccatacttctatataccatgcttaaaaatcacgtcattctttaaacaaaaatactcaagatcatttatatttatttggagagaaaactgtcctaatttagaatttccctcaaatctgagggacttttaagaaatgctaacagatttttctggaggaaatttagacaaaacaatgtcatttagtagaatatttcagtatttaagtggaatttcagtatactgtactatcctttataagtcattaaaataatgtttcatcaaatggttaaatggaccactggtttcttagagaaatgtttttaggcttaattcattcaattgtcaagtacacttagtcttaatacactcaggtttgaacagattattctgaatattaaaatttaatccattcttaatattttaaaacttttgttaagaaaaactgccagtttgtgcttttgaaatgtctgttttgacatcatagtctagtaaaattttgacagtgcatatgtactgttactaaaagctttatatgaaattattaatgtgaagtttttcatttataattcaaggaaggatttcctgaaaacatttcaagggatttatgtctacatatttgtgtgtgtgtgtgtatatatatgtaatatgcatacacagatgcatatgtgtatatataatgaaatttatgttgctggtattttgcattttaaagtgatcaagattcattaggcaaactttggtttaagtaaacatatgttcaaaatcagattaacagatacaggtttcatagagaacaaaggtgatcatttgaagggcatgctgtaatttcacacaattttccagttcaaaaatggagaatacttcgcctaaaatactgttaagtgggttaattgatacaagtttctgtggtggaaaatttatgcaggttttcacgaatccttttttttttttttttttttttttgagacggagtcttgctctgttgccacgctggaatgcagtaacgtgatcttggctcactgcgacctccacctccccagttcaagcgattctcctgcctcagcctccctagtagctgggactacgggtgcacgccaccatgcccagctaatttttgtattttgagtagagacagggtttcaccgtgttggctaggatggtgtctatctcttgaccttgtgatccacccgcctcagcctcccagagtgctgggattacaggtgcgagccactgcgcctggctggttttcatgaatcttgatagacatctataacgttattattttcagtggtgtgcagcatttttgcttcatgagtatgacctaggtatagagatctgataacttgaattcagaatattaagaaaatgaagtaactgattttctaaaaaaaaaaaaaaaaaaaatttctacattataactcacagcattgttccattgcaggttttgcaatgtttgggggtaaagacagtagaaatattattcagtaaacaataatgtgtgaacttttaagatggataatagggcatggactgagtgctgctatcttgaaatgtgcacaggtacacttaccttttttttttttttttttaagtttttcccattcaggaaaacaacattgtgatctgtactacaggaaccaaatgtcatgcgtcatacatgtgggtataaagtacataaaatatatctaactattcataatgtggggtgggtaatactgtctgtgaaataatgtaagaagcttttcacttaaaaaaaatgcattactttcacttaacactagacaccaggtcgaaaattttcaaggttatagtacttatttcaacaattcttagagatgctagctagtgttgaagctaaaaatagctttatttatgctgaattgtgatttttttatgccaaattttttttagttctaatcattgatgatagcttggaaataaataattatgccatggcatttgacagttcattattcctataagaattaaattgagtttagagagaatggtggtgttgagctgattattaacagttactgaaatcaaatatttatttgttacattattccatttgtattttaggtttccttttacattctttttatatgcattctgacattacatattttttaagactatggaaataatttaaagatttaagctctggtggatgattatctgctaagtaagtctgaaaatgtaatattttgataatactgtaatatacctgtcacacaaatgcttttctaatgttttaaccttgagtattgcagttgctgctttgtacagaggttactgcaataaaggaagtggattcattaaacctatttaatgtccaaaaaaaaaaaaaaaaaaaaaaaaaaaaaaaa

SEQ ID NO: 1187 - DNA, 2285 bp, Homo Sapiens
  NM_001047
cccggggccgcacccacagccccggctaccccggagaagcctgacttgagaaccctttctgcagagtcccggcagtgcgggactccggtagccgcccctccggtagccgcccctcctgcccccgcgccgccgccctatatgttgcccgccgcggcctctggggcatggagcacgctgcccagccctggcgatggcaacggcgacgggggtggcggaggagcgcctgctggccgcgctcgcctacctgcagtgcgccgtgggctgcgcggtcttcgcgcgcaatcgtcagacgaactcagtgtacggccgccacgcgctgcccagccacaggctccgagtgccggcgcgggccgcctgggtggtgcaggagctgccctcgctggccctgccgctctaccagtacgccagcgagtccgccccgcgtctccgcagcgcgcccaactgcatcctcctggccatgttcctcgtccactacgggcatcggtgcttaatttacccatttctgatgcgaggaggaaagcctatgccactgttggcgtgtacaatggcgattatgttctgtacctgtaacggctatttgcaaagcagatacttgagccattgtgcagtgtatgctgatgactgggtaacagatccccgttttctaataggttttggcttgtggttaacgggcatgttgataaacatccattcagatcatatcctaaggaatctcagaaaaccaggagatactggatacaaaataccaaggggaggcttatttgaatacgtaactgcagccaactattttggagaaatcatggagtggtgtggctatgccctggccagctggtctgtccaaggcgcggcttttgctttcttcacgttttgttttttatctggtagagcaaaagagcatcatgagtggtacctccggaaatttgaagagtatccaaagttcagaaaaattataattccatttttgttttaagtgcgtttttcatgaaattatcttcaacttgaagctttccaatggcgcttctctatggactttgtaaataagttatatctttgtaattttcctgctactttatcattttcaagatgtcctctaggaattttttttctagtaattttgcaatctacctaataagtacctaaatacgctgaaatggaggttgaatatcctactgtgtaacaggtcagaatttcaagctctgggtaataactgctgatattttttctaatttcaaatttacctcttttggctatgtcttgccaagtgtgtatgagactagactttacaactgtctttgatggcattttcagaacaataaatgtcacaatcccttctatagccccctacagtgatctcttcaaggtcaactgcagtgttgcttccctccccctatagggctggaatctgtctaggagccctctctcggaggccacagaggctgggggtagccattgtgcagtcatggcccgggggaaacttgccaaccttcgtgtcaggtgctgtgtgtaagtggagaacttggggatagaggaggaagctcctcgtggcccttccaaggtgaggcaaaggcatctggacttgttccagcccagcccaccgggtgacatcaccgggcagggaggggtgctggtggtggttcatacggagtaagctgctctgcctgtgtgagtggctcctgggccctaaacaggcacctttaggccatgggtcactcaccgtgagccatcaatgtgctctggtctgacatggtttctctctgtcttctagtctagacctagtttttttgttctgttccccacgtatggatatagtagagattgttgtctgtgaaatttctcttttgtagattttgagttttcccttgtagtgtaaagaatgatcactttctgtaacaataacaagaccactttttaagatttatcctgtttgttctttgttgattgaaacataataattgttaaaattctctacagccttctttttcttccatagctaatcttccttctaatagtttttgctttctgttttgctgttgttgctttgcaaagctttcccctcatagcctgtacctgttatcaatataaaataatcttcctgttgaatgcttcatgacttgaattctactttgataaaaacattgccatactgctttttatcttgatgaattcatctggcattgctttgccttatcatctcatctggagtttttaaatgccatttgtttcagttgtctttaacaacataataaatagactttgccatttaaaaaaaaaaaaaaaaaaaaaaa

SEQ ID NO: 1188 - DNA, 3990 bp, Homo Sapiens
  NM_001047434
cttgcccggcgcgacctgatgatgccgagcccaggccggttccggcgaagttaaaccctcggagctggcctcggactgctggggcgttaccccttcggccacccccgctgaccatggcagtgtttcatgacgaggtggaaatcgaggacttccaatatgacgaggactcggagacgtatttctatccctgcccatgtggagataacttctccatcaccaaggatcagtttgtgtgtggagaaacagtcccagccccttcagccaacaaagaattagttaaatgctgaagaagccttcaggaatccaaatcctgaacatttggaatgagcccagatagaaatatcgaatgcaaagctactggcttcacagagacaaccatttatgatttgctgttctgtaagagtgtggattctttctatcaactgctgatatcatcttcaggaagcaagtccataacatgacatatctggattttgtgcttagaaccttaaattggaagcattcttaattatgcatctaaatttaaaagaagataatttcaaaacagtgctttctttcccttggtttcatcattttcatatcttaaaccaaattacttcggtatctgacaacagcatcatctacctcagtcattaggatttcttaataaaaaagagattgtatttttgacttggttattaagattattaaaattagcccttcctttgaaatatgacatcagctttgctgttctaaatttaaaattagttgcttcatcagtaccacacttccagtttctataccaagccagtctcctcagttttcccattagaatggacatgttctgttcagcgtgtcatttctgtaatgcttcatgcagagagtttggtcatagtattaaagagaaaatacagtgaggtcacaatgtctccagagctaaaagttagtgaacaagaaagaaagtccaaaatgaagtgatgaaagaatgaggacttttcttatattctgcatattccttggaagtcaggacaagatgaaaagaaaaacatccaaaagaagtgaaattggtgacagaatgagaggagcaaagcataccagtgtagtaagtggaatgtttgaatgactttgccaggtcagagcaagtaatatttctgtatctgagtttttgtttgtgttttgataaggctaatgaaattgcattccaggtaggggttaacgtcaaatttccatggctggtagctgtgcttttggcatatcacagtgttgtgtcactactacaaggtaaagcatctacagcggagaatgagcttgaaaatgagagacctattgtgaataaatatgcccatgagagcatatttaataagcctctataacatgcagccaaaccagacattcactcctgcagagaaatgttgccctggagaaaaagaaatatataaagataggctatcacccttcttttgctgcagtactaagcatagcaagaaattagaatcatttacattggaaatttgaaaattccctttatatacacaactttactgtgtataaataaaaaatatttattaatgcagtgatgtccgtcaggttgttttaggaatggcttctgcaattagaaaaatagcttgctagaatgtaaatgttctgttactggtaaatgtactgcacacattcattggacgttaaaacaagtgagtagccttttttacctgccagcagcatggctgtgtgcagccactaggctgagacaataaattaccaaaaattataatgtaccgagctgaaaatgctcagtacattatgtggcatattctggatgtgatgagaaatctcattgccatttgggacactgacatcccagaagtaatccacaactgctttgcaaaagcaaagtgactgctcagatgaacagagcagagtactcactcactatggtggcatcagctgcaaagcaaaatgaactgtcccatgatcatgttgatggttttctagatactgccaacatgttagctctttctgatgctgatgagtttcaaacacgaacagacacccttgatgtgggtttgctaagaacatagaagaacaggaagaaaagttgccaggttcacacatcccaggaaaaaagaagcataaaaagcattagcagtcagtgactgatgataatgctgcaataatgggaatggttttgtttctaaaccaaattatttctaaatcaaatcatttattgctttgtttctaaagcaattgagtcactaagtttgtgaactgtaggagaacacatcaagattgaatcctgtgttaagcagaaggtaaaaccagagccaggcgcagtggctcgtgcctgtaatcccagctactcaggaagctaaggcaggaggatcatgtgaggccaggagttcaagactagcctgggcaacatagaaagaccctgtctctaaaaaatcttcttttaattagcaaggtgtggggccttgagcaaattgcttgggcccaggagtttgaggctgtggtgagctgtgatcacaccactgcgttccagcctgtgtgacagggcaagacctcatgcctaaaaaataaagagaaagcagagtaaaactggactctgagatacgactaaagttctgtgtgatacgtgtgccttatttagctcaagacattcctggagcacctataaaaactgacttgtaatccaggctatgtctctttttagcttcgtaatctttggcaaggccattggattcttcagctgtacaattaggagactcgatcaggtgattgcctttctcagctgtcagttctctaatttcaggcttggtagcttgtaggaactgaaattgcaattaaaacctttataaactcaaactaaatcatgaattacagaaaaagtccattcttccaaaacttgatgttaccacacttacaagtttaaaatatgaagtcgactgtttaaaggattctgcatatattctagtgtgcacattcagaaacatttttcttggaaaaagtacccaacattttttataactgcacatattaatttattgccagaataaattgcattgcatgctaaataaagtcagataattcaaatccatttgcttttatgtagtttttcttctaaatgtcaacattttgaattaaaatgtttatgattttatatgaggtagaaatcttaactgctttggggtattgttaatagactttttgttatggacagtagtttttaaataaggaaattgccaatttctacagtttgggctctggatttctattgtttgggaaaaaaataactgagtcaagtggtagtaagacaaagttgacattcttagatgagtaactcagtttattacaaggaaagaaaactgattgtttaaggctgatgatcaattcttggagtggtttcagagcccagctctggtcagaagacaatttgaatcttagttcctccactgtgatctccgagaagttacttaataattatattctggtttgtgaaatctggatcatagtacctctttgacagggttgctgtgtgaacccattcattctgcaattagaaaaatagctgtcatgtgctatgcactaggcaaagaagtacctgtcacatgctaggcactaggggaagaagattcggtttctacatttggaaacttagtggaactagaagagacagaagcaagattacagatgagttagagcccccaaggaaacaaaccaggtgatgtgggagagagtaactgggtcaggtgactttttaagggagtctgagctctggcactttttctaagacctgaaggatgagaaggaaacagccttgtgaaaatgattaaatgagctagtatctataaaacatgacagctaatgcctgtcatgtgcaaaaaatggttaactattctaactccgaaaggaattaaacattgttttgcgctttctcctagtccatgttctgctgctgtaacaatacctgagactggataatttatcaagaataaaggttaatttggctcatga

SEQ ID NO: 1189 - DNA, 2311 bp, Homo Sapiens
  NM_001047841
ggtaaactgtcatggtgctggcaggaatggctaagggtgatgggcagcgagaacaaccagaggcgctttttgtgtctttttctagttttggcctgttctcaatctggtctgggagacgaatcctgctgacctcctacctctgctggcaaaactcgagtggggtctgggaacttgaaggaaggagttttacagcttcagatctgggtatttatccaaaagacttgaaactggggtcctgaggagatacaaacacttctcagttcattaaagcactattcacagtatccaagaagtgaagtgttcaaccactgagtatgatgttggctctaagtattcatatgaggcctacgtcaaattcatacatgtcgaatatcaaattggggaagtcatttgattgcccgcctcagaacgatggatctgcatctcttcgactactcagagccagggaacttctcggacatcagctggccatgcaacagcagcgactgcatcgtggtggacacggtgatgtgtcccaacatgcccaacaaaagcgtcctgctctacacgctctccttcatttacattttcatcttcgtcatcggcatgattgccaactccgtggtggtctgggtgaatatccaggccaagaccacaggctatgacacgcactgctacatcttgaacctggccattgccgacctgtgggttgtcctcaccatcccagtctgggtggtcagtctcgtgcagcacaaccagtggcccatgggcgagctcacgtgcaaagtcacacacctcatcttctccatcaacctcttcggcagcattttcttcctcacgtgcatgagcgtggaccgctacctctccatcacctacttcaccaacacccccagcagcaggaagaagatggtacgccgtgtcgtctgcatcctggtgtggctgctggccttctgcgtgtctctgcctgacacctactacctgaagaccgtcacgtctgcgtccaacaatgagacctactgccggtccttctaccccgagcacagcatcaaggagtggctgatcggcatggagctggtctccgttgtcttgggctttgccgttcccttctccattatcgctgtcttctacttcctgctggccagagccatctcggcgtccagtgaccaggagaagcacagcagccggaagatcatcttctcctacgtggtggtcttccttgtctgctggctgccctaccacgtggcggtgctgctggacatcttctccatcctgcactacatccctttcacctgccggctggagcacgccctcttcacggccctgcatgtcacacagtgcctgtcgctggtgcactgctgcgtcaaccctgtcctctacagcttcatcaatcgcaactacaggtacgagctgatgaaggccttcatcttcaagtactcggccaaaacagggctcaccaagctcatcgatgcctccagagtctcagagacggagtactctgccttggagcagagcaccaaatgatctgccctggagaggctctgggacgggtttacttgtttttgaacagggtgatgggccctatggttttctagagcaaagcaaagtagcttcgggtcttgatgcttgagtagagtgaagaggggagcacgtgccccctgcatccattctctctttctcttgatgacgcagctgtcatttggctgtgcgtgctgacagttttgcaacaggcagagctgtgtcgcacagcagtgctgtgcgtcagagccagctgaggacaggcttgcctggacttctgtaagataggattttctgtgtttcctgaattttttatatggtgatttgtatttaaattttaagactttattttctcactattggtgtaccttataaatgtatttgaaagttaaatatattttaaatattgtttgggaggcatagtgctgacatatattcagagtgttgtagttttaaggttagcgtgacttcagttttgactaaggatgacactaattgttagctgttttgaaattatatatatataaatatatataaatatataaatatatgccagtcttggctgaaatgttttatttaccatagttttatatctgtgtggtgttttgtaccggcacgggatatggaacgaaaactgctttgtaatgcagtttgtgacattaatagtattgtaaagttacattttaaaataaacaaaaaactgttctggactgcaaatctgcacacacaacgaacagttgcatttcagagagttctctcaatttgtaagttatttttttttaataaagatttttgtttcctaaaaaaaaaaaaaaaa

SEQ ID NO: 1190 - DNA, 1794 bp, Homo Sapiens
  NM_001048172
tcccgggtccggcgcggggaaggcagcctggcgcgcgctaattgcctattggcctgtgctgccggctcgcagcccgggtggacccgagccacgccccctggagtgcgccggaaagccgggcgcgctagagctcgcgggaggccatcatgaggaagccacgagcagccgtgggaagtggtcacaggaagcaggcagccagccaggaagggaggcagaagcatgctaagaacaacagtcaggccaagccttctgcctgtgatgcaggcctggccaggcagccggaagaggtggtattgcaggcctctgtctcctcataccatctattcagagacgtagctgaagtcacagccttccgagggagcctgctaagctggtacgaccaagagaaacgggacctaccatggagaagacgggcagaagatgagatggacctggacaggcgggcatatgctgtgtgggtctcagaggtcatgctgcagcagacccaggttgccactgtgatcaactactataccggatggatgcagaagtggcctacactgcaggacctggccagtgcttccctggaggaggtgaatcaactctgggctggcctgggctactattctcgtggccggcggctgcaggagggagctcggaaggtggtagaggagctagggggccacatgccacgtacagcagagaccctgcagcagctcctgcctggcgtggggcgctacacagctggggccattgcctctatcgcctttggccaggcaaccggtgtggtggatggcaacgtagcacgggtgctgtgccgtgtccgagccattggtgctgatcccagcagcacccttgtttcccagcagctctggggtctagcccagcagctggtggacccagcccggccaggagatttcaaccaagcagccatggagctaggggccacagtgtgtaccccacagcgcccactgtgcagccagtgccctgtggagagcctgtgccgggcacgccagagagtggagcaggaacagctcttagcctcagggagcctgtcgggcagtcctgacgtggaggagtgtgctcccaacactggacagtgccacctgtgcctgcctccctcggagccctgggaccagaccctgggagtggtcaacttccccagaaaggccagccgcaagccccccagggaggagagctctgccacctgtgttctggaacagcctggggcccttggggcccaaattctgctggtgcagaggcccaactcaggtctgctggcaggactgtgggagttcccgtccgtgacctgggagccctcagagcagcttcagcgcaaggccctgctgcaggaactacagcgttgggctgggcccctcccagccacgcacctccggcaccttggggaggttgtccacaccttctctcacatcaagctgacatatcaagtatatgggctggccttggaagggcagaccccagtgaccaccgtaccaccaggtgctcgctggctgacgcaggaggaatttcacaccgcagctgtttccaccgccatgaaaaaggttttccgtgtgtatcagggccaacagccagggacctgtatgggttccaaaaggtcccaggtgtcctctccgtgcagtcggaaaaagccccgcatgggccagcaagtcctggataatttctttcggtctcacatctccactgatgcacacagcctcaacagtgcagcccagtgacacctctgaaagcccccattccctgagaatcctgttgttagtaaagtgcttatttttgtagttaaaaaaaaaaaaaaaa

SEQ ID NO: 1191 - DNA, 6225 bp, Homo Sapiens
  NM_001048183
ggagagaaaggacgcacgcttcccgccattttgttcagcttgccgggcaaccggcccctgctggggactacaagtcccgtaagcctccgcggcggcacgtcctaccctacactgtccagccggctccctttttccccctccccgggggccaagggctccggctgctgcctggcggccaacgggccaggtaggatttccgggagaggctgctgtggaggctgaggaggcggcggcggagatctggaaacagtatctcacctccctaaactggttaatagtggcatggaagatccatttgaggaagcagaccagcccactacagagccaggcatggtcctggacagtgtggaagcaggagacacaacacctcctaccaaaaggaagagcaagttctcaggctttggcaagatcttcaagccctggaaatggaggaaaaaaaaaagtagtgataaatttaaagagacttcagaagttttagaacggaaaatatctatgcgaaagccaagagaagagctggttaaaagaggggttctgttggaagaccctgagcaaggtggtgaggatccaggaaagccaagcgatgccatgttaaagaatggccataccacccccatagggaatgccagatcatctagtccagtccaagtagaggaagagccagtaagattagcaagtcttaggaaagctattccagaagaggacctaaagaaacgactaggctcaactggaagccagcctaattctgaagcagagtctgttcctgagaatgtacccaaaccacctttacttcctcccaaaagacccttgtcctcttctcatgaagcaagtgaagggcaagcaaaggatgccacttcctctggcggcacggcaaggttcatcatctccacctccatcaccacagcacccgctgccaccactgctgccacaagccttgcaaagactgttaatctctctgtcaccccttccccagcacccaggactctgcctgctgctcctgccagcactaacactactgctaccccaagcctcactcatatggtccctgccaagcagccccctatccctccccctaaaccagctcacagaaatagcaaccctgtcattgctgaactgtcccaagcaataaacagtggtacattgttatcaaaaccgtccccacccttaccacctaagagaggcattccatcaacctcagtacccaccttggagtctgctgctgccatcaccacaaaaacaccaagtgatgaaagagagaagagcacgtgttctatgggctcggaactactaccaatgatctcacctcgctctccgtcccccccactgcctactcatatacctccagagcctccacgcacccctccattccctgctaagacttttcaagttgtgccagaaattgagtttccaccatccttagatctacaccaggagattccccagcaggaagatcagaaaaaggaagtccccaagaggatactggaccagaactttggggagccccatataccctctaggctgcctccactcccactgcatattcgaatccagcaggccctcaccagcccacttcccatgactcctattctggagggttctcacagagctcattcgttgctttttgaaaacagtgacagcttttctgaggacagcagtacgctgggtcggaccaggtctcttcccatcactattgaaatgctaaaagttccagacgatgaagaagaagaggagcaaacctgtccatccacattcagtgaagaaatgacacctacctcagtcattcctaaattaccacagtgtctacgggaggaagaagagaaggagagcgactctgattcagaaggtcccattcagtaccgagatgaagaagatgaagatgaaagctatcagagtgctctcgccaacaaagtgaagaggaaagacacactggcaatgaagttgaaccacagacccagtgaaccagagttgaacctgaattcttggccttgtaaaagcaaggaggagtggaatgaaatacggcaccagattggaaacacactgatccggcgactgagtcaaagaccaacaccagaagaactagaacaacgcaatatattgcaacctaaaaatgaagctgatcgtcaggcagaaaaacgagaaattaaacgtcggctcactagaaagctcagtcaaaggccaactgtcgctgaactccttgccaggaagattctgaggtttaatgaatatgtagaggtaacagatgctcaagattatgaccggcgagccgacaaaccttggaccaaactgacccctgctgacaaggctgccataagaaaagaattaaatgaatttaaaagctccgagatggaggttcatgaagagagcaaacattttacacgctaccatcgtccatgatgccaaaggttgagagaggaatcaacatggctgctttgctgcttccttctccaaagtgacatatggagggaactttagcacttcccagcacagccagaattgcatcctctgggatcttctgaggtggacagcactttgaatgtagcatttcactggaacagagtcttatgtgctgcaccgggggcaaaacaacactttgtcagtgcttttgaacctttcaatattgtagcatgcttgaggagtttttcccttactggccaccaaagttctgaaccacttgcaggttccaggttttactggctgcaccacaccccttcccctagatgactgcctgtgcagagacacagtttgcaccattagccttacctgccctgccctgattgtgagacccaaatgtgtaggctctaaattccagccatcaaatccaattcctggtggggaaaaccttctggagacccccaaccttctgataaaagagtctctacctccagggaaagccttcttaccacactggcatatcagatgaaagcattgcactgtacctctcgtaacacagcaatacagtcctcttgaggcactcaagcctgagaggaagctcaggatctgacatgttcttccttttcctcacaagtcatcatgattttttattttaaaataatctggaagtaatgggaacttagtttttcctgaactccaaccagaatccaaattggttagatgaggccaggcgcggtggctcacgcctgtaatcccagcactttgggaggccgaggtgggtggatcacctgaggtcaggagttcaagaccagcctggccaacatggtgaaaccccatctctactaaaaatacaaaaattagccaggtgtggtggcgcctggttgaggcatgagaatcgcttgaacccaggaggtggaggttgcagtgagccaagatcatgcctactgcactccagcctgggcaacaaagtgggactctgtcttaaaaaaaaaaaaaaaaaaaaaatcggttagatgagaaagcatgtatattttctatatacaaaaacaagaaaggcgttttgagcccctgtgctcaggcccactcccacactgtggagtgtactttcattttcaataaatccccttattccttccttgcaaaaaaaaaaaaaaaaaaagccttagccagattcagtggctcacgcctgtaatcccaacactttgggaggctgaggcgggtggatcacctgagttcaggagttcaagaccagcctggccaacatggcaaaaccctgtctctactaaaaagtaaaaaaaattagccgggcatggtggcttgtgccttgtagtcccagccactggggaggctgaggcgggagaattgcttgaacctgggaggtggagattgcagtgagccgagatcgcgccactgcactccagcctgggtgacagagcgagactccgtctcaaaaaaaaaaaaaaagccttaatattaatgctaacgtggcagaaaactagcaggttacattttataggctattgtagttttatttaccaaatgatattctctaaatcacttcgaccaataaatgtattctcctccttaaagcagagttgtatcaactctgtgggagcatttatgagctgtcagtccccacacttctagccagaatcacaataaggtctggctgggtgtggggtgctgcataggaaagggtctctggagaagcaagaagggcacaatcatggcccactgctcccctcttcttctcagtgctctttgccctctcctgctgcgtgcttcctcttcactccagtgctgatcctcctgctctctctggcagcttccacctcacccgcccctcttccacactataaccagtatggttggtgctggggcattgactcagcccccctgctttctgcatttgtaatagatattaatatgatttcctaaaacagaagattttgttgctttctttgaacttgtattgaaaaccatacagtctcactgttttgctttaattcctatccacactataaatggaagaaaaaaattaatagcttctgtttaatctgatgaatgtggctttttttcccttcactttaatgttcaagaagttgtggctatttcatagatttcttctgatttattctgtgggtccctgttatctgttctttatgtaatctttcagtagattttcatcctttcatatccacattcttatgtggacttgctgaagaaacagaatatcagttcaaaacaaaacctaggccaggcatggtggttcacgcctataatctcagcactttgggaagccaaggcggtcaggagtttgagaccagcctgaccaacatgatgaaaccctgtctctactaaaaatacaaaaattagcctggcgtggtggcacgcatctgtaatcccaactactcaggacgctgaggcaggagagtcgcttgaacccaggaggcggagattgcagtgagccaagattgcaccactgcactccagcctgggcaacagagcgagactccatcaaaaaaaaaaaaaaaaaagaaggaaggaaggaaagcaagccctgaatccacatctccttgaagttttttttgttttattttgtttttgagacagaattttgctcttgttgcccaggccggagtgcaatggtgcaatctcagctcactgcaacctccgcctcccgggttgaggcgattctcctacctcagcctcccaagtagctaggattacaggcatgagccaccacgcctggctaattttatatttctagtagagatgaggtttctccatgttggtcaggctggtctcaaactcccgacctcaggtgatccacccacctcagcctcccaaagtggtgggattacaggcatgagccaccgtgccgagccttccttgaagttttttgtttggttttgatttgttttgttttgttttgttttgttttgtttttggagatagggtctcactctgttacccatgctggagtgcagtggcacaatcttggctcagagcaacctctgcctcccaggctcaagcaatcctcccacttcagtctaagtagctgggactacaggcacgtgccaccaggcccagctaatttttgtgttttgttagagatgaggttttgccatattgcccaggctcgtcttgaacaccggggctcaaggaatctgcccatcttcgcctcccaaagttctgagatagcaggtgtgagtcatcatgcccagcctccttgaagtttactaacaattgggataactgagggaagagaagtgacaattccactcagtctattagaggtctggatataaggtagccacacaataactctaacttgacttctaaccattctatcttattgatttggaggctgtcttctgccagattttttgtggcttgagatgatattttcgaacccttctttcactacctttcttacccttaatgtgccaagcttgaaacaggatttgatttcctgagctacttgttcgccttctgtgcgtcaccaagtaatctggttcatctttcgtctcattcatgttattttcaagtgaaacaagacattttgggggtcaagtctctttgggtgttttgtttttatgtatataaaaatggattttgtgttccctttccatgtaagtaccaacttatatggaaactcacaatcataatgtaaagaagaaatgaaagcctggtgtattgtacttcaagatgcctccctgatgtatagaatctccttgtaaaataaataattgcattgtatatcagtcttcccatcaatattaattattaaatattttagaatttttaaataccaactataaaaaaaaaaaaaaa

SEQ ID NO: 1192 - DNA, 4680 bp, Homo Sapiens
  NM_001048200
ccgggaaggaagatgagggagacgggcccggcgcttagcagccagagcagcagcagcagcagcagcggtcgggggagggtgtttcgccgtttcctctcagccgccaggacaagatggcagcggccgcggagaggggctgagcccgggctgggtggtgccgcctgctgaagcgcctggctcccggtccccggcacggccctgcgccccaccccggacatgctcagggctgcggccgcccgaagaggagagagcgcgggcctctaggaaggtatggcctcacaagtcttggtctacccaccatatgtttatcaaactcagtcaagtgccttttgtagtgtgaagaaactcaaagtagagccaagcagttgtgtattccaggaaagaaactatccacggacctatgtgaatggtagaaactttggaaattctcatcctcccactaagggtagtgcttttcagacaaagataccatttaatagacctcgaggacacaacttttcattgcagacaagtgctgttgttttgaaaaacactgcaggtgctacaaaggtcatagcagctcaggcacagcaagctcacgtgcaggcacctcagattggggcgtggcgaaacagattgcatttcctagaaggcccccagcgatgtggattgaagcgcaagagtgaggagttggataatcatagcagcgcaatgcagattgtcgatgaattgtccatacttcctgcaatgttgcaaaccaacatgggaaatccagtgacagttgtgacagctaccacaggatcaaaacagaattgtaccactggagaaggtgactatcagttagtacagcatgaagtcttatgctccatgaaaaatacttacgaagtccttgattttcttggtcgaggcacgtttggccaggtagttaaatgctggaaaagagggacaaatgaaattgtagcaatcaaaattttgaagaatcatccttcttatgcccgtcaaggtcaaatagaagtgagcatattagcaaggctcagtactgaaaatgctgatgaatataactttgtacgagcttatgaatgctttcagcaccgtaaccatacttgtttagtctttgagatgctggaacaaaacttgtatgactttctgaaacaaaataaatttagtcccctgccactaaaagtgattcggcccattcttcaacaagtggccactgcactgaaaaaattgaaaagtcttggtttaattcatgctgatctcaagccagagaatattatgttggtggatcctgttcggcagccttacagggttaaagtaatagactttgggtcggccagtcatgtatcaaagactgtttgttcaacatatctacaatctcggtactacagagctccagagattatattggggttgccattttgtgaagccatagacatgtggtcattgggatgtgtgattgcagaattatttcttggatggccgctctacccaggagccttggagtatgatcagattcgatacatttctcagactcaaggtttgccaggagaacagttgttaaatgtgggtactaaatccacaagatttttttgcaaagaaacagatatgtctcattctggttggagattaaagacattggaagagcatgaggcagagacaggaatgaagtctaaagaagccagaaaatacattttcaacagtctggatgatgtagcgcatgtgaacacagtgatggatttggaaggaagtgatcttttggctgagaaagctgatagaagagaatttgttagtctgttgaagaaaatgttgctgattgatgcagatttaagaattactccagctgagaccctgaaccatccttttgttaatatgaaacatcttctagatttccctcatagcaaccatgtaaagtcctgttttcatattatggatatttgtaagtcccacctaaattcatgtgacacaaataatcacaacaaaacttcacttttaagaccagttgcttcaagcagtactgctacactgactgcaaattttactaaaatcggaacattaagaagtcaggcattgaccacatctgctcattcagttgtgcaccatggaatacctctgcaggcaggaactgctcagtttggttgtggtgatgcttttcagcagacattgattatctgtcccccagctattcaaggtattcctgcaacacatggtaaacccaccagttattcaataagggtagataatacagttccacttgtaactcaggccccagctgtgcagccactacagatccgaccaggagttctttctcagacgtggtctggtagaacacagcagatgctggtgcctgcctggcaacaggtgacacccctggctcctgctactactacactaacttctgagagtgtggctggttcacacaggcttggagactgggggaagatgatttcatgcagcaatcattataactcagtgatgccgcagcctcttctgaccaatcagataactttatctgcccctcagccagttagtgtggggattgcacatgttgtctggcctcagcctgccactaccaagaaaaataaacagtgccagaacaggagtaattcattacagaataccaatatcccacattcagcatttatttctccaaagataattaatgggaaagatgtcgaggaagtaagttgtatagaaacacaggacaatcagaactcagaaggagaggcaagaaattgctgtgaaacatctatcagacaggactctgattcatcagtttcagacaaacagcggcaaaccatcattattgccgactccccgagtcctgcagtgagtgtcatcactatcagcagtgacactgatgaggaagagacttcccagagacattcactcagagaatgtaaaggtagtctagattgtgaagcttgccagagcactttgaatattgatcggatgtgttcattaagtagtcctgatagtactctgagtaccagctcctcagggcagtccagcccatccccctgcaagagaccgaatagtatgtcagatgaagagcaagaaagtagttgtgatacggtggatggctctccgacatctgactcttccgggcatgacagtccatttgcagagagcacttttgtggaggacactcatgaaaacacagaattggtatcctctgctgacacagaaaccaagccagctgtctgttctgttgtggtgccaccagtggaactagaaaatggcttaaatgccgatgagcatatggcaaacacagattctatatgccagccattaataaaaggacgatctgcccctggaagattaaaccagccttctgcagtgggtactcgtcagcaaaaattgacatcagcattccagcagcagcatttgaacttcagtcaggttcagcactttggatctgggcatcaagagtggaatggaaactttgggcacagaagacagcaagcttatattcctactagtgttaccagtaatccattcactctttctcatggaagtcccaatcacacagcagtgcatgcccacctggctggaaatacacacctcggaggacagcctactctacttccatacccatcatcagccaccctcagtagtgctgcaccagtggcccacctgttagcctctccgtgtacctcaagacctatgttacagcatccaacttataatatctcccatcccagtggcatagttcaccaagtcccagtgggcttaaatccccgtctgttaccatccccaaccattcatcagactcagtacaaaccaatcttcccaccacattcttacattgcagcatcacctgcatatactggatttccactgagtccaacaaaactcagccagtatccatatatgtgaaaaacagtatattggggaagctcaatgatacaaacatttgattaaaaataaaaacatggtatttaatattagccatggcacaagaaaattatttttgaatcatgtagacttgggtgcaatttaaacaactttgagctttaaaaactcacttttgatgtgttttgcacatttggtataacttgtctttggtcatgttatcttcttatgtagtaactctagacaggtgacttatgggagcagaagtccagttttgctcctgctattttttataaattgccttctaactagtgcaagacacgtctacatttgggaagccattctgtgtacagacttagagcaacagatgcacatatgtcagaattacagcatacaagtgaattgtattatccgtgtcttagtgtataaatgttgggtcacttacctaagaaattgagctattgttctttacatttgcatgtgtcttttgcatgggcaaaatgttgcctagactttgctcttaaatgttgttctaataatctcagctgcattgtaaaccgttcctacacatagtgccttaaatatttgaggttgttaatgttattacctatatataaatgttgaggactgcagcacttaaaattcagacctactatttagtttccttttgatagcgtaatgttcatttttgtttttgtgtggtatgatttcaggtagtagctgtttttttccttattaagagggcagcatgtttgctatagctgaattctgctgtctgatttttcagaatgatctagcttcaagaaaagcaagcagttagtagtgcttaagaaaaattgattcagtatc

SEQ ID NO: 1193 - DNA, 3922 bp, Homo Sapiens
  NM_001048201
atcagagcagctggcagcgcggcgggcagcgtttgccgagcgggcgctccgggtcgcacgcaagtccgcgcggggtccgggccacgcacgcggtttcatcgccatccccagccgggccacgcgcgcaggcagacaagctgttcgcggcgaccggagagcgccgacaccatgtggatccaggttcggaccatggacgggaggcagacccacacggtggactcgctgtccaggctgaccaaggtggaggagctgaggcggaagatccaggagctgttccacgtggagccaggcctgcagaggctgttctacaggggcaaacagatggaggacggccataccctcttcgactacgaggtccgcctgaatgacaccatccagctcctggtccgccagagcctcgtgctcccccacagcaccaaggagcgggactccgagctctccgacaccgactccggctgctgcctgggccagagtgagtcagacaagtcctccacccacggtgaggcggccgccgagactgacagcaggccagccgatgaggacatgtgggatgagacggaattggggctgtacaaggtcaatgagtacgtcgatgctcgggacacgaacatgggggcgtggtttgaggcgcaggtggtcagggtgacgcggaaggccccctcccgggacgagccctgcagctccacgtccaggccggcgctggaggaggacgtcatttaccacgtgaaatacgacgactacccggagaacggcgtggtccagatgaactccagggacgtccgagcgcgcgcccgcaccatcatcaagtggcaggacctggaggtgggccaggtggtcatgctcaactacaaccccgacaaccccaaggagcggggcttctggtacgacgcggagatctccaggaagcgcgagaccaggacggcgcgggaactctacgccaacgtggtgctgggggatgattctctgaacgactgtcggatcatcttcgtggacgaagtcttcaagattgagcggccgggtgaagggagccccatggttgacaaccccatgagacggaagagcgggccgtcctgcaagcactgcaaggacgacgtgaacagactctgccgggtctgcgcctgccacctgtgcgggggccggcaggaccccgacaagcagctcatgtgcgatgagtgcgacatggccttccacatctactgcctggacccgcccctcagcagtgttcccagcgaggacgagtggtactgccctgagtgccggaatgatgccagcgaggtggtactggcgggagagcggctgagagagagcaagaagaaggcgaagatggcctcggccacatcgtcctcacagcgggactggggcaagggcatggcctgtgtgggccgcaccaaggaatgtaccatcgtcccgtccaaccactacggacccatcccggggatccccgtgggcaccatgtggcggttccgagtccaggtcagcgagtcgggtgtccatcggccccacgtggctggcatacacggccggagcaacgacggagcgtactccctagtcctggcggggggctatgaggatgatgtggaccatgggaattttttcacatacacgggtagtggtggtcgagatctttccggcaacaagaggaccgcggaacagtcttgtgatcagaaactcaccaacaccaacagggcgctggctctcaactgctttgctcccatcaatgaccaagaaggggccgaggccaaggactggcggtcggggaagccggtcagggtggtgcgcaatgtcaagggtggcaagaatagcaagtacgcccccgctgagggcaaccgctacgatggcatctacaaggttgtgaaatactggcccgagaaggggaagtccgggtttctcgtgtggcgctaccttctgcggagggacgatgatgagcctggcccttggacgaaggaggggaaggaccggatcaagaagctggggctgaccatgcagtatccagaaggctacctggaagccctggccaaccgagagcgagagaaggagaacagcaagagggaggaggaggagcagcaggaggggggcttcgcgtcccccaggacgggcaagggcaagtggaagcggaagtcggcaggaggtggcccgagcagggccgggtccccgcgccggacatccaagaaaaccaaggtggagccctacagtctcacggcccagcagagcagcctcatcagagaggacaagagcaacgccaagctgtggaatgaggtcctggcgtcactcaaggaccggccggcgagcggcagcccgttccagttgttcctgagtaaagtggaggagacgttccagtgtatctgctgtcaggagctggtgttccggcccatcacgaccgtgtgccagcacaacgtgtgcaaggactgcctggacagatcctttcgggcacaggtgttcagctgccctgcctgccgctacgacctgggccgcagctatgccatgcaggtgaaccagcctctgcagaccgtcctcaaccagctcttccccggctacggcaatggccggtgatctccaagcacttctcgacaggcgttttgctgaaaacgtgtcggagggctcgttcatcggcactgattttgttcttagtgggcttaacttaaacaggtagtgtttcctccgttccctaaaaaggtttgtcttcctttttttttttatttttatttttcaaatctatacattttcaggaatttatgtattctggctaaaagttggacttctcagtattgtgtttagttctttgaaaacataaaagcctgcaatttctcgacaaaacaacacaagattttttaaagatggaatcagaaactacgtggtgtggaggctgttgatgtttctggtgtcaagttctcagaagttgctgccaccaactctttaagaaggcgacaggatcagtccttctctcgggttctggcccccaaggtcagagcaagcatcttcctgacagcattttgtcatctaaagtccagtgacatggttccccgtggtggcccgtggcagcccgtggcatggcgtggctcagctgtctgttgaagttgttgcaaggaaaagaggaaacatctcgggcctagttcaaacctttgcctcaaagccatcccccaccagactgcttagcgtctgagatccgcgtgaaaagtcctctgcccacgagagcagggagttggggccacgcagaaatggcctcaaggggactctgctccacgtggggccaggcgtgtgactgacgctgtccgacgaaggcggccacggacggacgccagcacacgaagtcacgtgcaagtgcctttgattcgttccttctttctaaagacgacagtctttgttgttagcactgaattattgaaaatgtcaaccagattctagaaactgcggtcatccagttcttcctgacaccggatgggtgcttgggaaccgtttgagccttatagatcatttacattcaatttttttaactcagcaagtgagaacttacaagagggtttttttaaaatttttttttctcttaatgaacacattttctaaatgaattttttttgtagttactgtatatgtaccaagaaagatataacgttagggtttggttgtttttgtttttgtattttttttcttttgaaagggtttgttaatttttctaattttaccaaagtttgcagcctatacctcaataaaacagggatattttaaatcacatacctgcagacaaactggagcaatgttatttttaaagggtttttttcacctccttattcttagattattaatgtattagggaagaatgagacaattttgtgtaggctttttctaaagtccagtactttgtccagattttagattctcagaataaatgtttttcacagatagaaaaaaaaaaaaaaaaaaaaaa

SEQ ID NO: 1194 - DNA, 1114 bp, Homo Sapiens
  NM_001048223
ctcgttcccggctcccagggcccgtcggtcccccgggagccctggaggcgcagccccaccccggccggcgcggctcgctcccacgcccccgccgcggcctcgctggagcggacggactgagtcagagggggcgccagcgctgcaggagctgacatggacccaaatcctcgggccgccctggagcgccagcagctccgccttcgggagcggcaaaaattcttcgaggacattttacagccagagacagagtttgtctttcctctgtcccatctgcatctcgagtcgcagagaccccccataggtagtatctcatccatggaagtgaatgtggacacactggagcaagtagaacttattgaccttggggacccggatgcagcagatgtgttcttgccttgcgaagatcctccaccaaccccccagtcgtctgggatggacaaccatttggaggagctgagcctgccggtgcctacatcagacaggaccacatctaggacctcctcctcctcctcctccgactcctccaccaacctgcatagcccaaatccaagtgatgatggagcagatacgcccttggcacagtcggatgaagaggaggaaaggggtgatggaggggcagagcctggagcctgcagctagcagtgggcccctgcctacagactgaccacgctggctattctccacatgagaccacaggcccagccagagcctgtcgggagaagaccagactctttacttgcagtaggcaccagaggtgggaaggatggtgggattgtgtacctttctaagaattaaccctctcctgctttactgctaattttttcctgctgcaaccctcccaccagtttttggcttactcctgagatatgatttgcaaatgaggagagagaagatgaggttggacaagatgccactgcttttcttagcactcttccctcccctaaaccatcccgtagtcttctaatacagtctctcagacaagtgtctctagatggatgtgaactccttaactcatcaagtaaggtggtactcaagccatgctgcctccttacatcctttttggaacagagcacggtataaataataaactaataataatatgccaaccaaaaaa

SEQ ID NO: 1195 - DNA, 457 bp, Homo Sapiens
  NM_001048241
aacttccgcttccggttcctagcgttaactgcgaccggggttcagcgctcgggtgaggagctggtggcgtcggcaggttcgaggcgattcgagctccagctaggatgatcgaggttgtttgcaacgaccgtctggggaagaaggtccgcgttaaatgcaacacggatgataccatcggggaccttaagaagctgattgcagcccaaactggtacccgttggaacaagattgtcctgaagaagtggtacacgatttttaaggaccacgtgtctctgggggactatgaaatccacgatgggatgaacctggagctttattatcaatagatgagaatcctcatcttcctgccccgctttcctctcccatcctcatcccccacactgggatagatgcttgtttgtaaaaactcaccttaataaagacttagatgttgctttgtaaaaaaaaaaaaaaaaaa

SEQ ID NO: 1196 - DNA, 2079 bp, Homo Sapiens
  NM_001048251
aagaaagtcgcaagaaaactccggcccccaagaaaaagagagggcatgggttgcggagccgacatcacggccggggtctttgctgtttagacgcctgggttcccggatcccagacacgcgcacgggcaggaagttagaccggagacagcgagtatagacagcccttctggataggggcagacggcccgggtttccgcttccctccgggcgcgagaagaggggagccaggccgagccccggccctaccgccgccgccgccatgtggcccccagaccccgaccccgacccggaccccgagcctgccggcggctcccgtcccggccccgcggtccccgggctccgcgccctgctgccggcgcgggctttcctctgctctctcaaaggccgcctcctgctggccgagtcgggtctctcattcatcacttttatctgctatgtggcgtcctcagcatctgccttcctcacagcgcctctgctggagttcctgctggccttgtacttcctctttgctgatgccatgcagctgaatgacaagtggcagggcttgtgctggcccatgatggacttcctgcgctgtgtcaccgcggccctcatctactttgctatctccatcacggccatcgccaagtactcggatggggcttccaaagccgctggggtgtttggcttctttgctaccatcgtgtttgcaactgatttctacctgatctttaacgacgtggccaaattcctcaaacaaggggactctgcagatgagaccacagcccacaagacagaagaagagaattccgactcggactctgactgaaggcctggcgggtgccttggcaacctgagccacacaggcctccacccctgcgcctcacaggggtcgctggcgttggagcggaggcctggacttctgagttgcagagggggctgcggacacagcaggccccctacagcctcaggttctgcctgagcccagcctaccaggcttgcccctcagctcagcactgttgaccacgctgcgtatgagggcatcttgggtatcccactccttctccccatttctgtcccacaggccttcagccctttaacgtctctgccaaaaaccagcacaaggagacaaagcagagccttgtctgtatctgggcagcaggtgttccatgctgctaggtggcgggggtcgggggtcttctgtttcactaacaggaacaaagacagaaaccatgacagggctgccccgccaggccccggtgggtttgtctgcacttggtgctcctgcccacaccagccactttggtgacaatgacccttccaagaatctttggttcaaggagcaccagttccctcttcattcttgaagcagggagaaattgacctttgccttgtcgcccaggaagtggggctcggcacccataactaacacctcccacccttggaaaccatgtcttctgggggtgagatgaccattctgggtctaagactgtttcaaagaagagctcatagactgactggtccagaagacagagggtacaacagtggcatcacagtgacagtgtcatggggagctgggcgggcccagccaaaccctccttcttcctagagcccagccagcaggcaggagttcctggaccctcaggacagtgaacttccagacctcagggcaggtctatgggccactgcaggagatgagaccagccttctgtgttcacctaacgatttatactgtgtatctgtctttgatggaattttgtaactttttatatttttttatgcaaaagcagcttcttaacagatggcattttctgtgactctaggcctcacaaaagagccagagttctggacccatgtttggagcatttgtagccttattctcttgcgtgtgaatctcttaccctgaaaaaaagccataatgaattaagccagactgaccacttgcttggagtgtgtgcttgaaaaaaccagagcaatactgttgggtattgtatcaggcttcagtacaaactggtaacaccaatgtggatcctgacagctttcagttttagcaaaaatacacgtgaaatctgactaccatttaaaaaaaaaaaaaaaaaa

SEQ ID NO: 1197 - DNA, 1577 bp, Homo Sapiens
  NM_001062
ggctgaggcaacctgaaggaggagctctcattaccttctgcccatcacttaataaatagccagccaattcatcaacattctggtacactgttggagagatgagacagtcacaccagctgcccctagtggggctcttactgttttcttttattccaagccaactatgcgagatttgtgaggtaagtgaagaaaactacatccgcctaaaacctctgttgaatacaatgatccagtcaaactataacaggggaaccagcgctgtcaatgttgtgttgtccctcaaacttgttggaatccagatccaaaccctgatgcaaaagatgatccaacaaatcaaatacaatgtgaaaagcagattgtcagatgtaagctcgggagagcttgccttgattatactggctttgggagtatgtcgtaacgctgaggaaaacttaatatatgattaccacctgatcgacaagctagaaaataaattccaagcagaaattgaaaatatggaagcacacaatggcactcccctgactaactactaccagctcagcctggacgttttggccttgtgtctgttcaatgggaactactcaaccgccgaagttgtcaaccacttcactcctgaaaataaaaactattattttggtagccagttctcagtagatactggtgcaatggctgtcctggctctgacctgtgtgaagaagagtctaataaatgggcagatcaaagcagatgaaggcagtttaaagaacatcagtatttatacaaagtcactggtagaaaagattctgtctgagaaaaaagaaaatggtctcattggaaacacatttagcacaggagaagccatgcaggccctctttgtatcatcagactattataatgaaaatgactggaattgccaacaaactctgaatacagtgctcacggaaatttctcaaggagcattcagcaatccaaacgctgcagcccaggtcttacctgccctgatgggaaagaccttcttggatattaacaaagactcttcttgcgtctctgcttcaggtaacttcaacatctccgctgatgagcctataactgtgacacctcctgactcacaatcatatatctccgtcaattactctgtgagaatcaatgaaacatatttcaccaatgtcactgtgctaaatggttctgtcttcctcagtgtgatggagaaagcccagaaaatgaatgatactatatttggtttcacaatggaggagcgctcatgggggccctatatcacctgtattcagggcctatgtgccaacaataatgacagaacctactgggaacttctgagtggaggcgaaccactgagccaaggagctggtagttacgttgtccgcaatggagaaaacttggaggttcgctggagcaaatactaataagcccaaactttcctcagctgcataaaatccatttgcagtggagttccatgtttattgtccttatgccttcttcttcatttatcccagtacgagcaggagagttaataacctccccttctctctctacatgttcaataaaagttgttgaaagattaacaactataaaaaaaaaaa

SEQ ID NO: 1198 - DNA, 2179 bp, Homo Sapiens
  NM_001064
gatccgagccccgcctcctccccctgccccgcctctcccatccccgccccgccccgcccggcgacttaacgcgcccccgccccgcgcccggcctcggcagccgcctgtcgccgcgggagcagccgctatctctgtgtgtccgcgtgtgcgcccggtccccgcctgccgcaccatggagagctaccacaagcctgaccagcagaagctgcaggccttgaaggacacggccaaccgcctacgtatcagctccatccaggccaccactgcggcgggctctggccaccccacgtcatgctgcagcgccgcagagatcatggctgtcctctttttccacaccatgcgctacaagtcccaggacccccggaatccgcacaatgaccgctttgtgctctccaagggccatgcagctcccatcctctacgcggtctgggctgaagctggtttcctggccgaggcggagctgctgaacctgaggaagatcagctccgacttggacgggcacccggtcccgaaacaagctttcaccgacgtggccactggctccctgggccagggcctcggggccgcttgtgggatggcctacaccggcaaatacttcgacaaggccagctaccgagtctattgcttgctgggagacggggagctgtcagagggctctgtatgggaggccatggccttcgccagcatctataagctggacaaccttgtggccattctagacatcaatcgcctgggccagagtgacccggccccactgcagcaccagatggacatctaccagaagcggtgcgaggccttcggttggcatgccatcatcgtggatggacacagcgtggaggagctgtgcaaggcctttggccaggccaagcaccagccaacagccatcattgccaagaccttcaagggccgagggatcacgggggtagaagataaggagtcttggcatgggaagcccctccccaaaaacatggctgagcagatcatccaggagatctacagccagatccagagcaaaaagaagatcctggcaacccctccacaggaggacgcaccctcagtggacattgccaacatccgcatgcccagcctgcccagctacaaagttggggacaagatagccacccgcaaggcctacgggcaggcactggccaagctgggccatgccagtgaccgcatcatcgccctggatggggacaccaaaaattccaccttctcggagatcttcaaaaaggagcacccggaccgcttcatcgagtgctacattgctgagcagaacatggtgagcatcgcggtgggctgtgccacccgcaacaggacggtgcccttctgcagcacttttgcagccttcttcacgcgggcctttgaccagattcgcatggccgccatctccgagagcaacatcaacctctgcggctcccactgcggcgtttccatcggggaagacgggccctcccagatggccctagaagatctggctatgtttcggtcagtccccacatcaactgtcttttacccaagtgatggcgttgctacagagaaggcagtggaactagccgccaatacaaagggtatctgcttcatccggaccagccgcccagaaaatgccatcatctataacaacaatgaggacttccaggtcggacaagccaaggtggtcctgaagagcaaggatgaccaggtgaccgttatcggggctggggtgaccctgcacgaggccttggccgctgccgaactgctgaagaaagaaaagatcaacatccgcgtgctggaccccttcaccatcaagcccctggacagaaaactcattctcgacagcgctcgtgccaccaagggcaggatcctcaccgtggaggaccattattatgaaggtggcattggtgaggctgtgtccagtgcagtagtgggcgagcctggcatcactgtcacccacctggcagttaaccgggtaccaagaagtgggaagccggctgagctgctgaagatgtttggtatcgacagggatgccattgcacaagctgtgaggggcctcatcaccaaggcctagggcgggtatgaagtgtggggcgggggtctatacattcctgagattctgggaaaggtgctcaaagatgtactgagaggaggggtaaatatatgttttgagaaaaatgaattggccctgaaaaaaaaaaaaaaaaaa

SEQ ID NO: 1199 - DNA, 2258 bp, Homo Sapiens
  NM_001065
ctcctccagctcttcctgtcccgctgttgcaacactgcctcactcttcccctcccaccttctctcccctcctctctgctttaattttctcagaattctctggactgaggctccagttctggcctttggggttcaagatcactgggaccaggccgtgatctctatgcccgagtctcaaccctcaactgtcaccccaaggcacttgggacgtcctggacagaccgagtcccgggaagccccagcactgccgctgccacactgccctgagcccaaatgggggagtgagaggccatagctgtctggcatgggcctctccaccgtgcctgacctgctgctgccactggtgctcctggagctgttggtgggaatatacccctcaggggttattggactggtccctcacctaggggacagggagaagagagatagtgtgtgtccccaaggaaaatatatccaccctcaaaataattcgatttgctgtaccaagtgccacaaaggaacctacttgtacaatgactgtccaggcccggggcaggatacggactgcagggagtgtgagagcggctccttcaccgcttcagaaaaccacctcagacactgcctcagctgctccaaatgccgaaaggaaatgggtcaggtggagatctcttcttgcacagtggaccgggacaccgtgtgtggctgcaggaagaaccagtaccggcattattggagtgaaaaccttttccagtgcttcaattgcagcctctgcctcaatgggaccgtgcacctctcctgccaggagaaacagaacaccgtgtgcacctgccatgcaggtttctttctaagagaaaacgagtgtgtctcctgtagtaactgtaagaaaagcctggagtgcacgaagttgtgcctaccccagattgagaatgttaagggcactgaggactcaggcaccacagtgctgttgcccctggtcattttctttggtctttgccttttatccctcctcttcattggtttaatgtatcgctaccaacggtggaagtccaagctctactccattgtttgtgggaaatcgacacctgaaaaagagggggagcttgaaggaactactactaagcccctggccccaaacccaagcttcagtcccactccaggcttcacccccaccctgggcttcagtcccgtgcccagttccaccttcacctccagctccacctatacccccggtgactgtcccaactttgcggctccccgcagagaggtggcaccaccctatcagggggctgaccccatccttgcgacagccctcgcctccgaccccatccccaacccccttcagaagtgggaggacagcgcccacaagccacagagcctagacactgatgaccccgcgacgctgtacgccgtggtggagaacgtgcccccgttgcgctggaaggaattcgtgcggcgcctagggctgagcgaccacgagatcgatcggctggagctgcagaacgggcgctgcctgcgcgaggcgcaatacagcatgctggcgacctggaggcggcgcacgccgcggcgcgaggccacgctggagctgctgggacgcgtgctccgcgacatggacctgctgggctgcctggaggacatcgaggaggcgctttgcggccccgccgccctcccgcccgcgcccagtcttctcagatgaggctgcgcccctgcgggcagctctaaggaccgtcctgcgagatcgccttccaaccccacttttttctggaaaggaggggtcctgcaggggcaagcaggagctagcagccgcctacttggtgctaacccctcgatgtacatagcttttctcagctgcctgcgcgccgccgacagtcagcgctgtgcgcgcggagagaggtgcgccgtgggctcaagagcctgagtgggtggtttgcgaggatgagggacgctatgcctcatgcccgttttgggtgtcctcaccagcaaggctgctcgggggcccctggttcgtccctgagcctttttcacagtgcataagcagttttttttgtttttgttttgttttgttttgtttttaaatcaatcatgttacactaatagaaacttggcactcctgtgccctctgcctggacaagcacatagcaagctgaactgtcctaaggcaggggcgagcacggaacaatggggccttcagctggagctgtggacttttgtacatacactaaaattctgaagttaaagctctgctcttggaaaaaaaaaaaaaaaaaaaaaaaaaaaaaaaaa

SEQ ID NO: 1200 - DNA, 5753 bp, Homo Sapiens
  NM_001067
gattggctggtctgcttcgggcgggctaaaggaaggttcaagtggagctctcctaaccgacgcgcgtctgtggagaagcggcttggtcgggggtggtctcgtggggtcctgcctgtttagtcgctttcagggttcttgagccccttcacgaccgtcaccatggaagtgtcaccattgcagcctgtaaatgaaaatatgcaagtcaacaaaataaagaaaaatgaagatgctaagaaaagactgtctgttgaaagaatctatcaaaagaaaacacaattggaacatattttgctccgcccagacacctacattggttctgtggaattagtgacccagcaaatgtgggtttacgatgaagatgttggcattaactatagggaagtcacttttgttcctggtttgtacaaaatctttgatgagattctagttaatgctgcggacaacaaacaaagggacccaaaaatgtcttgtattagagtcacaattgatccggaaaacaatttaattagtatatggaataatggaaaaggtattcctgttgttgaacacaaagttgaaaagatgtatgtcccagctctcatatttggacagctcctaacttctagtaactatgatgatgatgaaaagaaagtgacaggtggtcgaaatggctatggagccaaattgtgtaacatattcagtaccaaatttactgtggaaacagccagtagagaatacaagaaaatgttcaaacagacatggatggataatatgggaagagctggtgagatggaactcaagcccttcaatggagaagattatacatgtatcacctttcagcctgatttgtctaagtttaaaatgcaaagcctggacaaagatattgttgcactaatggtcagaagagcatatgatattgctggatccaccaaagatgtcaaagtctttcttaatggaaataaactgccagtaaaaggatttcgtagttatgtggacatgtatttgaaggacaagttggatgaaactggtaactccttgaaagtaatacatgaacaagtaaaccacaggtgggaagtgtgtttaactatgagtgaaaaaggctttcagcaaattagctttgtcaacagcattgctacatccaagggtggcagacatgttgattatgtagctgatcagattgtgactaaacttgttgatgttgtgaagaagaagaacaagggtggtgttgcagtaaaagcacatcaggtgaaaaatcacatgtggatttttgtaaatgccttaattgaaaacccaacctttgactctcagacaaaagaaaacatgactttacaacccaagagctttggatcaacatgccaattgagtgaaaaatttatcaaagctgccattggctgtggtattgtagaaagcatactaaactgggtgaagtttaaggcccaagtccagttaaacaagaagtgttcagctgtaaaacataatagaatcaagggaattcccaaactcgatgatgccaatgatgcagggggccgaaactccactgagtgtacgcttatcctgactgagggagattcagccaaaactttggctgtttcaggccttggtgtggttgggagagacaaatatggggttttccctcttagaggaaaaatactcaatgttcgagaagcttctcataagcagatcatggaaaatgctgagattaacaatatcatcaagattgtgggtcttcagtacaagaaaaactatgaagatgaagattcattgaagacgcttcgttatgggaagataatgattatgacagatcaggaccaagatggttcccacatcaaaggcttgctgattaattttatccatcacaactggccctctcttctgcgacatcgttttctggaggaatttatcactcccattgtaaaggtatctaaaaacaagcaagaaatggcattttacagccttcctgaatttgaagagtggaagagttctactccaaatcataaaaaatggaaagtcaaatattacaaaggtttgggcaccagcacatcaaaggaagctaaagaatactttgcagatatgaaaagacatcgtatccagttcaaatattctggtcctgaagatgatgctgctatcagcctggcctttagcaaaaaacagatagatgatcgaaaggaatggttaactaatttcatggaggatagaagacaacgaaagttacttgggcttcctgaggattacttgtatggacaaactaccacatatctgacatataatgacttcatcaacaaggaacttatcttgttctcaaattctgataacgagagatctatcccttctatggtggatggtttgaaaccaggtcagagaaaggttttgtttacttgcttcaaacggaatgacaagcgagaagtaaaggttgcccaattagctggatcagtggctgaaatgtcttcttatcatcatggtgagatgtcactaatgatgaccattatcaatttggctcagaattttgtgggtagcaataatctaaacctcttgcagcccattggtcagtttggtaccaggctacatggtggcaaggattctgctagtccacgatacatctttacaatgctcagctctttggctcgattgttatttccaccaaaagatgatcacacgttgaagtttttatatgatgacaaccagcgtgttgagcctgaatggtacattcctattattcccatggtgctgataaatggtgctgaaggaatcggtactgggtggtcctgcaaaatccccaactttgatgtgcgtgaaattgtaaataacatcaggcgtttgatggatggagaagaacctttgccaatgcttccaagttacaagaacttcaagggtactattgaagaactggctccaaatcaatatgtgattagtggtgaagtagctattcttaattctacaaccattgaaatctcagagcttcccgtcagaacatggacccagacatacaaagaacaagttctagaacccatgttgaatggcaccgagaagacacctcctctcataacagactatagggaataccatacagataccactgtgaaatttgttgtgaagatgactgaagaaaaactggcagaggcagagagagttggactacacaaagtcttcaaactccaaactagtctcacatgcaactctatggtgctttttgaccacgtaggctgtttaaagaaatatgacacggtgttggatattctaagagacttttttgaactcagacttaaatattatggattaagaaaagaatggctcctaggaatgcttggtgctgaatctgctaaactgaataatcaggctcgctttatcttagagaaaatagatggcaaaataatcattgaaaataagcctaagaaagaattaattaaagttctgattcagaggggatatgattcggatcctgtgaaggcctggaaagaagcccagcaaaaggttccagatgaagaagaaaatgaagagagtgacaacgaaaaggaaactgaaaagagtgactccgtaacagattctggaccaaccttcaactatcttcttgatatgcccctttggtatttaaccaaggaaaagaaagatgaactctgcaggctaagaaatgaaaaagaacaagagctggacacattaaaaagaaagagtccatcagatttgtggaaagaagacttggctacatttattgaagaattggaggctgttgaagccaaggaaaaacaagatgaacaagtcggacttcctgggaaaggggggaaggccaaggggaaaaaaacacaaatggctgaagttttgccttctccgcgtggtcaaagagtcattccacgaataaccatagaaatgaaagcagaggcagaaaagaaaaataaaaagaaaattaagaatgaaaatactgaaggaagccctcaagaagatggtgtggaactagaaggcctaaaacaaagattagaaaagaaacagaaaagagaaccaggtacaaagacaaagaaacaaactacattggcatttaagccaatcaaaaaaggaaagaagagaaatccctggtctgattcagaatcagataggagcagtgacgaaagtaattttgatgtccctccacgagaaacagagccacggagagcagcaacaaaaacaaaattcacaatggatttggattcagatgaagatttctcagattttgatgaaaaaactgatgatgaagattttgtcccatcagatgctagtccacctaagaccaaaacttccccaaaacttagtaacaaagaactgaaaccacagaaaagtgtcgtgtcagaccttgaagctgatgatgttaagggcagtgtaccactgtcttcaagccctcctgctacacatttcccagatgaaactgaaattacaaacccagttcctaaaaagaatgtgacagtgaagaagacagcagcaaaaagtcagtcttccacctccactaccggtgccaaaaaaagggctgccccaaaaggaactaaaagggatccagctttgaattctggtgtctctcaaaagcctgatcctgccaaaaccaagaatcgccgcaaaaggaagccatccacttctgatgattctgactctaattttgagaaaattgtttcgaaagcagtcacaagcaagaaatccaagggggagagtgatgacttccatatggactttgactcagctgtggctcctcgggcaaaatctgtacgggcaaagaaacctataaagtacctggaagagtcagatgaagatgatctgttttaaaatgtgaggcgattattttaagtaattatcttaccaagcccaagactggttttaaagttacctgaagctcttaacttcctcccctctgaatttagtttggggaaggtgtttttagtacaagacatcaaagtgaagtaaagcccaagtgttctttagctttttataatactgtctaaatagtgaccatctcatgggcattgttttcttctctgctttgtctgtgttttgagtctgctttcttttgtctttaaaacctgatttttaagttcttctgaactgtagaaatagctatctgatcacttcagcgtaaagcagtgtgtttattaaccatccactaagctaaaactagagcagtttgatttaaaagtgtcactcttcctccttttctactttcagtagatatgagatagagcataattatctgttttatcttagttttatacataatttaccatcagatagaactttatggttctagtacagatactctactacactcagcctcttatgtgccaagtttttctttaagcaatgagaaattgctcatgttcttcatcttctcaaatcatcagaggccgaagaaaaacactttggctgtgtctataacttgacacagtcaatagaatgaagaaaattagagtagttatgtgattatttcagctcttgacctgtcccctctggctgcctctgagtctgaatctcccaaagagagaaaccaatttctaagaggactggattgcagaagactcggggacaacatttgatccaagatcttaaatgttatattgataaccatgctcagcaatgagctattagattcattttgggaaatctccataatttcaatttgtaaactttgttaagacctgtctacattgttatatgtgtgtgacttgagtaatgttatcaacgtttttgtaaatatttactatgtttttctattagctaaattccaacaattttgtactttaataaaatgttctaaacattgcaaccca

SEQ ID NO: 1201 - DNA, 5189 bp, Homo Sapiens
  NM_001068
atggccaagtcgggtggctgcggcgcgggagccggcgtgggcggcggcaacggggcactgacctgggtgaacaatgctgcaaaaaaagaagagtcagaaactgccaacaaaaatgattcttcaaagaagttgtctgttgagagagtgtatcagaagaagacacaacttgaacacattcttcttcgtcctgatacatatattgggtcagtggagccattgacgcagttcatgtgggtgtatgatgaagatgtaggaatgaattgcagggaggttacctttgtgccaggtttatacaagatctttgatgaaattttggttaatgctgctgacaataaacagagggataagaacatgacttgtattaaagtttctattgatcctgaatctaacattataagcatttggaataatgggaaaggcattccagtagtagaacacaaggtagagaaagtttatgttcctgctttaatttttggacagcttttaacatccagtaactatgatgatgatgagaaaaaagttacaggtggtcgtaatggttatggtgcaaaactttgtaatattttcagtacaaagtttacagtagaaacagcttgcaaagaatacaaacacagttttaagcagacatggatgaataatatgatgaagacttctgaagccaaaattaaacattttgatggtgaagattacacatgcataacattccaaccagatctgtccaaatttaagatggaaaaacttgacaaggatattgtggccctcatgactagaagggcatatgatttggctggttcgtgtagaggggtcaaggtcatgtttaatggaaagaaattgcctgtaaatggatttcgcagttatgtagatctttatgtgaaagacaaattggatgaaactggggtggccctgaaagttattcatgagcttgcaaatgaaagatgggatgtttgtctcacattgagtgaaaaaggattccagcaaatcagctttgtaaatagtattgcaactacaaaaggtggacggcacgtggattatgtggtagatcaagttgttggtaaactgattgaagtagttaagaaaaagaacaaagctggtgtatcagtgaaaccatttcaagtaaaaaaccatatatgggtttttattaattgccttattgaaaatccaacttttgattctcagactaaggaaaacatgactctgcagcccaaaagttttgggtctaaatgccagctgtcagaaaaattttttaaagcagcctctaattgtggcattgtagaaagtatcctgaactgggtgaaatttaaggctcagactcagctgaataagaagtgttcatcagtaaaatacagtaaaatcaaaggtattcccaaactggatgatgctaatgatgctggtggtaaacattccctggagtgtacactgatattaacagagggagactctgccaaatcactggctgtgtctggattaggtgtgattggacgagacagatacggagtttttccactcaggggcaaaattcttaatgtacgggaagcttctcataaacagatcatggaaaatgctgaaataaataatattattaaaatagttggtctacaatataagaaaagttacgatgatgcagaatctctgaaaaccttacgctatggaaagattatgattatgaccgatcaggatcaagatggttctcacataaaaggcctgcttattaatttcatccatcacaattggccatcacttttgaagcatggttttcttgaagagttcattactcctattgtaaaggcaagcaaaaataagcaggaactttccttctacagtattcctgaatttgacgaatggaaaaaacatatagaaaaccagaaagcctggaaaataaagtactataaaggattgggtactagtacagctaaagaagcaaaggaatattttgctgatatggaaaggcatcgcatcttgtttagatatgctggtcctgaagatgatgctgccattaccttggcatttagtaagaagaagattgatgacagaaaagaatggttaacaaattttatggaagaccggagacagcgtaggctacatggcttaccagagcaatttttatatggtactgcaacaaagcatttgacttataatgatttcatcaacaaggaattgattctcttctcaaactcagacaatgaaagatctataccatctcttgttgatggctttaaacctggccagcggaaagttttatttacctgtttcaagaggaatgataaacgtgaagtaaaagttgcccagttggctggctctgttgctgagatgtcggcttatcatcatggagaacaagcattgatgatgactattgtgaatttggctcagaactttgtgggaagtaacaacattaacttgcttcagcctattggtcagtttggaactcggcttcatggtggcaaagatgctgcaagccctcgttatattttcacaatgttaagcactttagcaaggctactttttcctgctgtggatgacaacctccttaagttcctttatgatgataatcaacgtgtagagcctgagtggtatattcctataattcccatggttttaataaatggtgctgagggcattggtactggatgggcttgtaaactacccaactatgatgctagggaaattgtgaacaatgtcagacgaatgctagatggcctggatcctcatcccatgcttccaaactacaaaaactttaaaggcacgattcaagaacttggtcaaaaccagtatgcagtcagtggtgaaatatttgtagtggacagaaacacagtagaaattacagagcttccagttagaacttggacacaggtatataaagaacaggttttagaacctatgctaaatggaacagataaaacaccagcattaatttctgattataaagaatatcatactgacacaactgtgaaatttgtggtgaaaatgactgaagagaaactagcacaagcagaagctgctggactgcataaagtttttaaacttcaaactactcttacttgtaattccatggtactttttgatcatatgggatgtctgaagaaatatgaaactgtgcaagacattctgaaagaattctttgatttacgattaagttattacggtttacgtaaggagtggcttgtgggaatgttgggagcagaatctacaaagcttaacaatcaagcccgtttcattttagagaagatacaagggaaaattactatagagaataggtcaaagaaagatttgattcaaatgttagtccagagaggttatgaatctgacccagtgaaagcctggaaagaagcacaagaaaaggcagcagaagaggatgaaacacaaaaccagcatgatgatagttcctccgattcaggaactccttcaggcccagattttaattatattttaaatatgtctctgtggtctcttactaaagaaaaagttgaagaactgattaaacagagagatgcaaaagggcgagaggtcaatgatcttaaaagaaaatctccttcagatctttggaaagaggatttagcggcatttgttgaagaactggataaagtggaatctcaagaacgagaagatgttctggctggaatgtctggaaaagcaattaaaggtaaagttggcaaacctaaggtgaagaaactccagttggaagagacaatgccctcaccttatggcagaagaataattcctgaaattacagctatgaaggcagatgccagcaaaaagttgctgaagaagaagaagggtgatcttgatactgcagcagtaaaagtggaatttgatgaagaattcagtggagcaccagtagaaggtgcaggagaagaggcattgactccatcagttcctataaataaaggtcccaaacctaagagggagaagaaggagcctggtaccagagtgagaaaaacacctacatcatctggtaaacctagtgcaaagaaagtgaagaaacggaatccttggtcagatgatgaatccaagtcagaaagtgatttggaagaaacagaacctgtggttattccaagagattctttgcttaggagagcagcagccgaaagacctaaatacacatttgatttctcagaagaagaggatgatgatgctgatgatgatgatgatgacaataatgatttagaggaattgaaagttaaagcatctcccataacaaatgatggggaagatgaatttgttccttcagatgggttagataaagatgaatatacattttcaccaggcaaatcaaaagccactccagaaaaatctttgcatgacaaaaaaagtcaggattttggaaatctcttctcatttccttcatattctcagaagtcagaagatgattcagctaaatttgacagtaatgaagaagattctgcttctgttttttcaccatcatttggtctgaaacagacagataaagttccaagtaaaacggtagctgctaaaaagggaaaaccgtcttcagatacagtccctaagcccaagagagccccaaaacagaagaaagtagtagaggctgtaaactctgactcggattcagaatttggcattccaaagaagactacaacaccaaaaggtaaaggccgaggggcaaagaaaaggaaagcatctggctctgaaaatgaaggcgattataaccctggcaggaaaacatccaaaacaacaagcaagaaaccgaagaagacatcttttgatcaggattcagatgtggacatcttcccctcagacttccctactgagccaccttctctgccacgaaccggtcgggctaggaaagaagtaaaatattttgcagagtctgatgaagaagaagatgatgttgattttgcaatgtttaattaagtgcccaaagagcacaaacatttttcaacaaatatcttgtgttgtccttttgtcttctctgtctcagacttttgtacatctggcttattttaatgtgatgatgtaattgacggttttttattattgtggtaggccttttaacattttgttcttacacatacagttttatgctcttttttactcattgaaatgtcacgtactgtctgattggcttgtagaattgttatagactgccgtgcattagcacagattttaattgtcatggttacaaactacagacctgctttttgaaatgaaatttaaacattaaaaatggaactgtg

SEQ ID NO: 1202 - DNA, 1603 bp, Homo Sapiens
  NM_001071
cgggacggccgcgggaaaaggcgcgcggaaggggtcctgccaccgcgccacttggcctgcctccgtcccgccgcgccacttggcctgcctccgtcccgccgcgccacttcgcctgcctccgtcccccgcccgccgcgccatgcctgtggccggctcggagctgccgcgccggcccttgccccccgccgcacaggagcgggacgccgagccgcgtccgccgcacggggagctgcagtacctggggcagatccaacacatcctccgctgcggcgtcaggaaggacgaccgcacgggcaccggcaccctgtcggtattcggcatgcaggcgcgctacagcctgagagatgaattccctctgctgacaaccaaacgtgtgttctggaagggtgttttggaggagttgctgtggtttatcaagggatccacaaatgctaaagagctgtcttccaagggagtgaaaatctgggatgccaatggatcccgagactttttggacagcctgggattctccaccagagaagaaggggacttgggcccagtttatggcttccagtggaggcattttggggcagaatacagagatatggaatcagattattcaggacagggagttgaccaactgcaaagagtgattgacaccatcaaaaccaaccctgacgacagaagaatcatcatgtgcgcttggaatccaagagatcttcctctgatggcgctgcctccatgccatgccctctgccagttctatgtggtgaacagtgagctgtcctgccagctgtaccagagatcgggagacatgggcctcggtgtgcctttcaacatcgccagctacgccctgctcacgtacatgattgcgcacatcacgggcctgaagccaggtgactttatacacactttgggagatgcacatatttacctgaatcacatcgagccactgaaaattcagcttcagcgagaacccagacctttcccaaagctcaggattcttcgaaaagttgagaaaattgatgacttcaaagctgaagactttcagattgaagggtacaatccgcatccaactattaaaatggaaatggctgtttagggtgctttcaaaggagctcgaaggatattgtcagtctttaggggttgggctggatgccgaggtaaaagttctttttgctctaaaagaaaaaggaactaggtcaaaaatctgtccgtgacctatcagttattaatttttaaggatgttgccactggcaaatgtaactgtgccagttctttccataataaaaggctttgagttaactcactgagggtatctgacaatgctgaggttatgaacaaagtgaggagaatgaaatgtatgtgctcttagcaaaaacatgtatgtgcatttcaatcccacgtacttataaagaaggttggtgaatttcacaagctatttttggaatatttttagaatattttaagaatttcacaagctattccctcaaatctgagggagctgagtaacaccatcgatcatgatgtagagtgtggttatgaactttaaagttatagttgttttatatgttgctataataaagaagtgttctgcattcgtcaaaaaaaaaaaaaaaaaaaa

SEQ ID NO: 1203 - DNA, 4159 bp, Homo Sapiens
  NM_001075098
gcgtcctcgcctattggctgcgcgggtcccgccctccccctgcccctccccgcccttgctgggatgaccccgggggcgagtgcccggccagtgtgctcccgaagcgggctgcggttccgctcgtatcaggcttcatggcggcgcggccactgtcccggatgctgcggcggcttctgaggtccagcgcccggagctgcagctcaggggctccggtgacccagccctgccccggggagtccgcgcgagctgcctcggaggaggtgtccaggcggaggcagttcctgcgggagcatgcggcccccttctccgccttcctcacagacagcttcggccggcagcacagctacctgcggatctccctcacagagaagtgcaacctcagatgtcagtactgcatgcccgaggagggggtcccgctgacccccaaagccaacctgctgaccacagaggagatcctgaccctcgcccggctctttgtgaaggaaggcatcgacaagatccggctcacaggtggagagccgcttatccggccggacgtggtggacattgtggcccagctccagcggctggaagggctgagaaccataggtgttaccaccaatggcatcaacctggcccggctactgccccagcttcagaaggctggtctcagtgccatcaacatcagcctggacaccctggtgcctgccaagtttgagttcattgtccgcaggaaaggcttccacaaggtcatggagggcatccacaaggccatcgagctgggctacaaccctgtgaaggtgaactgtgtggtgatgcgaggccttaacgaggatgaactcctggactttgcggccttgactgagggcctccccctggatgtgcgcttcatagagtatatgccctttgatggcaacaagtggaacttcaagaagatggtcagctataaggagatgctagacactgtccggcagcagtggccagagctggagaaggtgccagaggaggaatccagcacagccaaggcctttaaaatccctggcttccaaggccagatcagcttcatcacatccatgtctgagcatttctgtgggacctgcaaccgcctgcgaatcacagctgatgggaacctcaaggtctgcctctttggaaactctgaggtatccctgcgggatcacctgcgagctggggcctctgagcaggagctgctgagaatcattggggctgctgtgggcaggaagaagcggcagcatgcaggcatgttcagtatttcccagatgaagaaccggcccatgatcctcatcggtgggtgacccatcaagttatttttgatgttccccaattccccaccagccaatccaagcattttctcctgggacccgctccatgttcagggtctaagacccagaatgagtttctccagccaggtggccactttatggaaaggatgcagggtcccccagacccctcctctagcccagcagcggctggggtctggctcctttcagagacactacacttcccgtgcagactcagatgccaactcaaagtgccttagcccaggttcctgggcttctgctgccccctcaggaccccagctaacctcagaacaactaactcatgtggactcggaaggacgggcagctatggtagatgtgggcaggaagccagacacagagcgggtggctgtggcttcagccgtggtcctcctgggaccggtagccttcaagcttgtccagcagaaccagctcaagaaaggagatgccctagtggtggcccagctggctggagtccaggcagccaaggtgaccagccagctgatccctctgtgccaccacgtggccctgagccacatccaggtgcagctggagctggacagcacacgccatgccgtgaagatccaggcatcttgccgggctcggggccccaccggggtggagatggaggccctgacctctgctgcagtggccgccctcaccctgtatgacatgtgcaaggctgtcagcagggacatcgtgttggaggagatcaagctcattagcaagactggtggtcagcggggggacttccatcgggcttagcacctgcccttctcacccatggcccacccaggcctggagctgggatgcaatgtaggctgagggaaagacgtcaggttcctttaatcacagtcactgtttgtttaccttgagcagtaaacccgaagtcagcctgctctactactaacaaacaggcctgctgctagatgatctctaatgaccaatggggcttcctttctatagggaggataccagcaggcccttaagccttccaggacactaaggtcgtgggagcgggactgcaacaagcaatgccagataactgagaaatcatgttctttgtggactatttcagacaaccaggttccgacagtccagcccagaacttttccttctcattttgggttttctcttctcctgctttcctggggagagattaagcgctcattaagcagaggagcccactttgaggagagcaaagcacaagcttgcctgaagaatggatcccaacttctccccggcagctctgcctccctaagtctgtgaagccgcagccctgccctgtcctgtcctgtcctgacttcatctctccttctgcccaagtctgtgtcccatcagacttgcagcctttcagcttaacagttgcccggtcctgctggccccttttcctctggcccccctcttctgaaacaggatgtgcacacatgggccatagccctaaggactcctgccagaccacacagcccacacctggccctgttcacggctgttccacccacccctctttattctggagcatatcagggaaagaaaagttgatgatagattgccttcaccctcacagcgcacaaataaagctacgatgccaactttgcagatgcaagaatgaagacactgtgtgggtagggcactgagctgctgcagtttcacagggaaggctgcacctatcaatcaatcaatcaatcctatcccaagacacagttccctgagggaagaagaggagggacctggaaaggcctaagggtgtactctctgtatagccccgctatgggaaaataaagtggagtagggggcatagaaatgcaccatctaagggaaatcttttgtcaggtggtggccaggggtgttcaaagctcattgcttgcattaccagctattagagagatcagagagggcaattaattagaggctcctggttctcacatcccaaacacacacagttctggcctgctgggctctctaacttggatgtctttgagtcctcagtggtgccccctgcctgcctcccctctgccctatgccaaggtgtgctggcaaatattaaacaaccagctctctggaaaagacaatttgtgatataaatactcccatgttgaataatttcaagctaccagtatgtcaaatggcttgcaaaatttctgaaaatgtaaacaattggttctcacagagctggtacaagctggctccagcacactctcagcccaccccagatcccctcataggaagaaggcacaagtttaaaggcagactgggtagggatggtatgaatttaatattttttagtattacaatatattcttataaaaaaggtgcaagtgaaaaaggacactgtagattatgtccattagcctcatttgtcatctgaggcagctggtgagaacagccttggcgtgaaggcatccctggtagaagtcgggggagatagatagtcacagttccccagttggtggaaatgggatgggagtagggagaggctggaacagacccttccccattcacctggagaattttctcctcccactgccctaaacactttatttccatcacaggggagaaatgctgctgagaaggttgtgtttgttaggttgatgacgaattttacattggccacaaaattagctagagaaacttatctaaaggtggcaggagcagtggggagggcatgaagaaagcaagaccaagaaacaacctattaaggaccagctcagccaccccgactgggcaccagccccttcttactcagttgagtatgagtccatggtccaaggcactgttggagatctggctacagtggcatctagcaccagagccactggccagatgtagaaaataaatagaaaaatatctttcttttagagtga

SEQ ID NO: 1204 - DNA, 1598 bp, Homo Sapiens
  NM_001075099
ggcgaccgcggctgaggtacaggtgcctcgcggtgcagccgggtcgccttccagcccgtccgcctcccgaccagggcccgcgccccgtcccgcctctctcccgcccagccaaatgcaggccgccgccctccctgaggagatccgttggctcctggaagatgctgaagagtttctggcagaaggtttgcggaatgagaacctcagcgctgttgcaagggatcacagagaccatattctacggggctttcagcaaatcaaagccaggtactattgggattttcagccccaagggggagacattggacaggacagctctgatgataatcacagcgggactcttggcctgtccctcacatccgatgcaccctttttgtcagattatcaggatgagggaatggaagacatcgtaaaaggagctcaagaacttgataacgtaatcaagcaaggatacttggagaagaaaagcaaagatcatagtttctttggatcggagtggcagaagcgatggtgtgttgtcagcagaggtctcttctactactatgctaatgagaagagcaagcagcccaaagggaccttcctcattaagggctacggtgtacggatggccccccacctgcgaagagattccaagaaagaatcctgctttgaactgacctcccaggataggcgcagctatgagtttacagctactagtccagcagaagccagagactgggtggatcaaataagtttcttgttaaaggatctgagctccttaaccattccatatgaagaggatgaggaggaagaagaaaaagaagagacatatgatgatattgatggttttgactccccaagttgtggttcccagtgcagacccactatcttgcctgggagtgtggggataaaagagcctacagaggagaaagaagaagaagatatttatgaagtcttgccagatgaagagcatgatctagaagaggatgagagtggcactcgacgaaaaggagactatgccagttactaccagggcctatgggattgccatggtgaccagccagatgaactgtccttccaacggggtgacctcatccgtattctgagcaaggagtataacatgtatggctggtgggtgggagaactgaacagcctcgttgggattgttccaaaggagtatctcaccactgcctttgaagtggaagaaagatgaaacccaggaaatatattcttccctctctcctgcctttatgaggaaactgatcatcaaaagttcccactccctacttctgccaccccaccaacgccttggactcctctctttgctgaagagacccaagtctcttgacacctcagagtgactgtaagctaccagtaagacaagtgggaagaggcacgttcatcaaacctgttactaaaccagcctagtcatagctcatccccatctctaaatgtgtccacacaaccacatctgccttttccacaagcttttcacaaagaaggtgagagagaaggaaaccttgggaggaggacattactggttgttctggctggtttgaaaagcacaaataaacttgggatgtggttccttgccatgaaaaaaaaaaaaaaaaaaaaaaaaa

SEQ ID NO: 1205 - DNA, 3027 bp, Homo Sapiens
  NM_001076552
actcccccactcaccaggccccgcccctctacggaggccccgcctctagttcggcctgttttctcagtcccggcacccgccgcgaccgcaaaggcggccgcggttctaggaacttgacgtgatggggcttcctgaggagcgggtccggagcggcagcgggagccggggccaggaggaagctggagccggaggccgggcgcggagttggtctccgccgcccgaggtcagccgctccgcgcacgtcccctcgctgcagcgctaccgcgagctgcaccggcgctccgtggaggagccgcgggaattctggggagacattgccaaggaattttactggaagactccatgccctggcccattccttcggtacaactttgatgtgactaaagggaaaatcttcattgagtggatgaaaggagcaactaccaacatctgctacaatgtactggatcgaaatgtccatgagaaaaagcttggagataaagttgctttttactgggagggcaatgagccaggggagaccactcagatcacataccatcagcttctggtccaagtgtgtcagttcagcaatgttctccgaaaacagggcattcagaagggggaccgagtggccatctacatgcctatgatcccagagcttgtggtggccatgctggcatgtgcccgcattggggctttgcactccattgtgtttgcaggcttctcttcagagtctctatgtgaacggatcttggattccagctgcagtcttctcatcactacagatgccttctacaggggggaaaagcttgtgaacctgaaggagctggctgacgaggccctgcagaagtgtcaggagaagggtttcccagtaagatgctgcattgtggtcaagcacctggggcgggcagagctcggcatgggtgactccaccagccagtcccccccaattaagaggtcatgcccagatgtgcagggtaaactgaaagagaaatccaagcgtgttcagccccagatctcatggaaccaagggattgacttgtggtggcatgagctcatgcaagaggcaggggatgagtgtgagcccgagtggtgtgatgccgaggacccactcttcatcctgtacaccagtggctccacaggcaaacccaagggtgtggttcacacagttgggggctacatgctctatgtagccacaaccttcaagtatgtgtttgacttccatgcagaggatgtgttctggtgcacggcagacattggttggatcactggtcattcctacgtcacctatgggccactggccaatggtgccaccagtgttttgtttgaggggattcccacatatccggacgtgaaccgcctgtggagcattgtggacaaatacaaggtgaccaagttctacacagcacccacagccatccgtctgctcatgaagtttggagatgagcctgtcaccaagcatagccgggcatccttgcaggtgttaggcacagtgggtgaacccatcaaccctgaggcctggctatggtaccaccgggtggtaggtgcccagcgctgccccatcgtggacaccttctggcaaacagagacaggtggccacatgttgactccccttcctggtgccacacccatgaaacccggttctgctactttcccattctttggtgtagctcctgcaatcctgaatgagtccggggaagagttggaaggtgaagctgaaggttatctggtgttcaagcagccctggccagggatcatgcgcacagtctatgggaaccacgaacgctttgagacaacctactttaagaagtttcctggatactatgttacaggagatggctgccagcgggaccaggatggctattactggatcactggcaggattgatgacatgctcaatgtatctggacacctgctgagtacagcagaggtggagtcagcacttgtggaacatgaggctgttgcagaggcagctgtggtgggccaccctcatcctgtgaagggtgaatgcctctactgctttgtcaccttgtgtgatggccacaccttcagccccaagctcaccgaggagctcaagaagcagattagagaaaagattggccccattgccacaccagactacatccagaatgcacctggcttgcctaaaacccgctcagggaaaatcatgaggcgagtgcttcggaagattgctcagaatgaccatgacctcggggacatgtctactgtggctgacccatctgtcatcagtcacctcttcagccaccgctgcctgaccatccagtgaacatgatcctgacctttacctaggattcctcctgctccaaactttgcccatcctctttgccccctcaggagtgctgagggccagtgttgacccacactaccctcccttgaccagctgtctgggaccggaaaccagctttgtctccaggtagagacaacatcctgtgactgccaggcagaaaggacagggcccaggtcagcctcagtctgctgtgcctccagactgcagagctctcagaacccagaacagagacgaaaaggctacctctcctacccaagttaagtgttcaaaggggatgtgagggcctccactgaagcagggaggcagctgtgtaatcctatgtcagctctcttaggaagccccagtacttatattgggcatgcacttgcccttaaaaacaatgatttgtgagtccaggaacaatttactatttttaaaatattttgctgcttctgttctgggtctgaattcccttttgtgccagatgccagtactgtctgcccattggctccaggggctgtatgggcagattcagtctccagagggtattcagatcatctgcttctttgaaggagtaaatgtgttttgttcctagggccagaggagcttgtcttccttgtcctctgttcccaccctcccctgaacagaacccagcccataagagacattctcagatgaaactctgttttcttgccccagtcaggctcaagccctgtggttgtaggaataaagcctgtgatctcaagaagtggaaaaaaaaa

SEQ ID NO: 1206 - DNA, 2010 bp, Homo Sapiens
  NM_001076674
gaagccggaagagaccggaccctgaacagaatcgcagattgccagcccttttcccgacccctacggaaagacgagtccaggggccgtcctggcgaggtcaaaacatttagtctggtcttttcagtgtgccaggcactgtgccaagtattttgcttcgatgatttcacgtcatcttcaaaacaacctcatgagcgtggaccctgccagcagccaggccatggagctctctgatgtcaccctcattgagggtgtgggtaatgaggtgatggtggtggcaggtgtggtggtgctgattctagccttggtcctagcttggctctctacctacgtagcagacagcggtagcaaccagctcctgggcgctattgtgtcagcaggcgacacatccgtcctccacctggggcatgtggaccacctggtggcaggccaaggcaaccccgagccaactgaactcccccatccatcagagggtaatgatgagaaggctgaagaggcgggtgaaggtcggggagactccactggggaggctggagctgggggtggtgttgagcccagccttgagcatctccttgacatccaaggcctgcccaaaagacaagcaggtgcaggcagcagcagtccagaggcccccctgagatctgaggatagcacctgcctccctcccagccctggcctcatcactgtgcggctcaaattcctcaatgataccgaggagctggctgtggctaggccagaggataccgtgggtgccctgaagagcaaatacttccctggacaagaaagccagatgaaactgatctaccagggccgcctgctacaagacccagcccgcacactgcgttctctgaacattaccgacaactgtgtgattcactgccaccgctcacccccagggtcagctgttccaggcccctcagcctccttggccccctcggccactgagccacccagccttggtgtcaatgtgggcagcctcatggtgcctgtctttgtggtgctgttgggtgtggtctggtacttccgaatcaattaccgccaattcttcacagcacctgccactgtctccctggtgggagtcaccgtcttcttcagcttcctagtatttgggatgtatggacgataaggacataggaagaaaatgaaaggcatggtctttctcctttacggcctccccacttttcctggccagagctgggcccaagggccggggagggaggggtggaaaggatgtgatggaaatctcctccataggacacaggaggcaagtatgcggcctccccttctcatccacaggagtacagatgtccctcccgtgcgagcacaactcaggtagaaatgaggatgtcatcttccttcacttttagggtcctctgaaggagttcaaagctgctggccaagctcagtggggagcctgggctctgagattccctcccacctgtggttctgactcttcccagtgtcctgcatgtctgcccccagcacccagggctgcctgcaagggcagctcagcatggccccagcacaactccgtagggagcctggagtatccttccatttctcagccaaatactcatcttttgagactgaaatcacactggcgggaatgaagattgtgccagccttctcttatgggcacctagccgccttcaccttcttcctctaccccttagcaggaatagggtgtcctcccttctttcaaagcactttgcttgcattttattttatttttttaagagtccttcatagagctcagtcaggaaggggatggggcaccaagccaagcccccagcattgggagcggccaggccacagctgctgctcccgtagtcctcaggctgtaagcaagagacagcactggcccttggccagcgtcctaccctgcccaactccaaggactgggtatggattgctgggccctaggctcttgcttctggggctattggagggtcagtgtctgtgactgaataaagttccattttgtggtcctgcaaaaaaaaaaaaaaaaaaaaa

SEQ ID NO: 1207 - DNA, 4635 bp, Homo Sapiens
  NM_001076683
attagccgtcgctccgcttcgccatctcgggctttgtctggcgactcgctgccccggcgtcggctgcagcggagctgcggctcgactgttcggcccgccgtgctcccaggtgcccccggcctgcgctcccatccacacgctcgggtgaggtggctttgaccccgggttgcccggccagcacgaccgaggaggtggctggacagctggaggatgaacggagaagccgactgccccacagacctggaaatggccgcccccaaaggccaagaccgttggtcccaggaagacatgctgactttgctggaatgcatgaagaacaaccttccatccaatgacagctccaagttcaaaaccaccgaatcacacatggactgggaaaaagtagcatttaaagacttttctggagacatgtgcaagctcaaatgggtggagatttctaatgaggtgaggaagttccgtacattgacagaattgatcctcgatgctcaggaacatgttaaaaatccttacaaaggcaaaaaactcaagaaacacccagacttcccaaagaagcccctgaccccttatttccgcttcttcatggagaagcgggccaagtatgcgaaactccaccctgagatgagcaacctggacctaaccaagattctgtccaagaaatacaaggagcttccggagaagaagaagatgaaatatattcaggacttccagagagagaaacaggagttcgagcgaaacctggcccgattcagggaggatcaccccgacctaatccagaatgccaagaaatcggacatcccagagaagcccaaaaccccccagcagctgtggtacacccacgagaagaaggtgtatctcaaagtgcggccagatgagatcatgagagactatatccagaagcacccagagctgaacatcagtgaggagggtatcaccaagtccaccctcaccaaggccgaacgccagctcaaggacaagtttgacgggcgacccaccaagccacctccgaacagctactcgctgtactgcgcagagctcatggccaacatgaaggacgtgcccagcacagagcgcatggtgctgtgcagccagcagtggaagctgctgtcccagaaggagaaggacgcctatcacaagaagtgtgatcagaaaaagaaagattacgaggtggagctgctccgtttcctcgagagcctgcctgaggaggagcagcagcgggtcttgggggaagagaagatgctgaacatcaacaagaagcaggccaccagccccgcctccaagaagccagcccaggaagggggcaagggcggctccgagaagcccaagcggcccgtgtcggccatgttcatcttctcggaggagaaacggcggcagctgcaggaggagcggcctgagctctccgagagcgagctgacccgcctgctggcccgaatgtggaacgacctgtctgagaagaagaaggccaagtacaaggcccgagaggcggcgctcaaggctcagtcggagaggaagcccggcggggagcgcgaggaacggggcaagctgcccgagtcccccaaaagagctgaggagatctggcaacagagcgttatcggcgactacctggcccgcttcaagaatgaccgggtgaaggccttgaaagccatggaaatgacctggaataacatggaaaagaaggagaaactgatgtggattaagaaggcagccgaagaccaaaagcgatatgagagagagctgagtgagatgcgggcacctccagctgctacaaattcttccaagaagatgaaattccagggagaacccaagaagcctcccatgaacggttaccagaagttctcccaggagctgctgtccaatggggagctgaaccacctgccgctgaaggagcgcatggtggagatcggcagtcgctggcagcgcatctcccagagccagaaggagcactacaaaaagctggccgaggagcagcaaaagcagtacaaggtgcacctggacctctgggttaagagcctgtctccccaggaccgtgcagcatataaagagtacatctccaataaacgtaagagcatgaccaagctgcgaggcccaaaccccaaatccagccggactactctgcagtccaagtcggagtccgaggaggatgatgaagaggatgaggatgacgaggacgaggatgaagaagaggaagatgatgagaatggggactcctctgaagatggcggcgactcctctgagtccagcagcgaggacgagagcgaggatggggatgagaatgaagaggatgacgaggacgaagacgacgacgaggatgacgatgaggatgaagataatgagtccgagggcagcagctccagctcctcctcctcaggggactcctcagactctgactccaactgaggctcagccccaccccagggcagccagggagagcccaggagctcccctccccaactgaccacctttgtttctcccccatgttctgtcccttgcccccctggcctcccccactttctttctttctttaaaaaaaaaaaaaaatacggtgggggtagggggctggaggagcccaggccaggactctgcagcctcagagacatcagcccttgggggtcctcctccagggacagcaactatcagactaagccagcaccggaccagcctggcccaccccacccacttctgcacttgcggttccggcatggacaatggaccggagagtgggggtggggggtcccaaagagtttgatgaggccctccacacctgcggcccaatccaaggtggggtggaagcttggggaagacccattccttcccagaggggcctgccacctggacccctgcattggaactggaggcagggaacatggggaggaggagggtcggtgccttcaagaaaacaggcactgccctggtggccctctcccctgccccctgcaggaaggagctgcctggacccgttcatgggggagggggcagaagtgttttttatatatgtgtatatatttttttttaagctctgagctgtcaacgagacgtttcctaccgatctcggctgccgtctctgttgtcatttctgggagagggagggtttaggggtagatttggaaccttttaaaaatggtcttgatgtatgtggaagagagtatgtgtatgtgtgttcctgtacatagcatgggtgcagctgtggatgtgtgcaaaagagtgtgagtgtgtgtgtgtgtgtgtaaaggggtctgtcctagagcccacatcagtttgttgtgaatctggaaaaagggtcggtgagggccgggagatgttgaccctggtgggagcaggctgaggctgccccgttctccacatcctctgttttgcccagtctctgattccattagggggagtgtgctgaagccattctcggatgcttcccagaccaggctccctctgccagagtcacatgcatccgagctgctggtctccattgtccagcaggaaggcggaaaggcaggcaagatggtgtgaagcttaaagcttgtatttgatggaaaaggtctcccctgttcatctgagaggccaagcctggccaccccaggctcagaacctgggcttcaagaaatgtgctgggagctcctaacttacacatccctccagccttccttgaatcctcccaccaccccctatttcctttaatttctcaggtctgctccctcctcccccaaccccacagctgggcaagaagtctgcaaaagctgcatctgcagctgtctctaactcttcccagccatctcccgtattttttggtaccttgattccttgactcttaataagccaagccaccttatctctgtagttcttatttttttgttgactaaatttggggggttcttttttatggtcatgtcactgacctattaaattggggcttggtgcttttccaccttccccctctgaatgaaagccaaggaatgggggaagagcgggaactctgccgcggaggtggagcaagaacggtgaagggccctggtcccagagaggctggtgggtccctctcccaaaggaaggcagacagtctctgctttgccttggaccttggtgctgggggtggggaggcctgggggggacactccccactcccattccccttcctttgtcctaatcctggaattaagtacaggggtttataggttctatttcttcccaagagccctgcaaagaaccccagtttcctatttggatgcccctacactgttgtgtttcagtggaatgtattttcatttaaaaacaactttgaatggggcactttttctttcctgttttaaaaattgaaaaattcttacagtacaaacaggactgtcagggtgggggtgttggtgctgtaagaggtcactcttgagtgcattttggcactgggatgggatggctggggtgggaagacccccatccccacccccaacttcttttctaatatttaaggagtgttttgtaggattcaacaaccaccacaacttgaatttgtatcatgggaggtgggagggagtggcttagaggtgtctgcctatgcttaaagccaactgtggaagttttgttttcccttttttgtataataaagtgaaaaacaaaggtttgaaaaaaaaaaaaaaaaaaaaaaaaaaaaaaaaa

SEQ ID NO: 1208 - DNA, 6362 bp, Homo Sapiens
  NM_001076785
gctgccgcggcggcggcggcgcgaccgagcatcctggcggcgccgggccactgggagagtttatgtggccgaggcagacaagtggaattaggccttgctgcaggggacttcatttccttctcagtactggacccatttatgaggaggtggcttatgaaagtgtgatgttcgcgtatttcttgacaggcagtggcgtgatcttggctcactgcaacctccgactccctggttcaagcgattctcctgcctcagcctcctgagtggggattacaggccacagcaaacacaggtgtgcaggaaccgtttgtcatggaagccagggagcctgggaggcccacacccacctaccatcttgtccctaacaccagccagtcccaggtggaagaagatgtcagctcgccacctcaaaggtcctccgaaactatgcagctgaagaaggagatctccctgctgaatggggtcagcctggtggtgggcaacatgatcggctcagggatctttgtctcacccaagggtgtgctggtacacactgcctcctatgggatgtcactgattgtgtgggccattggtgggctcttctctgttgtgggtgccctttgttatgcagagctggggaccaccatcaccaagtcgggagccagctacgcttatattctagaggcctttgggggcttcattgccttcatccgcctgtgggtctcactgctagttgttgagcccaccggtcaggccatcatcgccatcacctttgccaactacatcatccagccgtccttccccagctgtgatcccccatacctggcctgccgtctcctggctgctgcttgcatatgtctgctgacatttgtgaactgtgcctatgtcaagtggggcacacgtgtgcaggacacgttcacttacgccaaggtcgtagcgctcattgccatcattgtcatgggccttgttaaactgtgccagggacactctgagcactttcaggacgcctttgagggttcctcctgggacatgggaaacctctctcttgccctctactctgccctcttctcttactcaggttgggacacccttaattttgtaacagaagaaatcaaaaacccagaaagaaatttgcccttggccattgggatttctatgccaattgtgacgctcatctacatcctgaccaatgtggcctattacacagtgctgaacatttcagatgtccttagcagtgatgctgtggctgtgacatttgctgaccagacgtttggcatgttcagctggaccatccccattgctgttgccctgtcctgctttgggggcctcaatgcatccatctttgcttcatcaaggttgttcttcgtgggctcccgggagggccacctaccggaccttctgtccatgatccacattgagcgttttacacctatccctgctttactgttcaattgcaccatggcactcatctacctcatcgtggaggatgttttccagcttatcaactacttcagcttcagctactggttcttcgtgggcctgtctgttgttggacagctctacctccgctggaaggagcccaagcggccccggcctctcaagctgagcgtgtttttccccatcgtgttctgcatatgctccgtgtttctggtgatagtgcccctcttcactgacaccattaattccctcattggcatcgggattgccctttctggagtccctttctacttcatgggtgtttacctgccagagtcccggaggccattgtttattcggaatgtcctggctgctatcaccagaggcacccagcagctttgcttttgtgtcctgactgagcttgatgtagccgaagaaaaaaaggatgagaggaaaactgactagaggtcagaggtggctttctgaggcctggaaggcaggccaaccagcaaaatcctgataacaagactctgtgggcccaactctcctgaattaaaggagccttttgacccaatcatatagtggggctcagggccagtgctcactcttattggtaagctataggagactcaggatctgggccaacctcaaggtgggggcttcagagggtggggggaagattggggaacggggggaatggtcatttagttttactcctgataggtagatgcagctcttacagatatttacttggtaaagtgcagtggggaagagggaatgctaggttgatagggctggtggcttctgaatttggtatttgaactaggagtccctatagaggggctgctttatgggaagtttttctctgaccaggtacaacacctgactttaaaggcctgaaatgctaccatttcttcctctggctcaaaattcttccctggggagagagttatattcccttatttattgatatttagtccagaacaccagttctaacgaagcatgcgtgtctcttcatctacaggatgcaataggctgattgtatttaaaaatcaaagtacccaaaactgagtccctttgggctcagaaatgtctgtggtattgggtcagactctgaccacaggttttatgctgtttagcacaatttctattgagtcttacctgcaacaatgaaccttaaagatttttttactcacgtacctgttacactttagcatacagatagatcatagatcacgttacaagcacttggctcaggtccagcaaggacagatgaacaaattcctgagtcagaagtctgttaatattgctgttttgaaggacaatcctttattttacttgagaccttacatctttgttctagctgacagtaaatctctgggtttctgttacgaactctaagagggctgaaacttctgatattcaggtggatcacctgaattctctcagctgtcaatggcttggagaacatctcatgggcccaagtcatcaaataacctgttcctctctgtaagggcagtgtgagggactgctgtgcagacccaagcaatcccaacctggtgctaggtcatttcacttttctgaaaacctcacatcaggctgcatcctcttctgtccctggcaccaggctttgtttacacttggagccaccttggtgtgggtcaccgggacagtgtactcctctcctgccagcctccccttccccgaggtgtggtggctgcagtctcaggaagagcttggtacttgtggggacttctgttttctccctgtggagatcagtgaagactgggaggaaagctgcttcaacctgagtccggctcttcagcaggctgcacaagtggaagcaactaattctggtgctcaggctgggctctccacccaagttaggcctgctctggcctaatggatcttactgtatgagcaggacggctgcattggattgtacaactgttttgtgatgcccccagacactgtcatcctgggccgagaagaacctgctagcttgacataccccatgggcttatccttaggttttggaattggtcaacagtgaggcagtctcccttcctgaccattcttctccacccagtcacagataagggaataaccttggccatatatttgctcaataaagattgaaggaagcatggtcatagttgccctgggttcagagcataatgcatatgtgaagcatggggtgacattcctactgtcatgggtttgggatttgtaacggcaaattcctgcccgacgacagggtgtcttatgcaaaggctgacttgcctgaacgctaagaacatgacttctgtctgagctaagctggcacccatcccagggctcctctggagctaatcctttaagcaaaatgtgcttgccttttaaagatccctgaccccagctttagctttctccaccagataaccagctaatcccaggaatttgctgccccccaccagtggcttctagggaaagcaaggacctcacatgccaggtgccctagtacttgcttagtgagccatgtcatcctcctttcatttttggatggtgacagcatttttcccctctgtgctggatacagacttctcccaggatcctctctttgggagcgaagccagaggatccctacagcactcaagcttcatggtggaattaatttctgccagctctttgttgtctgtctccttaaatccttttcctggtgtgcttattatcccttttgcagtgagtacagtttattaagttgtcagccctttaatattggggaaacttaatgagtataaatagcagggagcacattgtaacagcacagtgttttgtttttttcacccggttgctgtatgagaatggctttcaatcctttgtttctatgcctacagacagaaagcaagatgtctaatattagacatacaagttgctgcctgttataacggtgaattatacctttgtgcatgcctaggatgtttgttgttttaattagctgcaatatatacggcctgtgtacacagaatttaatcacttcggcaggttgaacaactccatgtagataagagcaagtgtaggcaaaggtttagaaaatggacataaagtcaaagaatgatggcaggtaggatgaaggagagatacttaggaaatcctaaaagaggcggcaagaaggtacctccctgtgtaactcaccttcccccatgacagtgagtaagagacactcacaggctatgagggtacacccctagctgaatgttctgtgttgtttccttagacctgtggtgtccgctgcaacagctactagccacgtgtagctaattacattaaaatgaaataaaattaaaagctcagtttctcagttgcgctaatcacatttcaagtgctcagcagccacccgtgtctactactacacagtgcagacacagaacatatcatcactgcagatagttctactggacaatgttacgctagaataaacaccaaggcagtcagttaaggcagctatggtttggaaaggcatacggacagagtctgcttagaagagatacaagttgttaataaaattgatcctgttgatagtagtttgtttttgtggtgggtgctgtgaagagtaaacattactcagtggaaagctaagttcagaaggtactttgtttttcctcccttgccttaagtccttggtatttataatcaatgctgaaccttctatttcactaccgctccctgttttagatattcagatttaaaaggttttcaaagaattactttcttccatgttcaaagctagattttactaaacacatgtatcacattcatatatattgtttcttggccccactgccaaaggaagtcagtcagtaatttcacaaccgttatcagagtttggaagcagaaatagctgttaactaaaatctcccactgctcagactactttctgccctaatggccattactatccagtctgtattgctacaagggacccactggtaccccttttagattctatcaaaaggaacagggttttcctagaggcaggcagcctggtggtatggcacagcagaagcttactgctaatgaaatgggaacctccccctcccttgtggtttcagcacagaacctgaatgccaggaaaaattcctgggccaagaagctaaagctaaagaaaccttccttttttcaacgtttttttttctttcaaactgtagggtcacttttgattgaggcaaaggggtcctactgtaagtggaaaagactcactcccctaacataagttttcactgtggtgggatggtgccgcccgatatgcttgatatgcttttccttccacatgttaagctaggaaacctaacaggatgtcagcagggcagttaactctggactcagagccctcaagggcatgtggcagaacctcatggacatcacaagaccatcagtctgaatccaggtcgtgggggctgtcatagccgaactccttctgcacatccagagggtacttgctccacatccgctgtctgctgctgcctctttcctcctcactcaggctgttgtagtcagcagagcctagaatgacatcccgggagtggattctaaatgtgattttcctaggctactgcaggagccccttctcttctcagaaaggtctgtttttgttcccgattgtaatgcaaaatccttgctcaataaataaaaaagaatatagaattcttttttttttaaagaaggaatcactttcctatcatctaaaccaagttccttcacactggagtattttgtcacttctcccctccgtggagtattttgtcacttctcccctccgtataggattttttgttgttgtaagagttgtagtcatattgtaaatatttttgtacctttctccttttaacgtgttattgacaaacctccccaaaagaatatgcaattgtttgattcatttctctgttatcagacaccaataaattctttttgttgggcaaaaaaaaaaaaaa

SEQ ID NO: 1209 - DNA, 9271 bp, Homo Sapiens
  NM_001076786
tacgaaccccgagccgccgccgccgccgccagcagcagctgcagcagtggcagctgcagtagcggcagcagccccagcctcaaggccagtttaagctatgaagaaggacatccctcacactctgaaacagatctccttcagagacagagttttgcagcctctcatcagcttcctggatatgctcccacacctcagcctactggtctttctggaatatttgatactagtgtgaacagtgccagcagtaacactaaagagtcttcagtgatgaattttctgtctactgctgaatcccgaactgctcaggctgctgcttcaggaactactctcttaccacaattcagggctccatcctggcagacaggcatgcattcctcagcagcaactgagctgtttgctactggacctttgccaagcactggaacacttccaccatctctctctgcttatcagcatcccaccaccttcagcaatagaaactttgctaccacttcacctttggtgcttcaggattcaacttttaacactacatcaaatggaattttaagtcatcatgaccctttgctacaaatcaagacttcccagggaactgttccaactgctttggcatttgagcgcctgggcagttctgtattaagtaacagcataccacctcagtcttcaacataccgctcagctcaagagtctgcaccccatcttttacaacctcaatttagtttgttgccttcagcacttgggggatcccagcagactcctcaagcctacagttcaactctctttactagttctactgcttccattgaaagagctcttcttcgagaatgtagtgttattaaacaccatcagcggccttcaggtacccagtcaattcaggcacaactgactggttcacagcactccttacatagttatctatcaaattcaagtgtagttaattttcaggaaacaaccaggcagtcatctttatcctgtagcccaattggagattccactcaggtgagcaacggaggattacaacagaagacctcccaggtctcagtggaacttgctcagtcttactcatctgcgattccatcatcagggtatcctccttctactacaaaaataaaaagctgttctacagaacaaccactgacatcaaccaagacccctaaacctcaaagtataattcctcctgtgcaaacactaagctattccaaacctttacataatcagagttctgtaatatcgggccaagcacaaatttattctacagcgcagctaccaagccttttatcagttagtcagtcccaaaattacggtttagtacagccacataatgtgccatctattgttcattcacaggtttataggtccagcaaggttgagaaattgccacccttgtataaaacattgactttttctgggtcatctcagactgtaactcctgaaaatcagacgcttaattattcatctaatcagcaagaggtattgtcttcagttacaaatgagaattaccctgctcaaacaagagatctgtcttcagtaagtcagtctcaaagttactcatctggtcactctcagggtttatcaccagttagccagacacaggttagctattcatctcaatcacaagttttgtcagttgttagtctttcagaaagctatgcttcaggggagtccctaacattaacagccccttctctttcttattcttctgcctctcgggctcagaatttgccagactctagcccgacccagaattatatttctatgcattcttcccaaaatgttcagactcaagagtcatcatctccccagtcccagaagtttttgcctgctgtccagtcatcatcttttgcatcctctactcattgtcagacattacaaaataacataacttcccctgacccaaagtcttatgctgaaagaaagcttgactcagatgtgtatccatcttcaaagcaagaagatggttttccaatgcaagagttacaggtgttgcagccacaagcatctcttgagtcatcaacccaaaggctatctgatggagaaattaatgctcaagaatcaacttataaggtgtcaaaggcagatgacagatattctcagagtgtaatcagaagtaattcccgtcttgaagatcaagttattggggttgctctgcaagcatcaaaaaaagaagaaagtgttgttggttcagtgacacaacttaaccaacaaattggccaagtcaataatgcagctacccttgatcttaagaactcaactaatttaatacagactccacaaataaggttgaatactaaagacttaaagcagcaacatcctctcatacttaaggtgcatgagtccaaggtccaggaacagcacgatcaaataattaatgcttcatctcagattcaaattccaaatcatgctttagggcatggccatcaggcatctcttcctaatacacaggtccttttagattctgcctgtgatttacaaattcttcagcagtcaatactgcaggcaggtttaggtcaagtaaaggcatctttacaagcacagcgtgttcaaagccctcaacaaatagtacatcccttccttcagatggaaggtcatgttattcaaagcaatggtgatcattctcagcagcaactccatcctcaaaattctgaagttatgaaaatggacctctctgagtcttcaaaaccattacaacaacatctaacaacaaagggccattttagtgaaacaaatcaacatgattcaaagaatcagtttgtttctcttggatcgatgtgtttcccagaggcagtgcttcttagtgatgaaagaaatattttatcaaatgtagatgatatcttagcagctacagcagcagcttgtggagttacacctactgatttttccaagtcaacttcaaatgaaaccatgcaggctgttgaagatggtgattctaaatctcattttcagcagtcattagatgtcaggcatgtgacttcagattttaactctatgacagctacagtaggaaagccacagaatataaatgatacttccttaaatggaaatcaggttactgtgaacctttcaccagtacctgcccttcagtcaaaaatgactcttgatcaacagcacattgaaacacctggtcaaaatataccaactaaagtaacttcagcagtggttggaccaagtcatgaagtccaggagcaaagttctggcccattcaagaaacagtctgctaccaatcttgaatctgaagaagacagtgaagctcctgttgatagtacattaaataataacagaaaccaagagtttgtttctagtagtagaagtataagtggagagaatgctacatcagagagtgaatttaccttagggggtgacgacagtggtgtgtcaatgaacccagctaggagtgcacttgcactgttggccatggcccaatctggggatgcagtcagtgtcaagattgaagaagaaaaccaagatttaatgcattttaaccttcaaaagaaaagagctaaaggaaaagggcaagttaaagaggaagacaacagtaatcagaaacagctgaaaagacctgcccaaggcaaacgccagaatccaaggggaacagatatttacttaccgtatactcctccttcctcagaaagctgccatgatggttatcagcatcaagaaaaaatgagacagaagatcaaagaggtggaggaaaaacaaccagaagtcaaaacaggatttattgcttctttcttagattttctgaaatccgggcccaagcagcagttttccactcttgctgtacgaatgcctaacaggactagacggccagggacccagatggttcgtacattttgtcccccaccacttcccaagccttcatctacaacacccacacctttagtgtctgaaactggcggtaacagtccatcagataaagttgataatgaacttaaaaacttggaacatttatcttcattttcttctgatgaagatgatcctggatatagtcaagatgcttataaaagcgtctctactcccttaactactttggatgctacttctgataaaaagaagaaaacagaagccctacaggtggcaactactagcccaactgccaatactactggtactgctactacttcctcaaccactgtgggtgcagttaagcaagaacctctccactctacttcatatgcagtaaatattctggaaaatataagctcttcagaatcctcaaagcccattgaacttgatggtcttccttcagaccagtttgcaaaaggacaggacactgttgccatagaaggttttacagatgaggaggacacagaaagcggaggagaaggccaatacagagagcgtgatgaatttgtggtaaagatagaagacatagagacttttaaggaggctttaaaaacaggaaaagaacctccagctatttggaaagtacaaaaagctttattacagaaatttgttcctgaaattcgagatggtcaaagagaatttgctgctacaaatagttatcttggatattttggagatgcaaagagtaaatacaaaagaatatatgtgaagttcattgaaaatgcaaacaagaaggaatatgtcagagtgtgttctaaaaagccaagaaataaaccttcacaaactatcagaactgttcaagctaagccaagtagtagcagtaaaacttctgatcctctagcatcaaaaactacaactacaaaagccccttccgtgaaacccaaagttaaacagccaaaagtaaaggctgagccaccaccaaagaaacggaaaaaatggaaagaagaattttcatcatcccaatctgactcatctcctgagatccatactagtagtagtgacgatgaggaatttgaacctcccgctccctttgtcactcgctttttgaacacaagagcaatgaaggaaacctttaagagctacatggaattgcttgttagcattgccttggaccctgacacaatgcaagccttagagaagagcaatgatgagctacttttacctcatatgaaaaaaatagatggcatgctaaatgataaccgaaagagacttcttttgaatcttcatttggatcaatcattcaagaatgctttggaaagttttcctgaactaacaataattactcgagattctaaagcaaagagtggaggaactgctatttctaaaatcaaaatgaatggcaaagcctataataagaaaactctaaggacttctaaaacaaccaccaaatctgcacaagagtttgctgtcgatccagagaaaatacagttgtattctttgtatcattcactccatcattataagtaccatgtttatctgatatgtaaggatgagatttcttcggtgcagaaaaaaaatgaagatttaggacaggaggaaattgttcaactttgtatgaaaaatgtaaaatgggtggaggacctctttgaaaaatttggagaacttctaaatcatgtacagcagaaatgttcctgacttttccacaaaaatcccatctttttatagcactaatgaaatggcagatatggggtggtcaaagataatcagatgtcaagtagtggccttctgcaggccggccgcttccatcatggaactgtcattaccacctctgctgaaggacagtggtgcggcctttaggaacgaagttagtcctctggaaatggacctaaatcccaccacatttttaccctaatgaatgatttttctattttgtaaaccattgggtaacttgagtcatattttcagaaacattttttgacaaatgatgaagcatgcactaagtataatttttttttattgctagagaagtaacacttaaagtaacgattttttttttctgactccggctaaacaccagaatgacagagaagtggcagaaaccatatgtttgtactcacatctggccacaaaaccagaaatactgtacattatgtaaagaggtctggtgtggtgtgacatcctgtataagaatatcatcaatttaaaatataaaatttggaaactattctgctttacagactccttttactcttaacatgttcaggaaactggatgtggaattggtgcaattctctgactgctttttgtgtcaaattatattgtgataaaaaaacaatgacatactattttccctatcgcaaagaaaagtattttcgtttatactgttttttcctttggaaaattttcaattgtacattttatttcactgatagttgtatttttcacaaggaaaatgttgtggttataattacgtttgatatatctctacaacaccttttgttattttcagtaaatcttagttatatgttgaatttctaatgtgaattctatcttgaggtaaccatttttttcatacagatttgcttcagtgttatccagaatatgcattcagtactagaattagtttagctttataaatagggctgtgttagacactgcagtaattttctaattcataaaataaacttcttactaaactagcacttgattaacttgttgaggtaaaaatctaactacatttacattttgaagaataaaactgataattagactatttgcagtgttaaacacagcttccttaactcttagaactggaagttgtagagctctccttttggtgcctttccagcctttatacacactattgtagctttcttaggtttgataggtagcgtttcaagtagtttagctgagacagtgaatgtattaggttcaacatgaccttgtgttttatttgtgtttgccaacaggatgccttatttgtttgagaaaaagatgtactagtgtcattctaaactatctccttttttaggattctaaagaagttaatcatcatccttttgtttattttaccaccatttagtgccttaaatcctatcaagaaagcagtgttactgctcaatgcccaaataagacacgcggatattgctattgtcttgcttttgagttaacaggccaactttttatacttaaaacctcagtaaactggcaaagaattgaaggtaatgtgatttgatttgagaataaaacattgtagcattgggtgaaaaatgagtatttgagttaagcttacatatttatttctgatggttatcttattaaaagcaataatccttaatactgtacttgccattagactaggtactcagtaatggaagtttctctcaagggttaaatgttccatttttgaaagttttaaaaaacctgtttgggtggtttattttgaaaacaaaagtaacctattagattcattttgcctaactcatatgagagatgcagagtatcaacagtgggagcatcataaaatgaattttccaagtggagaggagtaggaagcagccatatgatagtattgactctggacagaattgatgtctttcgtttccaaagtgcagagtagggaactacatttcctaatgtggcattgtaaatatacatctttatattactcttccagcctacgttcctaaatcattgataatttaaatattttttaaagccaccttaatttaggtagctcttggaatcgatgtttgaattcactagccacattttcttcatgatatgcctcgtggcaaacaaagatgtttccttaagatgaatcttacatttcccatagaaaataacccatttcctttggcactgcagttgccctcaaactgcttgcagttgtattcattttagtacaacaaaggttttcataatatgggaggccaagtctatgatactgcctcaaagagaccctattgtgtagatgcatcatcttctctcatttgatccatagagcataggcaaagatgtcaacctcaggccttagagaaaagtggaaatgttattatgacagccgtccatgagttatcgctttgtatgaagttaaatacagtcatgcgttgcttaacagcagggatacattctgagaaatgcattgttaggcaattccgttgtgcgaacatcctagtgtacttacacaaacctaggtggcatagcccacaacgtacccaggctatatggtaaacctgtacagcatgttactgtactgaatactgtaggcagttgtaacacaatggtatttgtgtatctagacatagaaaacatacagtaagaatatggtattataatcttacgggaccactgtcaaatacgcggtctgtctttgaaaagttgtaatgcggcgcatgactataaatacctagctggttagcatttacattccttgccagggagtttgaaatttatactatagaaataactttaggttttaggtagagttaaagaggtaaagcacatgttgccacaacccaggaaagtatttttaagaaagattggattttcctacctttagagatctaaaaaaaatttaatataaaaaatcattttgtgttggtgtttattactagttcagatgagtggctgctgaaggggcccccttgtcattttcattataacccaatttccacttatttgaactcttaagtcataaatgtataatgacttatgaattagcacagttaagttgacactagaaactgcccatttctgtattacactatcaaataggaaacattggaaagatggggaaaaaaatcttattttaaaatggcttagaaagttttcagattactttgaaaattctaaacttctttctgtttccaaaacttgaaaatatgtagatggactcatgcattaagactgttttcaaagctttcctcacatttttaaagtgtgattttccttttaatatacatatttattttctttaaagcagctatatcccaacccatgactttggagatatacctataaaaccaatataacagcagggttattgaagcagctttctcaaatgttgcttcagatgtgcaagttgcaaattttattgtatttgtagaatacaatttttgttttaaactgtatttcaatctatttctccaagatgcttttcatatagagtgaaatatcccaggataactgcttctgtgtcagtcgcatttgacgcataactgcacaaatgaacagtgtatactcttggttgtgcattaacttacatgtataatttttggcatctgtgttcacaaatgcatgtgttagcaaatcacctttatttataagtgacaataattgaagttaaggatataaagaaacctgcatttgtagtccagcgttttcatttggtccataacacaatgtatggaaatgtgaaagacaattttgtacatttgtttgttactaactcagatcattaaaatgaaaacaatttttttaaacaagaaaa

SEQ ID NO: 1210 - DNA, 3209 bp, Homo Sapiens
  NM_001077180
ggaagggaagggggaggtgccgaggctgcgcgccggctgctcctccccacccccagcctttgccctgaagggggctggatgggcaaggcggccgcgatggctcgagctcgggcggtggcggcggtggccggaggcggcggtgcctcctcctcctcgccccggcgccggcggtgatccgagcgagcggccgcggcccccgatgagactgctggcgggctggctgtgcctgagcctggcgtccgtgtggctggcgcggaggatgtggacgctgcggagcccgctcacccgctccctgtacgtgaacatgactagcggcccgggtgggccggcggcggccgcgggcggcaggaaggagaaccaccagtggtatgtgtgcaacagagagaaattatgcgaatcactccaggctgtctttgttcagagttaccttgatcaaggaacacagatcttcttaaacaacagcattgagaaatcgggctggctatttatccaattatatcattcttttgtgtcatctgtttttagcctgtttatgtctagaacatctatcaatgggttgctaggaagaggctcaatgtttgtgttttcaccagatcagtttcagagactgcttaaaattaatccagactggaaaacccacagacttcttgatttaggtgctggagatggagaagtcacaaaaatcatgagccctcattttgaagaaatctatgccactgagctttctgaaactatgatatggcagcttcagaaaaagaaatacagagtccttggtataaatgaatggcagaatacggggttccagtatgatgtcatcagctgcctgaacttgctggaccgctgtgatcagcccctgactttgttaaaagatatcagaagtgtcttggagccaactagaggcagggtcatccttgcccttgtcctcccctttcatccctatgtggaaaacggtggcaagtgggagaaaccatcagaaattttggaaatcaaaggacagaactgggaagaacaagtgaatagtctgcctgaagttttcagaaaagctggttttgttatcgaagctttcaccagactaccatacctgtgtgaaggcgacatgtataatgactactacgttctggatgacgctgtctttgttctcaaaccagtataaacacgtggaggtcgaagtcttcagagtccgcaccctccgggatgtgcccttggaagagggtctgtgttcacaattacgtgaagggaggacccttggggaccgccattctaaatatcatgtaggaatttaaaaagccaaaatactaattatttctttgtagtgtgtaaaggaatgtttttaaaagacaaaaacccaactctttgtggatttttatcaactctttactcagagccactctccaatgcaggtcacactccaattatgatggaagatattttttatacttaattgcagtagggactcattcccagacaaagcaatagtcacgacttcatggaaccaatcaatggattgttttttgaagactggcaataaagctgtccattcaattccaaatactggttttaaggtatagccactgatattctttcatgtttagaaattctttctgttattattcaagaaaatgtttttaatcatgctaataaacttttttggagatgactttggcatcatgtttgaattcatataaagctcccctagcattttttattggtttggcttcaggagtacccaaatagtagcattatgagaatgacgcagacaatttgaataggggggaaggaaggcttcagacttgggggaaggggagattattgcaaattgcagtgaacactgagtcagtaaaaaaaaaaaacagaaacaaaaacccagcctcattcagatacagaacttcagggacccctccccccacccccccagttaatgctgctgtgaaaaatgcaaaataacctggttctgactttgtgatcactcatgtcccatacactgaactttgtttttttctggacaatctcaggttctcagaattgaaacattcagttttgtctactgacaaaatgcaactaaaaatgttttaattcaacttcttactctacacttatatacctctctcccagagcttggctcttccctgaaatccttaaaggagtttattatttgccaagaatatggtttgatgaagaccgtgtcagactcatgcattctggaatccgtgagtgcctccaaccataaacccagaaatgctgccatagaggaacccattagcaagatcaataaccatcgtggatattccaaagagcagagcatttaacccagaatctgaaatctcagtaataacagaaatgtcaatatgagattgtggttattaacaatatgttatcctcactactttatttcttttttcatccaggtgtttcattaagtattctcatttatatgctcatagaagtcatcagatcaacacattcactccaacacctgggtataaaggcgaattaaaacctgaagaattactttattattcattaagaactgcattcccacatcctcacaccaatatcttccactgttactgtgcagtcataataagagttgggttatgtgatttatgcaaaattgttattggtgtgttctaatgatttttttccaggaattcaagtaagtgaagtacaaatacttagcaccatagattgtaaaaatagaaagaggaaatgagaaaacttaatgtcgttcttgtacagttgagttttgcttctttataaactgtctgttaaaatcaggggttgctgttagactgtcaagcagaagtgatggatgttcaaggaggcaggttgccccaaagtgttttctaactttcaagtagagaactttatgctctaataagaaaaatacaactcattcttaaccacccccccaaaacagagaaaacacatacatttatgcattttaaagataaaaagtagtttctcaaaaaaatctgaagttctctgaaaaccagcttattaaaagtgctgttttgtggtgaaaattgaaaccaaatccactcacatttcctatcgggtcttgaaattcttggtggtgtgtcaccattccactagatggcagtgttgcttactgagtgtcaatggcttttttccccgtaaatggaatcatgtttttctcccccaaagtacaataaagctgccttgtctgcaccaaaaaaaaaaaaaaaaaa

SEQ ID NO: 1211 - DNA, 5474 bp, Homo Sapiens
  NM_001077183
ccggcggcgtcccggggccaggggggtgcgcctttctccgcgtcggggcggcccggagcgcggtggcgcggcgcgggaggggttttctggtgcgtcctggtccaccatggccaaaccaacaagcaaagattcaggcttgaaggagaagtttaagattctgttgggactgggaacaccgaggccaaatcccaggtctgcagagggtaaacagacggagtttatcatcaccgcggaaatactgagagaactgagcatggaatgtggcctcaacaatcgcatccggatgatagggcagatttgtgaagtcgcaaaaaccaagaaatttgaagagcacgcagtggaagcactctggaaggcggtcgcggatctgttgcagccggagcggccgctggaggcccggcacgcggtgctggctctgctgaaggccatcgtgcaggggcagggcgagcgtttgggggtcctcagagccctcttctttaaggtcatcaaggattacccttccaacgaagaccttcacgaaaggctggaggttttcaaggccctcacagacaatgggagacacatcacctacttggaggaagagctggctgactttgtcctgcagtggatggatgttggcttgtcctcggaattccttctggtgctggtgaacttggtcaaattcaatagctgttacctcgacgagtacatcgcaaggatggttcagatgatctgtctgctgtgcgtccggaccgcgtcctctgtggacatagaggtctccctgcaggtgctggacgccgtggtctgctacaactgcctgccggctgagagcctcccgctgttcatcgttaccctctgtcgcaccatcaacgtcaaggagctctgcgagccttgctggaagctgatgcggaacctccttggcacccacctgggccacagcgccatctacaacatgtgccacctcatggaggacagagcctacatggaggacgcgcccctgctgagaggagccgtgttttttgtgggcatggctctctggggagcccaccggctctattctctcaggaactcgccgacatctgtgttgccatcattttaccaggccatggcatgtccgaacgaggtggtgtcctatgagatcgtcctgtccatcaccaggctcatcaagaagtataggaaggagctccaggtggtggcgtgggacattctgctgaacatcatcgaacggctccttcagcagctccagaccttggacagcccggagctcaggaccatcgtccatgacctgttgaccacggtggaggagctgtgtgaccagaacgagttccacgggtctcaggagagatactttgaactggtggagagatgtgcggaccagaggcctgagtcctccctcctgaacctgatctcctatagagcgcagtccatccacccggccaaggacggctggattcagaacctgcaggcgctgatggagagattcttcaggagcgagtcccgaggcgccgtgcgcatcaaggtgctggacgtgctgtcctttgtgctgctcatcaacaggcagttctatgaggaggagctgattaactcagtggtcatctcgcagctctcccacatccccgaggataaagaccaccaggtccgaaagctggccacccagttgctggtggacctggcagagggctgccacacacaccacttcaacagcctgctggacatcatcgagaaggtgatggcccgctccctctccccacccccggagctggaagaaagggatgtggccgcatactcggcctccttggaggatgtgaagacagccgtcctggggcttctggtcatccttcagaccaagctgtacaccctgcctgcaagccacgccacgcgtgtgtatgagatgctggtcagccacattcagctccactacaagcacagctacaccctgccaatcgcgagcagcatccggctgcaggcctttgacttcctgttgctgctgcgggccgactcactgcaccgcctgggcctgcccaacaaggatggagtcgtgcggttcagcccctactgcgtctgcgactacatggagccagagagaggctctgagaagaagaccagcggccccctttctcctcccacagggcctcctggcccggcgcctgcaggccccgccgtgcggctggggtccgtgccctactccctgctcttccgcgtcctgctgcagtgcttgaagcaggagtctgactggaaggtgctgaagctggttctgggcaggctgcctgagtccctgcgctataaagtgctcatctttacttccccttgcagtgtggaccagctgtgctctgctctctgctccatgctttcaggcccaaagacactggagcggctccgaggcgccccagaaggcttctccagaactgacttgcacctggccgtggttccagtgctgacagcattaatctcttaccataactacctggacaaaaccaaacagcgcgagatggtctactgcctggagcagggcctcatccaccgctgtgccagccagtgcgtcgtggccttgtccatctgcagcgtggagatgcctgacatcatcatcaaggcgctgcctgttctggtggtgaagctcacgcacatctcagccacagccagcatggccgtcccactgctggagttcctgtccactctggccaggctgccgcacctctacaggaactttgccgcggagcagtatgccagtgtgttcgccatctccctgccgtacaccaacccctccaagtttaatcagtacatcgtgtgtctggcccatcacgtcatagccatgtggttcatcaggtgccgcctgcccttccggaaggattttgtccctttcatcactaagggcctgcggtccaatgtcctcttgtcttttgatgacacccccgagaaggacagcttcagggcccggagtactagtctcaacgagagacccaagaggatacagacgtccctcaccagtgccagcttggggtctgcagatgagaactccgtggcccaggctgacgatagcctgaaaaacctccacctggagctcacggaaacctgtctggacatgatggctcgatacgtcttctccaacttcacggctgtcccgaagaggtctcctgtgggcgagttcctcctagcgggtggcaggaccaaaacctggctggttgggaacaagcttgtcactgtgacgacaagcgtgggaaccgggacccggtcgttactaggcctggactcgggggagctgcagtccggcccggagtcgagctccagccccggggtgcatgtgagacagaccaaggaggcgccggccaagctggagtcccaggctgggcagcaggtgtcccgtggggcccgggatcgggtccgttccatgtcggggggccatggtcttcgagttggcgccctggacgtgccggcctcccagttcctgggcagtgccacttctccaggaccacggactgcaccagccgcgaaacctgagaaggcctcagctggcacccgggttcctgtgcaggagaagacgaacctggcggcctatgtgcccctgctgacccagggctgggcggagatcctggtccggaggcccacagggaacaccagctggctgatgagcctggagaacccgctcagccctttctcctcggacatcaacaacatgcccctgcaggagctgtctaacgccctcatggcggctgagcgcttcaaggagcaccgggacacagccctgtacaagtcactgtcggtgccggcagccagcacggccaaaccccctcctctgcctcgctccaacacagactccgccgtggtcatggaggagggaagtccgggcgaggttcctgtgctggtggagcccccagggttggaggacgttgaggcagcgctaggcatggacaggcgcacggatgcctacagcaggtcgtcctcagtctccagccaggaggagaagtcgctccacgcggaggagctggttggcaggggcatccccatcgagcgagtcgtctcctcggagggtggccggccctctgtggacctctccttccagccctcgcagcccctgagcaagtccagctcctctcccgagctgcagactctgcaggacatcctcggggaccctggggacaaggccgacgtgggccggctgagccctgaggttaaggcccggtcacagtcagggaccctggacggggaaagtgctgcctggtcggcctcgggcgaagacagtcggggccagcccgagggtcccttgccttccagctccccccgctcgcccagtggcctccggccccgaggttacaccatctccgactcggccccatcacgcaggggcaagagagtagagagggacgccttaaagagcagagccacagcctccaatgcagagaaagtgccaggcatcaaccccagtttcgtgttcctgcagctctaccattcccccttctttggcgacgagtcaaacaagccaatcctgctgcccaatgagtcacagtcctttgagcggtcggtgcagctcctcgaccagatcccatcatacgacacccacaagatcgccgtcctgtatgttggagaaggccagagcaacagcgagctcgccatcctgtccaatgagcatggctcctacaggtacacggagttcctgacgggcctgggccggctcatcgagctgaaggactgccagccggacaaggtgtacctgggaggcctggacgtgtgtggtgaggacggccagttcacctactgctggcacgatgacatcatgcaagccgtcttccacatcgccaccctgatgcccaccaaggacgtggacaagcaccgctgcgacaagaagcgccacctgggcaacgactttgtgtccattgtctacaatgactccggtgaggacttcaagcttggcaccatcaagggccagttcaactttgtccacgtgatcgtcaccccgctggactacgagtgcaacctggtgtccctgcagtgcaggaaagacatggagggccttgtggacaccagcgtggccaagatcgtgtctgaccgcaacctgcccttcgtggcccgccagatggccctgcacgcaaatatggcctcacaggtgcatcatagccgctccaaccccaccgatatctacccctccaagtggattgcccggctccgccacatcaagcggctccgccagcggatctgcgaggaagccgcctactccaaccccagcctacctctggtgcaccctccgtcccatagcaaagcccctgcacagactccagccgagcccacacctggctatgaggtgggccagcggaagcgcctcatctcctcggtggaggacttcaccgagtttgtgtgaggccggggccctccctcctgcactggccttggacggtattgcctgtcagtgaaataaataaagtcctgaccccagtgcacagacatagaggcacagattgcaaaaaaaaaaaaaaaaaaaaaaaaaaaaaaaaaaaaaaaaaaaa

SEQ ID NO: 1212 - DNA, 2023 bp, Homo Sapiens
  NM_001077191
gagaacccagacgggcagagcctgggtaggagagcctggccccgctgtccccactgggtggagacaccatgcacttggtccacttgtgctcttcagccaggacaccagacatggtccaaaccgctgcagggctggctgcagcaactccctgacactcaggaaggcccaggctgggcaggcaatacctgctcccaacagccatctcccaggaaggaccctgttgctagtgtggagcaaagacgagtcaagtttatgggctggaagtcctacccggaggctgctcactgagctgtgatggctacaaggacagatggggggaagggtgcagggtgcccgagacctggcccgctggagcctgtcacctaatggctggctggaagaccactacacaccagccagccctggtccattctctcatttagaggcctccccggtggaggcagggatacacaaaatgctttggggctggatgggcccgcctttcagtctaaacaagagacctcaacacagctgcccagaaaaggcagataccagaaatggataaagctggctgggtggggactgtccgaagggcagccagcagtgagctccggctggttgctaccacacaggacatatgtgttgccagacctgaattttcaatagaaaccaaagatagttttttatataaatgtttaattggcaattaattgaaaaattctgtgtatcagcgaacatgatacagcccacagcctgcgggtctgcgcccctggattaacatgctgccctgccaggaggacacgacctgcagccccatcctaactctggccaccccatcctgcaggcatgccggctgccgctccaggactcccctgtccccaggaccaagatgacgcccaacagcactggcgaggtgcccagccccattcccaagggggctttggggctctccctggccctggcaagcctcatcatcaccgcgaacctgctcctagccctgggcatcgcctgggaccgccgcctgcgcagcccacctgctggctgcttcttcctgagcctactgctggctgggctgctcacgggtctggcattgcccacattgccagggctgtggaaccagagtcgccggggttactggtcctgcctcctcgtctacttggctcccaacttctccttcctctccctgcttgccaacctcttgctggtgcacggggagcgctacatggcagtcctgaggccactccagccccctgggagcattcggctggccctgctcctcacctgggctggtcccctgctctttgccagtctgcccgctctggggtggaaccactggacccctggtgccaactgcagctcccaggctatcttcccagccccctacctgtacctcgaagtctatgggctcctgctgcccgccgtgggtgctgctgccttcctctctgtccgcgtgctggccactgcccaccgccagctgcaggacatctgccggctggagcgggcagtgtgccgcgatgagccctccgccctggcccgggcccttacctggaggcaggcaagggcacaggctggagccatgctgctcttcgggctgtgctgggggccctacgtggccacactgctcctctcagtcctggcctatgagcagcgcccgccactggggcctgggacactgttgtccctcctctccctaggaagtgccagtgcagcggcagtgcccgtagccatggggctgggcgatcagcgctacacagccccctggagggcagccgcccaaaggtgcctgcaggggctgtggggaagagcctcccgggacagtcccggccccagcattgcctaccacccaagcagccaaagcagtgtcgacctggacttgaactaaaggaagggcctctgctgactcctaccagagcatccgtccagctcagccatccagcctgtctctaccgggccccacttctctggatcagagaccctgcctctgtttgaccccgcactgactgaataaagctcctctggccgttaaaaaaaaaaaaaaaaaaaa

SEQ ID NO: 1213 - DNA, 3795 bp, Homo Sapiens
  NM_001077198
agtgagtggcagacacccggcctagcgccgcgggtcgcgccgagccgagccgagccgagcggagccggcggagcctctggaatcacccgggtcgctgttcctgagcagctgcagagcatcgagggctggagaggagcacatactgtccatggagctggtggtcaaggtggacagggggcggtggtgatggcgcagtttgacactgaataccagcgcctagaggcctcctatagtgattcacccccaggggaggaggacctgttggtgcacgtcgccgaggggagcaagtcaccttggcaccatattgaaaaccttgacctcttcttctctcgagtttataatctgcaccagaagaatggcttcacatgtatgctcatcggggagatctttgagctcatgcagttcctctttgtggttgccttcactaccttcctggtcagctgcgtggactatgacatcctatttgccaacaagatggtgaaccacagtcttcaccctactgaacccgtcaaggtcactctgccagacgcctttttgcctgctcaagtctgtagtgccaggattcaggaaaatggctcccttatcaccatcctggtcattgctggtgtcttctggatccaccggcttatcaagttcatctataacatttgctgctactgggagatccactccttctacctgcacgctctgcgcatccctatgtctgcccttccgtattgcacgtggcaagaagtgcaggcccggatcgtgcagacgcagaaggagcaccagatctgcatccacaaacgtgagctgacagaactggacatctaccaccgcatcctccgtttccagaactacatggtggcactggttaacaaatccctcctgcctctgcgcttccgcctgcctggcctcggggaagctgtcttcttcacccgtggtctcaagtacaactttgagctgatcctcttctggggacctggctctctgtttctcaatgaatggagcctcaaggccgagtacaaacgtggggggcaacggctagagctggcccagcgcctcagcaaccgcatcctgtggattggcatcgctaacttcctgctgtgccccctcatcctcatatggcaaatcctctatgccttcttcagctatgctgaggtgctgaagcgggagccgggggccctgggagcacgctgctggtcactctatggccgctgctacctccgccacttcaacgagctggagcacgagctgcagtcccgcctcaaccgtggctacaagcccgcctccaagtacatgaattgcttcttgtcacctcttttgacactgctggccaagaatggagccttcttcgctggctccatcctggctgtgcttattgccctcaccatttatgacgaagatgtgttggctgtggaacatgtgctgaccaccgtcacactcctgggggtcaccgtgaccgtgtgcaggtcctttatcccggaccagcacatggtgttctgccctgagcagctgctccgcgtgatcctcgctcacatccactacatgcctgaccactggcagggtaatgcccaccgctcgcagacccgggacgagtttgcccagctcttccagtacaaggcagtgttcattttggaagagttgctgagccccattgtcacacccctcatcctcatcttctgcctgcgcccacgggccctggagattatagacttcttccgaaacttcaccgtggaggtcgttggtgtgggagatacctgctcctttgctcagatggatgttcgccagcatggtcatccccagtggctatctgctgggcagacagaggcctcagtgtaccagcaagctgaggatggaaagacagagttgtcactcatgcactttgccatcaccaaccctggctggcagccaccacgtgagagcacagccttcctaggcttcctcaaggagcaggttcagcgggatggagcagctgctagcctcgcccaagggggtctgctccctgaaaatgccctctttacgtctatccagtccttacaatctgagtctgagcccctgagccttatcgcaaatgtggtagctggctcatcctgccggggccctccactgcccagagacctgcagggctccaggcacagggctgaagtcgcctctgccctgcgctccttctccccgctgcaacccgggcaggcgcccacaggccgggctcacagcaccatgacaggctctggggtggatgccaggacagccagctccgggagcagcgtgtgggaaggacagctgcagagcctggtgctgtcagaatatgcatccacagagatgagcctgcatgccctctatatgcaccagctccacaagcagcaggcccaggctgaacctgagcggcatgtatggcaccgccgggagagtgatgagagtggagaaagcgcccctgatgaagggggagagggcgcccgggccccccagtctatccctcgctctgctagctatccctgtgcagcaccccggcctggagctcctgagaccactgccctgcatgggggcttccagaggcgctacggtggcatcacagatcctggcacagtgcccagggttccctctcatttctctcggctgcctcttggagggtgggcagaagatgggcagtcggcatcaaggcaccctgagcccgtgcccgaagagggctcggaggatgagctaccccctcaggtgcacaaggtatagacaaggctgagcagggttcctgtggcccaggatggaggccaccgctgccctgccatcccgtctgcctgccatgggacggctcctctgagtgttccctggccccacgtgtgtggtgtttgtgtgtctgtgcctggccaagggaggtgccaacactgggcttgccacagccccaggagaggaatttggggcctaggaaccgagggcacacgggactctagcctcatccccaggacccccttggctcagagtgtggtgctagaaactggcccccagcccagccccagtactgccacctttacacctacccctgcaagtccccagagggctgcccacgatagaagctgccaagcagggagaacctgtgccaactgtggagtggggaggttgggcctggaccctcaacccctgcaaccttccctagccccctcaatagatgagcaggtcaggctgtggcccttacctcacccgcagttctcgcccagtgctgcagccggctcacctctctccgcttcttgcacatcactggcctgtgtgtgctgcttgctcctgttctgttcgcttgctcccgttccgttcggcttttgctttgcgttagggtgaagaccctagcgtccagctcccctcaacgctatattttgacactaaaaaagaaggtttctaaattgtaggagcaggatggaaatactttgctgcccttgccatcttttaggatgggcccccaggagactgaggtcttcctgggccctcattgctgcttatcgtaccccccatcacctgcacatgggacagaccgggctggagggtgaccttggctgtgtgcgtcccagcaaaagagctctggcccgcatctcgctgtgccctgaagggggatgaagggcgatgcctcgcccgaggctttgggctgctgcactgcatgctgggactgctcctactctctgtcccacccctcacccagctgtggtccggctttgggagagtggtgaattgcgctgcccgaactcggagcggagcagggtagggaccgtgtacagcttgataacccttaataaaaagggagtttgaccagaaaaaaaaaaaaaaaaaaaaaaa

SEQ ID NO: 1214 - DNA, 3832 bp, Homo Sapiens
  NM_001077238
tgcgcggcgcatgcgtggcccggggtctcggggcgttgctgggaaacatctgccgttggttgcggcgggcaccggccgacatggcggcagcggtggcggctgcgctggcgcggcttttggcggcctttctgctcctcgcggcccaggtggcctgtgagtacggcatggtgcacgtggtctcccaggccgggggccccgaaggcaaagactactgcatcctctacaacccgcagtgggcccatcttccgcacgacctcagcaaggcatctttcctgcagctgcgcaactggacggcctccctgctctgctccgcagccgacctccccgcccgtggcttcagcaaccagatcccgctggtggcgcgggggaactgcaccttctatgagaaagtgaggctggcccagggcagcggagcacgcgggctgctcatcgtcagcagggagaggctggtccccccggggggtaataagacgcagtatgatgagattggcattcccgtggccctgctcagctacaaagacatgctggacatcttcacgcgtttcggccgcacggtgagggcggcgctgtatgcgcctaaggagccggtgctggactacaacatggtcatcatcttcatcatggctgtgggcaccgtcgccatcggcggctactgggccgggagtcgggacgtgaagaaaaggtacatgaagcacaagcgcgacgatgggcccgagaagcaggaggacgaggcggtggacgtgacgccggtgatgacctgcgtgtttgtggtgatgtgctgctccatgctggtgctgctctactatttctacgatctcctcgtgtacgtggtcatcgggatcttctgcctggcctccgccaccggcctctacagctgcctggcgccctgtgtgcggcggctgcccttcggcaagtgcaggatccccaacaacagcctgccctacttccacaagcgcccgcaggcccgtatgctgctcctggcgctcttctgcgtggccgtcagcgtggtgtggggcgtcttccgcaacgaggaccagtgggcctgggtcctccaggatgccctgggcatcgccttctgcctctacatgctgaagaccatccgtctgcccaccttcaaggcctgcacgctgctgctgctggtgctgttcctctacgacatcttcttcgtgttcatcacgcccttcctgaccaagagtgggagcagcatcatggtggaggtggccactgggccctcggactcagccacccgtgagaagctgcccatggtcctgaaggtgcccaggctgaactcctcacctctggccctgtgtgaccggcccttctccctcctgggtttcggagacattttggtgccagggctgctggtggcctactgccacaggtttgacatccaggtacagtcctccagggtatacttcgtggcctgcaccatcgcctatggcgttggcctccttgtgacattcgtggcactggccctgatgcagcgtggccagcccgctctcctctacctggtgccctgcacgctggtgacgagctgcgctgtggcgctctggcgccgggagctgggcgtgttctggacgggcagcggctttgcggtgaataccagtttgctctgactgtgagaaatactcgcctagtgagccctaactagagttaaaaaagtcctacctccatctccgtgggccccagcaccagccgacggcccgcagcctcccaaagactctgccacgccactctccccgcagccgcccagcgaagaaccagccacatccccctggcctgctgagcagtccccaaaatcacgcacgtccgaggagatgggggctggagcccccatgcgggagcctgggagcccagctgaatccgagggccgggaccaggcccagccgtccccggtaacccagcctggcgcctcggcctaggggaggggtgagacgctcgctgccgtgcccgccacaccaagatgttggggctgcctggcgcccactggagacagacagacagacgcctgtcccccgggaccgaggcctgtgccgtccccacccgccccaacatggtgctcatccttgccgagacccctgcggtctgtgcccgcgcccagcccagctgccccggctgcacgcctgctgctcccagctcgcccggctgccacaagctctctgcgggtccatcctccccaccggggtccgtcctcgcaggccctgcccggcctctctgcagaccctcaagcgtcgtctgcatgagtgagcaggcgtgggtggactctggccgcggccacacttggtgctcaccagctgcttcggccttcaggtgacctccctccccacggcatcctgctctccgggtggaagagcagctttctgtctcccagaaggcatcgcttttccctcttgagcagatcggagcccctgggaggtttggaagctgcctccaagcctaggacacggaccagtggccggggcggcctctggcccctgacgctggctgagacaggcccgtggggcggggttttggggcgtgaacaaggctggcagtaagtggacaagctgctcccctggctaaggccctgccctgccctcagccagaggtgcctggccatgcctgcacactcctccccattttaataaatggtcgcaacttctagaagtcctgctggtgccacctggtggggtggacgtctctcagactgcccttctgacaagcaggggtgggcgccaggcaggctgggtcaggccctcaggggtccctggagccctgggagggagggactgggtcgtgggaggtcctggtagctcccggcacccaacctcgcttcccgtgtgggccccgtgttgcttttctgctgagaggggcttgggcctcggttctccctgtggcagcggcattggtgcctgggttcttaaccctctggacccagcagctaggagcttctggaacccacgaggacatctgccactggcatggtctactcactgatggggtcctcctgactccagggcagagacgtccgtgcgggaactgaccgaggcgtggccccaggccccggcatcctcccctcgctgcacgtggtcacttccgaagcagcgctccctgtggccgcagagacagagcccgcaccctggctgtctgtggtgcctgggccccagctcccgcccgccacccgccctgttgagtgcggcctccagactcgagtccagaatctgtttctgtcaagtcagtcgtccccagctgcacacggggactgctgagcgctgcgctctcacgggtctgttccggacagagggtggcaggggtgagccctgatcccttacaaaaaataccagcttcccagggagtaatggcgccttcactgaagccattttgtacatggggacggggtggggacgtctcttttttggtgttggacgtttgaccagtggggaggggttcagaggcggcggtcctgtccttggctccgtctgtccgtgtggccttgctgccattccgtctgatcattaaacacagcttttgatacatatggcccggcctctgcctccgcagtgcacggcttggggcatctgctctgtgcaggtcccggtgagcagaactgagagctggcaggccgcctggctgtcctgcagaggacggattggaattgccaccgcagggccggccagtgctgtgaggtgcccagcgtcactcccatgggctctgtgggccatgtggtccctgtcacgcttctcagctctgccactgttgctggaaagcatcacagaccatgtgtaaaatgggccaaaataccttttacaaaattaaaatagagatggggtcttgcaaaaaaaaaaaaaaaaaa

SEQ ID NO: 1215 - DNA, 2231 bp, Homo Sapiens
  NM_001077241
agatccttgaaagggttttggttttgactgagcagaatggtgccattgcagatcaacacgcactttaaataatcaaaacccctatctttcccctgggaaggaggaagccgaggaaggctgtgtttctgactcacacgggggagtcgggggagtcgtaaacaaccctgaagagaacagccaggcctggcgctctgggcttggtcctgggacacccgtttgacactgtaaaggtgaggctgcagacccagaccacctaccggggcatcgttgattgcatggtcaagatttaccgccatgagtccctcctgggcttcttcaagggaatgagcttccccattgccagcatagctgtggtcaactctgtcctgtttggggtctatagcaacaccctgctggtgctcacggccacctcccaccaggagcggcgggcccagccgcccagctacatgcacatcttcctagcgggctgcaccggggggttcctgcaggcctactgtctggctccttttgacctcatcaaagtccggctacaaaaccagacagagccaagggcccagccagggagccccccaccccggtaccaggggcccgtgcactgtgcagcctccatcttccgggaggaggggccccgggggctgttccgaggagcctgggccctgacgctgagggacacccccacggtggggatctacttcatcacctatgaagggctctgtcgccagtacacaccagaaggccagaatcccagctcagccacggtgctggtggcagggggctttgcaggcattgcttcctgggtggcagccacgcccttagacatgatcaagtcccggatgcagatggatggactgagacgcagagtgtaccaggggatgctggactgcatggtgagcagcatccggcaggaaggactgggagtcttcttccggggggtcaccatcaacagtgcccgcgcctttcccgtcaatgctgtcaccttcctcagctacgaatatctcctccgctggtggggatgagccctgcggcaatgccagcagctccccatcaggcccacggcctggaggccagtttgagattggaggccaggttgaaagcttgcaaatcagtgcaagaggctcagcccttcctaaccaaggtgcctcccacccgcgcagatctgggctgggcagacacctgtgggagccggaagccagggggcctgtgcagcctccctgtgtagctggccttgactcctttgcctcccacatctgtgaaacagggagcatgaggcacaagtgagctggcaagtggtgctggtgacatcccagctcctgtcctgtgccttcacctctttttttttttttttttttttttgagatggagtctttctctgtcacccaggctggaatgcagtggcgtgatctcggctcactgcaacctccgcctttccaccttccgggttcaagcaactctcctgcctcagcctcccaagtagctgggactataggcgcccgccaccacacccagctaaatttttgtatttttagtagagacagggtttcaccatgtcagccaggatggtcttgatctcctgactttgtgatccgcccgcgtcggcctctcaaagtgctgggattacaggcgtgagccaccgcgcccggctgccttcacctcttaaggagctctgagactccacttctgagagtccctgcggcctcccacctccctgcctttcaaagctctctcccccatgacccaggataaccctatgtctcctcccccagaatccttcagtggctctcatcaccttcaggaaaagcccaaactccttccaccctccaggttcctccctccccacgaggctttgttctcctggggttgcttcctggaccctgaacaagttgtgctctcattggccgggcctggccagcagtgcacagtgcctggcaggttgactctaccatccccggggctggccccgctctcctccgagacccaggctgagcccagtcccctcacccttccttgacttacctccccacctgaggctgactttggggttcccagacaccctacccacacacatgccttgatcatagcacttgcctgcgcttcttcagagtcattaatttgcttctcggcttccccactggactgtgagctgcctgaggtcagggattgcgctttggatggtttccagcctgagcctggtgcttgaacagacgtgtgcaataaatgctcgttaaatgatg

SEQ ID NO: 1216 - DNA, 8715 bp, Homo Sapiens
  NM_001077261
gccggcgccctaggaggcggcggcgggaggatcgcgtcccgacccgaggccgggcctgctgcgcgcccccagcccgatcggcaccgccacttgcctgagcgccccggcggcccgagcgcgccccaagcccgggcgccaccgctgccacctccgcgaggtctccctgagtctttgaggacacagcctcgctggaggcagtttctggtgccagtgacggggtggcccgtgagctgatgacgaggactggcttttaatccttggtggtgattaagagaaagcttattggggcctgggagcagctccccgccgacccccaccaccatgtcgggatccacacagcctgtggcacagacgtggagggccactgagccccgctacccgccccacagcctttcctacccagtgcagatcgcccggacgcacacggacgtcgggctcctggagtaccagcaccactcccgcgactatgcctcccacctgtcgcccggctccatcatccagccccagcggcggaggccctccctgctgtctgagttccagcccgggaatgaacggtcccaggagctccacctgcggccagagtcccactcatacctgcccgagctggggaagtcagagatggagttcattgaaagcaagcgccctcggctagagctgctgcctgaccccctgctgcgaccgtcacccctgctggccacgggccagcctgcgggatctgaagacctcaccaaggaccgtagcctgacgggcaagctggaaccggtgtctccccccagccccccgcacactgaccctgagctggagctggtgccgccacggctgtccaaggaggagctgatccagaacatggaccgcgtggaccgagagatcaccatggtagagcagcagatctctaagctgaagaagaagcagcaacagctggaggaggaggctgccaagccgcccgagcctgagaagcccgtgtcaccgccgcccatcgagtcgaagcaccgcagcctggtgcagatcatctacgacgagaaccggaagaaggctgaagctgcacatcggattctggaaggcctggggccccaggtggagctgccgctgtacaaccagccctccgacacccggcagtatcatgagaacatcaaaataaaccaggcgatgcggaagaagctaatcttgtacttcaagaggaggaatcacgctcggaaacaatgggagcagaagttctgccagcgctatgaccagctcatggaggcctgggagaagaaggtggagcgcatcgagaacaacccccggcggcgggccaaggagagcaaggtgcgcgagtactacgagaagcagttccctgagatccgcaagcagcgcgagctgcaggagcgcatgcagagcagggtgggccagcggggcagtgggctgtccatgtcggccgcccgcagcgagcacgaggtgtcagagatcatcgatggcctctcagagcaggagaacctggagaagcagatgcgccagctggccgtgatcccgcccatgctgtacgacgctgaccagcagcgcatcaagttcatcaacatgaacgggcttatggccgaccccatgaaggtgtacaaagaccgccaggtcatgaacatgtggagtgagcaggagaaggagaccttccgggagaagttcatgcagcatcccaagaactttggcctgatcgcatcattcctggagaggaagacagtggctgagtgcgtcctctattactacctgactaagaagaatgagaactataagagcctggtgagacggagctatcggcgccgcggcaagagccagcagcagcaacaacagcagcagcagcagcagcagcagcagcagcagcagcccatgccccgcagcagccaggaggagaaagatgagaaggagaaggaaaaggaggcggagaaggaggaggagaagccggaggtggagaacgacaaggaagacctcctcaaggagaagacagacgacacctcaggggaggacaacgacgagaaggaggctgtggcctccaaaggccgcaaaactgccaacagccagggaagacgcaaaggccgcatcacccgctcaatggctaatgaggccaacagcgaggaggccatcaccccccagcagagcgccgagctggcctccatggagctgaatgagagttctcgctggacagaagaagaaatggaaacagccaagaaaggtctcctggaacacggccgcaactggtcggccatcgcccggatggtgggctccaagactgtgtcgcagtgtaagaacttctacttcaactacaagaagaggcagaacctcgatgagatcttgcagcagcacaagctgaagatggagaaggagaggaacgcgcggaggaagaagaagaaagcgccggcggcggccagcgaggaggctgcattcccgcccgtggtggaggatgaggagatggaggcgtcgggcgtgagcggaaatgaggaggagatggtggaggaggctgaagccactgtcaacaacagctcagacaccgagagcatcccctctcctcacactgaggccgccaaggacacagggcagaatgggcccaagcccccagccaccctgggcgccgacgggccacccccagggccacccaccccaccaccggaggacatcccggcccccactgagcccaccccggcctctgaagccaccggagcccctacgcccccaccagcacccccatcgccctctgcacctcctcctgtggtccccaaggaggagaaggaggaggagaccgcagcagcgcccccagtggaggagggggaggagcagaagccccccgcggctgaggagctggcagtggacacagggaaggccgaggagcccgtcaagagcgagtgcacggaggaagccgaggaggggccggccaagggcaaggacgcggaggccgctgaggccacggccgagggggcgctcaaggcagagaagaaggagggcgggagcggcagggccaccacagccaagagctcgggcgccccccaggacagcgactccagtgctacctgcagtgcagacgaggtggatgaggccgagggcggcgacaagaaccggctgctgtccccaaggcccagcctcctcaccccgactggcgacccccgggccaatgcctcaccccagaagccactggacctgaagcagctgaagcagcgagcggctgccatcccccccatccaggtcaccaaagtccatgagcccccccgggaggacgcagctcccaccaagccagctcccccagccccaccgccaccgcaaaacctgcagccggagagcgacgcccctcagcagcctggcagcagcccccggggcaagagcaggagcccggcaccccccgccgacaaggaggcagagaagcctgtgttcttcccagccttcgcagccgaggcccagaagctgcctggggaccccccttgctggacttccggcctgcccttccccgtgcccccccgtgaggtgatcaaggcctccccgcatgccccggacccctcagccttctcctacgctccacctggtcacccactgcccctgggcctccatgacactgcccggcccgtcctgccgcgcccacccaccatctccaacccgcctcccctcatctcctctgccaagcaccccagcgtcctcgagaggcaaataggtgccatctcccaaggaatgtcggtccagctccacgtcccgtactcagagcatgccaaggccccggtgggccctgtcaccatggggctgcccctgcccatggaccccaaaaagctggcacccttcagcggagtgaagcaggagcagctgtccccacggggccaggctgggccaccggagagcctgggggtgcccacagcccaggaggcgtccgtgctgagagggacagctctgggctcagttccgggcggaagcatcaccaaaggcattcccagcacacgggtgccctcggacagcgccatcacataccgcggctccatcacccacggcacgccagctgacgtcctgtacaagggcaccatcaccaggatcatcggcgaggacagcccgagtcgcttggaccgcggccgggaggacagcctgcccaagggccacgtcatctacgaaggcaagaagggccacgtcttgtcctatgagggtggcatgtctgtgacccagtgctccaaggaggacggcagaagcagctcaggacccccccatgagacggccgcccccaagcgcacctatgacatgatggagggccgcgtgggcagagccatctcctcagccagcatcgaaggtctcatgggccgtgccatcccgccggagcgacacagcccccaccacctcaaagagcagcaccacatccgcgggtccatcacacaagggatccctcggtcctacgtggaggcacaggaggactacctgcgtcgggaggccaagctcctaaagcgggagggcacgcctccgcccccaccgccctcacgggacctgaccgaggcctacaagacgcaggccctgggccccctgaagctgaagccggcccatgagggcctggtggccacggtgaaggaggcgggccgctccatccatgagatcccgcgcgaggagctgcggcacacgcccgagctgcccctggccccgcggccgctcaaggagggctccatcacgcagggcaccccgctcaagtacgacaccggcgcgtccaccactggctccaaaaagcacgacgtacgctccctcatcggcagccccggccggacgttcccacccgtgcacccgctggatgtgatggccgacgcccgggcactggaacgtgcctgctacgaggagagcctgaagagccggccagggaccgccagcagctcggggggctccattgcgcgcggcgccccggtcattgtgcctgagctgggtaagccgcggcagagccccctgacctatgaggaccacggggcaccctttgccggccacctcccacgaggttcgcccgtgaccacgcgggagcccacgccgcgcctgcaggagggcagcctttcgtccagcaaggcatcccaggaccgaaagctgacgtcgacgcctcgtgagatcgccaagtccccgcacagcaccgtgcccgagcaccacccacaccccatctcgccctatgagcacctgcttcggggcgtgagtggcgtggacctgtatcgcagccacatccccctggccttcgaccccacctccataccccgcggcatccctctggacgcagccgctgcctactacctgccccgacacctggcccccaaccccacctacccgcacctgtacccaccctacctcatccgcggctaccccgacacggcggcgctggagaaccggcagaccatcatcaatgactacatcacctcgcagcagatgcaccacaacgcggccaccgccatggcccagcgagctgatatgctgaggggcctctcgccccgcgagtcctcgctggcactcaactacgctgcgggtccccgaggcatcatcgacctgtcccaagtgccacacctgcctgtgctcgtgcccccgacaccaggcaccccagccaccgccatggaccgccttgcctacctccccaccgcgccccagcccttcagcagccgccacagcagctccccactctccccaggaggtccaacacacttgacaaaaccaaccaccacgtcctcgtccgagcgggagcgagaccgggatcgagagcgggaccgggatcgggagcgggaaaagtccatcctcacgtccaccacgacggtggagcacgcacccatctggagacctggtacagagcagagcagcggcagcagcggcagcagcggcgggggtgggggcagcagcagccgccccgcctcccactcccatgcccaccagcactcgcccatctcccctcggacccaggatgccctccagcagagacccagtgtgcttcacaacacaggcatgaagggtatcatcaccgctgtggagcccagcacgcccacggtcctgaggtccacctccacctcctcacccgttcgcccggctgccacattcccacctgccacccactgcccactgggcggcaccctcgatggggtctaccctaccctcatggagcccgtcttgctgcccaaggaggccccccgggtcgcccggccagagcggccccgagcagacaccggccatgccttcctcgccaagcccccagcccgctccgggctggagcccgcctcctcccccagcaagggctcggagccccggcccctagtgcctcctgtctctggccacgccaccatcgcccgcacccctgcgaagaacctcgcacctcaccacgccagcccggacccgccggcgccacctgcctcggcctcggacccgcaccgggaaaagactcaaagtaaacccttttccatccaggaactggaactccgttctctgggttaccacggcagcagctacagccccgaaggggtggagcccgtcagccctgtgagctcacccagtctgacccacgacaaggggctccccaagcacctggaagagctcgacaagagccacctggagggggagctgcggcccaagcagccaggccccgtgaagcttggcggggaggccgcccacctcccacacctgcggccgctgcctgagagccagccctcgtccagcccgctgctccagaccgccccaggggtcaaaggtcaccagcgggtggtcaccctggcccagcacatcagtgaggtcatcacacaggactacacccggcaccacccacagcagctcagcgcacccctgcccgcccccctctactccttccctggggccagctgccccgtcctggacctccgccgcccacccagtgacctctacctcccgcccccggaccatggtgccccggcccgtggctccccccacagcgaagggggcaagaggtctccagagccaaacaagacgtcggtcttgggtggtggtgaggacggtattgaacctgtgtccccaccggagggcatgacggagccagggcactcccggagtgctgtgtacccgctgctgtaccgggatggggaacagacggagcccagcaggatgggctccaagtctccaggcaacaccagccagccgccagccttcttcagcaagctgaccgagagcaactccgccatggtcaagtccaagaagcaagagatcaacaagaagctgaacacccacaaccggaatgagcctgaatacaatatcagccagcctgggacggagatcttcaatatgcccgccatcaccggaacaggccttatgacctatagaagccaggcggtgcaggaacatgccagcaccaacatggggctggaggccataattagaaaggcactcatgggtggcggcgggaaggccaaggtctctggcagacccagcagccgaaaagccaagtccccggccccgggcctggcatctggggaccggccaccctctgtctcctcagtgcactcggagggagactgcaaccgccggacgccgctcaccaaccgcgtgtgggaggacaggccctcgtccgcaggttccacgccattcccctacaaccccctgatcatgcggctgcaggcgggtgtcatggcttccccacccccaccgggcctccccgcgggcagcgggcccctcgctggcccccaccacgcctgggacgaggagcccaagccactgctctgctcgcagtacgagacactctccgacagcgagtgactcagaacagggcgggggggggggcggtgtcaggtcccagcgagccacaggaacggccctgcaggagcagggcggctgccgactcccccaaccaaggaaggagcccctgagtccgcctgcgcctccatccatctgtccgtccagagccggcatccttgcctgtctaaagccttaactaagactcccgccccgggctggccctgtgcagaccttactcaggggatgtttacctggtgctcgggaagggaggggaaggggccggggagggggcacggcaggcgtgtggcagccacacgcaggcggccagggcggccagggacccaaagcaggatgaccacgcacctccacgccactgcctcccccgaatgcatttggaaccaaagtctaaactgagctcgcagcccccgcgccctccctccgcctcccatcccgcttagcgctctggacagatggacgcaggccctgtccagcccccagtgcgctcgttccggtccccacagactgccccagccaacgagattgctggaaaccaagtcaggccaggtgggcggacaaaagggccaggtgcggcctggggggaacggatgctccgaggactggactgtttttttcacacatcgttgccgcagcggtgggaaggaaaggcagatgtaaatgatgtgttggtttacagggtatatttttgataccttcaatgaattaattcagatgttttacgcaaggaaggacttacccagtattactgctgctgtgcttttgatctctgcttaccgttcaagaggcgtgtgcaggccgacagtcggtgaccccatcactcgcaggaccaagggggcggggactgctggctcacgccccgctgtgtcctccctccctcccttccttgggcagaatgaattcgatgcgtattctgtggccgccatctgcgcagggtggtggtattctgtcatttacacacgtcgttctaattaaaaagcgaattatactccaaaaaaaaaaaaaaaaaaa

SEQ ID NO: 1217 - DNA, 2293 bp, Homo Sapiens
  NM_001077268
agaggaggctagcgttccttgctgcctcgccccgcggcctctaggagacaggggccacggggagagcacagccacccggcgcgaagagccctctgtaccccgcttcctcttgaggccctcggaccgtccaggaaatgtctgggagcccgcctgcggagggcatagcgccgaccctcgctccccgcccaggacccgaatgaacctggagagcggatgccagcagtggccgaggcgctaggacaggaaggaccgccagacctctcaagatcagccttcctcgccaccgttctcacctctttgtccgctgccttctcctcaatgcctagcagcgcgtacaggtccatctgtaagagctccttggtcactgccatggttccggcctgacggattcgtactacaactcccaagagtctaagcgcgcgtgaggactgcaggctccgagcggcgcctagccctctgggaattgtgttctgggtcaggcttgactgactctgagggaggccggcagtcgtgaatgaactacgactcccagcagcccccgttgccgccgctgccgtacgctggctgcaggagagcgtccggattccctgctctaggtcgcggcgggacagtgccagtgggcgtgtggggcggggcagggcagggaagggaagggcggagctggggtgagggtccaaggggcccaggacttggccggcgtgatctcagctctgcagaccctgcggtgctgggagccaccatggagagtaggtgctacggctgcgctgtcaagttcaccctcttcaagaaggagtacggctgtaagaattgtggcagggccttctgttcaggctgcctaagcttcagtgcagcagtgcctcggactgggaacacccaacagaaagtctgcaagcaatgccatgaggtcctgaccagagggtcttctgccaatgcctccaagtggtcaccacctcagaactataagaagcgtgtggcagccttggaagccaagcaaaagcccagcacttcccagagccagggactgacacgacaagaccagatgattgctgagcgcctagcacgactccgccaggagaacaagcccaagttagtcccctcacaggcagagatagaggcacggctggctgccctaaaggatgaacgtcagggttccatcccttccacccaggaaatggaggcacgacttgcagcgttgcagggcagagttctaccttctcaaaccccccagccggcacatcacacaccggacaccaggacccaagcccagcagacacaggatctgctaacgcagctggcagctgaggtggctatcgatgaaagctggaaaggaggaggcccagctgcctctctccagaatgatctcaaccagggtggcccagggagcactaattccaagaggcaggccaactggtccttggaggaggagaagagcagactgctggctgaggcagcacttgagttgcgggaggagaacacgaggcaggaacggattctggccctggccaagcgactagccatgctgcggggacaggaccccgagagagtgaccctccaggactatcgcctcccagacagtgatgacgacgaggatgaggagacagccatccaaagagtcctgcagcagctcactgaagaagcttccctggatgaggcaagtggctttaacatccctgcagagcaggcttctcgaccctggacgcaaccccgcggggcagagcctgaggcccaggatgtggaccccaggcctgaggctgaggaagaggagctcccctggtgctgcatctgcaatgaggatgccaccctacgctgcgctggctgcgatggggacctcttctgtgcccgctgcttccgagagggccatgatgcctttgagcttaaagagcaccagacatctgcctactctcctccacgtgcaggccaagagcactgaagacaccctggtcctcccggaagggcagtcccacaggcagcggcacccatttctgggcccagccacaggacgtccgatgggagagcttgtctggctctactgatgatggataggccccttcctgagccttggtgtccctggaatgaggaaagattctccattcgagagaatgactgggagggaagaagtcggggccctcctattagaagcccagactggaagtgagaggcatgatggggagagaccagactgaatctacgggtgagccctgtaacctggctctagggcacaggcccctcccctggcacttagtgggtctaataaagtatgttgattcattgggaaaaaaaaaaaaaaaaaaaa

SEQ ID NO: 1218 - DNA, 1828 bp, Homo Sapiens
  NM_001077394
aggtgaggccggcggcgtgggccttttctctgcacggagccggcgcttttgcagttgcttctgcggaaaggtggtagttaagaatttgtaaaggccagagaactacctacgattctctcagcgggtaattggctgctcctagtctctcttctcctcaagtttgaaatgctttatctcatcgggttgggcctgggagatgccaaggacatcacagtcaagggcctggaagttgttagacgctgcagtcgagtgtatctggaagcctacacctcagtcctaactgtagggaaggaagccttggaagagttttatggaagaaaattggttgttgctgatagagaagaagtggaacaagaagcagataatattttaaaggatgctgatatcagtgatgttgcattccttgtggttggtgatccatttggggccacaacacacagtgatcttgttctaagagcaacaaagctgggaattccttatagagttattcacaatgcctccataatgaatgctgtaggctgctgtggtttacagttatataagtttggagagacagtttctattgttttttggacagacacttggagaccagaaagcttctttgacaaagtgaagaagaacagacaaaatggcatgcacacattatgtttactagacatcaaagtaaaggagcagtctttggaaaatctaatcaagggaaggaagatctatgaacctccacggtatatgagtgtaaaccaagcagcccagcagcttctggagattgttcaaaatcaaagaatacgaggagaagaaccagcagttaccgaggagacactttgtgttggcttagccagggttggagccgacgaccagaaaattgcagcaggcactttaaggcaaatgtgcactgtggacttgggagaaccattgcattccttgatcatcacaggaggcagcatacatccaatggagatggagatgctaagtctgttttccataccagaaaatagctcagaatctcaaagcatcaatggactttgaacatagatatttaccattgtctgatgtaaatttcagccatatatggattgatatggtttggatgtatccccacccaagtctcatcttgaattttaatcctcataattcccaggtgttgtggtaggtaattgaatcatgggggcagtttccctcatgctattctcatgatagtgagctttcatgagatctgatggttttataagtgcctggcatttcccctactggctctcattctcactcttgccgccctgtgaagaggtgccttccaccgtgattgttaagtttcctgaggccttcccagccatgtggaactgtgagtcgaaaattaaacctcttttataattacccagtctcgggtatttcttcatagcagtgtgagaatggattaatacctggatgcatgcatgtttgtgtaacaaacaggtcttttggcttatctagtaagtataaaacaagtgaccaaaaagaagttgactcaacaatgcttggtttcttgtggcagtgagttttttccctatgatatcatcagttgttgctgctattttggcaaattttcaggatgtacacataaagcagaccaggctggaaagcttgtggatagacatccactgacagaatcatttaagagcagtttttatttatgaaaccaatttatacaaggtggttgttaacagaatataacttagaggtaactggaatttgaatcacttgaatctgttttaaagggtaaaaaatgttatgagtgccaagaaaagcaaataaaagattagtaaatgttcacaaaaaaaaaaaaaaaaaaaaaaaa

SEQ ID NO: 1219 - DNA, 3226 bp, Homo Sapiens
  NM_001077442
aggaatggggcggggactaggccttcgcctcggcggcagaggagactcgggggccattttgtgaagagacgaagactgagcggttgtggccgcgttgccgacctccagcagcagtcggcttctctacgcagaacccgggagtaggagactcagaatcgaatctcttctccctccccttcttgttttcggctttgtgagaaaccttaccatcaaacacgatggccagcaacgttaccaacaagacagatcctcgctccatgaactcccgtgtattcattgggaatctcaacactcttgtggtcaagaaatctgatgtggaggcaatcttttcgaagtatggcaaaattgtgggctgctctgttcataagggctttgccttcgttcagtatgttaatgagagaaatgcccgggctgctgtagcaggagaggatggcagaatgattgctggccaggttttagatattaacctggctgcagagccaaaagtgaaccgaggaaaagcaggtgtgaaacgatctgcagcggagatgtacgggtcagtaacagaacacccttctccgtcccctctactcagctcctcttttgacttggactatgactttcaacgggactattatgataggatgtacagttacccagcacgtgtacctcctcctcctcctattgctcgggctgtagtgccctcgaaacgtcagcgtgtatcaggaaacacttcacgaaggggcaaaagtggcttcaattctaagagtggacagcggggatcttccaagtctggaaagttgaaaggagatgaccttcaggccattaagaaggagctgacccagataaaacaaaaagtggattctctcctggaaaacctggaaaaaattgaaaaggaacagagcaaacaagcagtagagatgaagaatgataagtcagaagaggagcagagcagcagctccgtgaagaaagatgagactaatgtgaagatggagtctgaggggggtgcagatgactctgctgaggagggggacctactggatgatgatgataatgaagatcggggggatgaccagctggagttgatcaaggatgatgaaaaagaggctgaggaaggagaggatgacagagacagcgccaatggcgaggatgactcttaagcacatagtggggtttagaaatcttatcccattatttctttacctaggcgcttgtctaagatcaaatttttcaccagatcctctcccctagtatcttcagcacatgctcactgttctccccatccttgtccttcccatgttcattaattcatattgccccgcgcctagtcccattttcacttcctttgacgctcctagtagttttgttaagtcttaccctgtaatttttgcttttaattttgatacctctttatgacttaacaataaaaaggatgtatggtttttatcaactgtctccaaaataatctcttgttatgcagggagtacagttcttttcattcatacataagttcagtagttgcttccctaactgcaaaggcaatctcatttagttgagtagctcttgaaagcagctttgagttagaagtatgtgtgttacaccctcacattagtgtgctgtgtggggcagttcaacacaaatgtaacaatgtatttttgtgaatgagagttggcatgtcaaatgcatcctctagaaaaataattagtgttatagtcttaagatttgttttctaaagttgatactgtgggttatttttgtgaacagcctgatgtttgggaccttttttcctcaaaataaacaagtccttattaaaccaggaatttggagaaaaaaaaaaccctggttttttatttttgtattttattattgtttacttcaaactttgttttacagcgtcctccacaaaacctctagaatgcactagatatatttttcttggagtcataatcatgatgcataccaacacaacactactcaaattatatttcattgagatgcatgttgcattgaggagtcaacttgacatagagtggagactttttcaaaatggcttttacatcctaatgaaagtttgggaagtatatcctctctgccttttcatcagtgctttgtggtccagctggcaccctttctgaggtttgtgttttgtgctaaatggttttgtccttaaataggagaggctcaaaaacatcaagatttcaggaaaatggcgacagctgcataatggaacccccctgcttctattttgttcttttaattactatttatagccccagttaccttctgaattctgaagtgtatatacctccatgttcctgaaaacaagaaaactcttacttcctgatattccatagactgccttcccaggtgattgagaacatagagaatgttacacatttattttactctaaatgatcttttacccctgttagctaatctttgtgttttcctcaactttattaattacagtgattgcatttttagcatccagttgtaagatgaatatattaaacagctaccagtgttggtgatacctcatccttgaaaggcttagttcatttgtgttttatacttcagtttttccagcatagcagaaaatgccgcttataatttttgtgcacacaaaccttggattcccctgtaaagttgctattgtttcatagcatgcggcactggccttttttcatcctactcattacaggcaaaactcatgtcttatttatgaggattttatagatcattttctgtaacaggtgacaaaagcagaaaagaatgaagaggctgaagtatgaactacccttggagcccatatacatgatataggcaatttcttttgtatgttaattcagtcaaaaatactacccacttgatgttttctaatctgatgtgagctcatgttacacagacttttagtaagtaacccgtgactagaaaataaactggatgcttaggagagagtgtcagatgtataagatgctaataaaacctgtttaatattattgttagctgtaagtttttgggaaatactgaacaaattagtccacaatcaagtgtctacttttcccttcactgtagggcctctccctgcacagagcagtctgtttagctgtgaacaccacaatctgcagatgttcaagtcccttacataaaatggcatagtatttatatgtaacctatgcatattctcctgtatattttaaatcatctctacattaaaatacctgataaaatgtaaatggtatgtaaa

SEQ ID NO: 1220 - DNA, 2240 bp, Homo Sapiens
  NM_001077446
gaggcctaggggcggggcttcgccgagaccccggaggctttgggtgcgctgcagcggtctgcggcgcgcagctgtttcggtaactgctttgcctcccggctcccgcaggaggatgctggtggtggaggtggcgaacggccgctccctggtgtggggagccgaggcggtgcaggccctccgggagcgcctgggtgtggggggccgcacggtaggcgccctgccccgcgggccccgccagaactcgcgcctgggcctcccgctgctgctgatgcccgaagaggcgcggctcttggccgagatcggcgccgtgactctggtcagcgccccgcgtccagactctcggcaccacagcctggccctgacatccttcaagcgccagcaagaggagagcttccaggagcagagcgccttggcagctgaggcccgggagacccgtcgtcaggagctcctggagaagattacggagggccaggctgctaagaagcagaaactagaacaggcttcaggggccagctcaagccaggaggccggctcgagccaggctgccaaagaggatgagaccagtgatggccaggcttcgggagagcaggaggaagctggcccctcgtcttcccaagcaggaccctcaaatggggtagcccccttgcccagatctgctctccttgtccagctggccactgccaggcctcgaccggtcaaggccaggcccctggactggcgtgtccagtctaaagactggccccacgccggccgccctgcccacgagctgcgctacagtatctacagagacctgtgggagcgaggcttcttcctcagtgcggctggcaagttcggaggtgacttcctggtctatcctggtgaccccctccgcttccacgcccattatatcgctcagtgctgggcccccgaggacaccatcccactccaagacctggttgctgctgggcgccttggaaccagcgtcagaaagaccctgctcctctgttctccgcagcctgatggtaaggtggtctacacctccctgcaatgggccagcctgcagtgaactccagagacctaggggatgtggctgtgtcggcagcaagagcctttctggatgttccccagctcttctctgggagtctagaacatcctcctacctttctccgcggttagtttttgattccaggttttcgaacactacatcttttttatgttcttccttgtttcaaagcacttattggctgtgtttttgtagttacctattttcacactgtgagcttcccgagaatggggcctgggtttgattcatctgttttctacagggtttaagtctcaggaggtctcaataaacttggtatataaatgttcatgatttgaatgtttgcgacagtcctggaacccgtggatggtctcatctgcatgtacaggtgagaaaaaggcctggaggggggggactgacttgcccaaagtcacacacttagtaaatagcaggcctggcctttcaaaattggtttttctgactcctaaatctgcactctttctacctcactaaacttcctcttgaaaagatttctatgaaatttcccagatgcatacaaacgttataaataaaaatataggctgggcacgatgacccacacctgtaatcccacagaacttttggaggccaaggcagggggatcgcttgagcccaggagtttgagaccagctctggcaacattgtaatacccagtctctacaaaaaataatttaaaaaaaaattagccagggatcccttgagcctgggaagttgaggctgctgtgagctgtgattgcaccactgccctccagcctgggagacagagcaagaacctgtctcaaaaaatatatatatgtgtgtgtgtatatatgtaaatatacacacatgtatgtatatatatgtgtgtgtatatatatatatattatgaaaggaaatgagtattgtaattttaggagttcagagcctggggagaaaggaaggactctggaaggcgttctgctttttcatggcctgggtagtggtggagaatttttttgatactgtatatttatattttagactcttttttggatgtgttatattctgcaatttttataaaagctaaaacacatgtatttgtaaaaaatttgcacttatgaaatcatttacccatgtttttgcttaagaaagtactagaacactaccactattccaataattacacctttatcttatcaatgtgaaaaaaaaaaaaaaaaaa

SEQ ID NO: 1221 - DNA, 4163 bp, Homo Sapiens
  NM_001077498
acacgctgcgcaggcgcaggagcggctccgggtagtccccacagctgcgccggtgactgaggggccgggcagtggagaagtggtggcggcgggcggcgggcggcaaaggagcagccatgagggccgggcccagtcaccgacctgtgagccactgccccatgttgtgttgatgccaatctgccatgctagcctgtctaccagggccaggtgacctgtcctttcagcttctttctcacacgcagatgaacactggacttcagaaatgggacactacacagaaaatgagaactgctcactatcctaccccagccgaattggatgcgtatgctaagaaggtcgcaaacaacccactgactataaaaatcttccccaacagtgtgaaggttccccagcggaaacacgttcgtcgtactgtgaacggcctcgacacatcagcccagcgctacagcccctacccgacacaggctgccaccaaggcaggcctgcttgccattgtcaaagtgccagccaaaagcatactcaaggactttgacggcacccgagcccggttgctccctgaggccatcatgaaccccccagtggcaccctatgctactgtggcacccagcactttagcccacccccaggcccaggctctggcccgccagcaggccctgcagcatgcacagaccctggcccatgcccctccccagacgctgcagcaccctcagggtatcccgccaccccaggcactgtcccaccctcagagcctccagcagcctcagggcctgggccaccctcagcccatggcccaaacccagggcttggtccaccctcaggccctggctcaccagggtctccagcacccccacaatcccttgctgcatggaggccggaagatgccagactcagatgcccccccgaatgtgaccgtgtctacctcaactatccccctttcaatggcggccactctgcagcacagccagcctccggacctgagtagcatcgtgcaccagatcaaccagttttgccagacgagggcaggcatcagcactacctcagtgtgtgagggccagatcgccaaccccagccccattagtcgcagtctgctcatcaatgcaagcacccgggtgtcgacccacagcgtccccacaccaatgccttcatgtgtggtcaatcccatggagcacacccacgcggccaccgccgcgttgcctgctgcaggtcctgtcaacctgcccacaggcatctctcgcgtccccactggctaccctagcgacctcaagccagtcacctggaaccagcaccagctggcccacctacagcagatgtgcagcgaggctagtgggacgccagcccctggcctgacaggcaagcatgcggcaggacgcgagttggcagggcctggctttgtgggcaaggcccctgcctacccgcaggaactctgcctggcgcagtccttccatctgaagccacccctggaaaagccgaccccatccccaccagtcaacggcatggcagccccattggcctaccccaatggtcactacttccaacccctgtggaacaacattctgcccactcccaatagcgacagctcggggtctcaggaccttgccatgccgttccacggtgggcagcccacaggtgcacccctcgactgtgcggcagctcccggggcccactaccgagcagggaccgggggcggtccagtggcaagccagaacagcttgatgcaaacagtggattacctaagtggggatttccaacaggcctgcttccgagaacagagcctggccatgctgagcaaggcccaccgagcccctggcaaccgagcccccgatcccacagagagtcgaagtcttcatattcagcacccagggtatagataggtagccctgctgccctccacgtgcaacacatcatacatcaccctcctaggtttagtcttttaagtaactggatagtttcaaagtttcactgctccagtgtgatcattcttagatgtctaagaaagggaatttggtgggatctaagtggggacagaaggggtcctctcgtcctcccctccagcaacttttggttttatgttagaacctaaccctaagcccaggcttttctctccactgactgcctgtcagctagtctctccaccttggccatttccagccagctcccacccatcttttcttgaatctcttcctgtttcccttaggacgactgaggtgtgggctgacggaatgccctagttgaggtagtataggtgctcaggcccctaatccagacctctacctgttgctaccccccttcccctccctccaggactaagaagcaagatttcccaggtgctctgaaagctaattacttactcatcgaaggatctcaaatcaaagctgacccagtcttcatatccttcaagttcctttccattcctcaaggctttgttttgtgtctatattgatcccacagccactgcacttgcccttgccacacttgatctcaagggcatcttggaagtatttgaccatttcttgagatatggggggaaaaagtctttgtattggcatcttggttccagactcccctttccaaacctagaaaaatacagtgacctttgagcatacccaagatccctttctcactgttgcctgtcccctaactcacctccccacagcccctatcctttccccctcaacaaaaacaaaatctaccttacttgaggaattaggtaggtaaggaatgatcacattggagtttgggattaaaaacaccaaaaaaaaaaaaatgcatttggttctctctacactggctaagaatattgctctacactgtaagttttaaacgttacgtttctgtatgaatgtagtgtgggtttgagtagcattgtgtgtgagtggccccacaggtacattcaccctctagtgcagcccctcagtttaatgaaggaaaaaaaaacaaacacaaagccttaagctctttgagtacttcctttaccaaatgagcatggttctaacacctggagctgggcctacattggaaacaagcccctcctgccctctgtccattcttagagcataccttcatccactccatgctcagcacgtctcatcccaagcgacaattagttggctagaaacacttttctgtaattttaaacttagactgttttgttacaaatttttgcaccattctgttaaagatgcagaattgggcttttttattttttacagatgaaataagcccttacctttcctcttgtctctggggaatgtcagctgatggttcttatttaaggttttgcattttgttcactatccactactgttcgttagccagaaattctctagtgatctgaagcaatgtgactgaagaccagttttaagttatgtgttggcaagttgccttatatttaaaaggaaaaagaaaaaaaaaaaagcctgattgtgttatgccaaatgatagcaacatgaagtcctaatttattgttcccaattgttttcctgccgtctgtgaacactggtacctccctgtcctgatcccccaggagcacctgtagcttctgactcaatgccttctccgaaggtgttggccgccatctcacccagggccctcttccagttcctgcttttctgagtcagatttaaagagcaccactgtcttccccctaccccttgcttgatctccaaagcagatattcttgctgtatttttttttcctccccaatacctctccctgaaaggtgagctgctattttaggaaactggaccagacaccaacttgggggctttaagtcaaacaacctcaaacccatctcttcctgtgtaggggtgcaagcctctgaagctctcactcccacccttagtctgcatggaaaatgtactgtgatccccctgcccccaactgccctcgcctttggtgtgagatgttccttctttcggagttcagcctgagtccctctcccctctgccagccaacccccagccagcaataagggtccaagccagggcctcctctccacactccctgtctccatcctacactaccctagggaatacctggattccccattctatccacatactgtagcattcattctccatctctctcacctcacctgtggtggtttatgggtgtgatggggtttttaagattattataaaccagtaaaaataagaaaacctcgc

SEQ ID NO: 1222 - DNA, 4741 bp, Homo Sapiens
  NM_001077523
ttgtccgccatttgcaaggggcccggagcgggatcgcggcacctgccgagcgggtcgccgcctctgccgcggtccttggaccccgccgccgccctggcctgggagcttgccccgccgcagcggccggcagcgcggcgctccgcgggcggcaggcacgggccccgggccccctcacggcgcccagccgcgggcctcccgaggcaaaagcccgtgggccgccgcgatggccctcaagatggtgaagggcagcatcgaccgcatgttcgacaagaatctgcaggacttggtccgcggcatccgtaaccacaaggaggacgaggcaaaatacatatctcagtgcattgatgagatcaagcaggagctgaagcaggacaacatagcggtgaaggcgaacgcggtctgcaagctgacgtatttacagatgttgggatacgacatcagctgggccgccttcaacatcatagaagtgatgagtgcctccaagttcaccttcaagcgaattggctacctcgctgcttcccagagctttcacgaaggcaccgacgtcatcatgctgaccaccaatcagatccgtaaggacttgagcagccccagccagtacgacacaggtgttgcactgacgggtctgtcctgcttcgtcaccccagaccttgccagagacctggcaaatgacatcatgacactgatgtcacacaccaagccctacatcaggaagaaggctaagctgatcgagcccctcaccaatctcatccacagcacgtctgccatgtctctcctctatgaatgtgtgaacaccgtgattgcagtgctcatctcgctgtcctccggcatgcccaaccacagcgccagcatccagctttgtgttcagaaattaaggatattgatcgaggactccgatcagaacttgaagtacctggggctgctggcaatgtccaagatcctgaagacccaccccaagtccgtgcagtcccacaaggacctcatcctgcagtgcctggacgacaaggacgagtccatccggctgcgggccctggacctgctctatgggatggtgtccaagaagaacctgatggagatcgtgaagaagctgatgacccacgtagacaaggcagagggtaccacctaccgtgacgagctgctcaccaagatcattgacatctgcagccagtccaactaccagtacatcaccaacttcgagtggtacatcagcatcctggtggagctgacccggctggagggcacacggcacggccacctcatcgccgcccaaatgctggacgtggccatccgcgtgaaggccatccgcaagttcgccgtgtcccagatgtctgcgctgcttgacagtgcacacctgctggccagcagcacccagcggaacgggatctgtgaggtgctgtacgctgccgcctggatctgcggggagttctcagagcatctgcaggaaccacaccacactttggaggccatgctgcggcccagagtcaccacgctgccaggccacatccaggccgtgtatgtgcagaacgtggtcaagctctacgcctccatcctgcagcagaaggagcaggccggggaggcagagggcgctcaggccgtcacccagctcatggtggaccggctgccccagtttgtgcagagcgcagacctggaggtgcaggagcgggcgtcctgcatcctgcagctggtcaagcacatccagaagcttcaggccaaggacgtgcctgtggcagaggaggtcagcgctctctttgctggggagctgaacccagtggcccccaaggcccagaagaaggttccagtccccgaaggcctggacctggacgcctggatcaatgagccactctcggacagcgagtcagaggacgagaggcccagggccgtcttccacgaggaggagcagcggcgtcccaagcaccggccgtcggaggcggacgaggaagagctggctcggcgccgagaggcccggaagcaggagcaggccaacaaccccttctacatcaagagctcgccatcgccacagaagcggtaccaggacaccccgggcgtggagcacattcccgtggtgcagattgacctctccgtccccttgaaggttccagggctgcctatgtcagatcagtatgtgaagctggaggaggagcggcggcaccggcagaagctggagaaggacaagaggaggaaaaagaggaaggagaaggagaagaagggcaagcgccgccacagctcgctgcccacggagagcgacgaggacatcgcccctgcccagcaggtggacatcgtcacagaggagatgcctgagaatgctctgcccagcgacgaggatgacaaagaccccaacgacccctacagggctctggatattgacctggataagcccttagccgacagcgagaaactgcctattcagaaacacagaaacaccgagacctcaaaatcccctgagaaggacgttcccatggtagaaaagaagagcaagaaacccaagaagaaagagaaaaaacacaaagagaaagagagagacaaggagaagaagaaggagaaggagaagaaggctgaggacctggacttctggctgtctaccaccccaccgcctgcccccgcccccgcccccgcccccgttccatccacggacgagtgtgaggacgccaagacggaggcgcagggcgaggaggacgatgccgaggggcaagaccaggacaagaaatctcccaagcctaagaagaagaagcacaggaaggagaaggaggagcggaccaaaggcaagaagaagtccaagaagcagcctccaggcagcgaggaggcagcgggggagccggtgcagaatggcgcgccagaggaggagcagctcccgcctgagtccagctactccctcctcgctgaaaattcctatgttaaaatgacctgtgacatccggggcagtctgcaggaggacagccaggtcactgtggccatcgtgctggagaacaggagcagcagcatcctcaagggcatggagctcagcgtgctggactcactcaatgccaggatggcccggccgcagggctcctccgtccacgatggcgtccccgtgcctttccagctgcccccaggcgtctccaacgaagcccagtatgtgttcaccatccagagcatcgtcatggcgcagaagctcaaggggaccctgtccttcattgccaagaatgacgagggtgcgacccacgagaagctggacttcaggctgcacttcagctgcagctcctacttgatcaccactccctgctacagtgacgcctttgctaagttgctggagtctggggacttgagcatgagctcaatcaaagtcgatggcattcggatgtccttccagaatcttctggcgaagatctgttttcaccaccatttttccgttgtggagcgagtggactcctgcgcctccatgtacagccgctccatccagggccaccatgtctgcctcctggtgaaaaagggtgagaactctgtctcagtcgacgggaagtgcagtgactccacgctactgagcaacttgttagaagagatgaaggcgacgctggccaagtgttgagagctgcctgcgagccccgcaccaccccgcggagcacgtacccagggaccgcagccctgacgtgtctcgcctctcctcagtcgtgtgtactgtacccaagcctgagtgttaatttaactctatgttgtccgccgtgtagacatccgaggtcatttgttgcgttgaattatctgaccatccttttttactgtgactcttcccattctctttggcaagaagtccccttctcgcccccaaaccagcaagggactcccccacctgggtctgtgccctgccccgcgctgggggccgagtccttgaatgtggcttcaggggctcctgtcctgggccagggcctgatgggcaccacgtgaggggcacttggtggacagggcggggctgacgtggcctcctctggggtcgcctgcttttgacccaaaggtcctgacggttgcgtccgggggaggggaaggaagggccgctgtcgccaaggttttctctcccagaacccacagtgggaaagcggtcttgccaggcgttgtccattgtcagtgtgctcgtgggctggtgactgggtcttgggatcccaggccacgcgccagccaggctgtgggcagggcggggccagggacgccaaagagaggttgcagtcagaaccgtggacggggtgggttgaggcctctctgccacccgtcttcctggtcagcagaagtgcatctcggcttgggtttggggtggtccgcatcccctgcttgccactatgcgcaccaaggtttccccacatccttcccagcacccttaggaaggcccaggcagggcctggaagcagcggacctgggctgttctgtgttgaaggagtgtgcccagtgcccttgggcaggacctgtgagagccacctcacaggcagagcccccaccaggcagggcaaggagactccgctcactccccacggccagcgtgggcacaggactgacccttcttcagagataatgacattttatcttctccttttgatgaaaactgtcactttagcatgtaatccattacagaatcccatgcagtgattccaggatttgaaattgtatgatgtgttacataagaatttatttgctatcgacattcccgtataaagagagagacatatcacgctgctgtcatgattttgtgtcaagatgatccaataaagttgtaaaacaggca

SEQ ID NO: 1223 - DNA, 1892 bp, Homo Sapiens
  NM_001077593
gaagaggactccaagcgccatggccgctgccgcccgagcccgggtcgcgtacttgctgaggcaactgcaacgcgcagcgtgccagtgcccaactcattctcatacttactcccaagcccctggactttcaccttctgggaaaacaacagattatgcctttgagatggctgtttcaaatattagatatggagcagcagttacaaaggaagtaggaatggacctaaaaaacatgggtgctaaaaatgtgtgcttgatgacagacaagaacctctccaagctccctcctgtgcaagtagctatggattccctagtgaagaatggcatcccctttacggtttatgataatgtgagagtggaaccaacggattcaagcttcatggaagctattgagtttgcccaaaagggagcttttgatgcctatgttgctgtcggtggtggctctaccatggacacctgtaaggctgctaatctgtatgcatccagccctcattctgatttcctagattatgtcagtgcccccattggcaagggaaagcctgtgtctgtgcctcttaagcctctgattgcagtgccaactacctcaggaaccgggagtgaaactactggggttgccatttttgactatgaacacttgaaagtaaaaattggcatcacttcgagagccatcaaacccacactgggactgattgatcctctgcacaccctccacatgcctgcccgagtggtcgccaacagtggctttgatgtgctttgccatgccctggagtcatacaccaccctgccctaccacctgcggagcccctgcccttcaaatcccatcacacggcctgcgtaccagggcagcaacccaatcagtgacatttgggctatccacgcgctgcggatcgtggctaagtatctgaagagggctgtcagaaatcccgatgatcttgaagcaaggtctcatatgcacttggcaagtgcttttgctggcatcggctttggaaatgctggtgttcatctgtgccatggaatgtcttacccaatttcaggtttagtgaagatgtataaagcaaaggattacaatgtggatcacccactggtgccccatggcctttctgtggtgctcacgtccccagcggtgttcactttcacggcccagatgtttccagagcgacacctggagatggcagaaatactgggagccgacacccgcactgccaggatccaagatgcagggctggtgttggcagacacgctccggaaattcttattcgatctggatgttgatgatggcctagcagctgttggttactccaaagctgatatccccgcactagtgaaaggaacgctgccccaggaaagggtcaccaagcttgcaccctgtccccagtcagaagaggatctggctgctctgtttgaagcttcaatgaaactgtattaattgtcattttaactgaaagaattaccgctggccattgtagtgctgagagcaagagctgatctagctagggctttgtcttttcatctttgcgcataacttacctgttaccagtataggtgggatatacatttatcttgcaggaaattccccaaagctcagagtccagttccttccataaaacaggctggacaaatgaccactatgttagacccccaggctcgacttcaggggtcagtgttcctgtcccaaaccccacacagaatactctgcctctgtttcatgtagcaaatgagcaaaaactcagtatctatcaaaagtgtaaattatatttcctatgcctagtaattcacttcatgtctaaaaatttatctgatagaaacactagcaccagtacatacagaagcatggcaaggatgtttctggcagcacttttctaataataaaagatttgaaacaaaaaaaaaaaaaa

SEQ ID NO: 1224 - DNA, 1979 bp, Homo Sapiens
  NM_001077654
acacccttggtccctcctgcaagttccgcccctggcctctgcctccttttctcccgccggctctaacccgcgcttggctaaggtccgcgggaacccgtgagccaccgagagagcagagaactcggcgccgccaaacagcccagctcgcgcttcagcgtcccggcgccgtcgcgccactcctccgatggccacagatgtctttaattccaaaaacctggccgttcaggcacaaaagaagatcttgggtaaaatggtgtccaaatccatcgccaccaccttaatagacgacacaagtagtgaggtgctggatgagctctacagagtgaccagggagtacacccaaaacaagaaggaggcagagaagatcatcaagaacctcatcaagacagtcatcaagctggccattctttataggaataatcagtttaatcaagatgagctagcattgatggagaaatttaagaagaaagttcatcagcttgctatgaccgtggtcagtttccatcaggtggattatacctttgaccggaatgtgttatccaggctgttaaatgaatgcagagagatgctgcaccaaatcattcagcgccacctcactgccaagtcacatggacgggttaataatgtgtttgatcatttttcagattgtgaatttttggctgccttgtataatccttttgggaattttaaaccccacttacaaaaactatgtgatggtatcaacaaaatgttggatgaagagaacatatgagcacatgagttaagattgtgactgatcatgatttatttgaagatggagcactgctgatttatgaaggaaaaaagaagaattttctaaagattacacatatttcagaaagactttacccaattcagttgtcagacataatgatttatttgaaggcttgttttatttgaagaaaagcatattgccaaaaattctggttaaaagcttcctaacgggtaacagaccatgggagagatatgtggttgggtaatgcaaatgtagttatacaaagaaaaatacagatgtctccagacctgaggactttttaatagggcagttgttgtgttggtggcacattggatatttctaacatgtacaaagctatgtattttgatttactttcatttcttgctatgtatatgtacttttcttaaaatgccaagaactttctcttgctatcattgctccttttgaaacaattcaattttcatgtctacagctgactgttttgttaagattgagtcatcgacattcaggatttaagtctgaggtagtcaaccctcaggaaaaaaaaaatggcttatctgaaatcagtactgtggaaatgaactatattagctattatgaataatgtccagtataagaatatgcttctggaattgagttctccttttaagtaccaatgatacttaaatttctcagaaatgtaatggtgtgtcattgccttgaaatgcttgcttagggcttcttttatgttatcttaaaaagtgctggtgaattttccattttttacatccatttcacatgtaagagacaaaaaagtctagattggtcttgatattgagataataaaaagtaagtagcattaagaaaggtaacaatcttcattctacagatgaactcattgaaacaatttaggggaatgaggggcaaaaggggagaaatactgctaaagaacatgagcataaaaatgcgtgcgtttcagtgtttaagaaggcttgataaagaatgtcacttttttatttaactgataagatttttgttattttttactttgataagtaaaccaaagaatatttgtatttcaagcagtttgtgtggtgtttctatataattttctgtgtataaataataaagtaggcatttgtttattttgtaaaaaagaaatgaaaatctgctggccagctatgtcctctaggaaatgacagacccaaccaccagcaataaacatttccattgtcaaaaaaaaaaa

SEQ ID NO: 1225 - DNA, 3831 bp, Homo Sapiens
  NM_001077664
gtcgccgcgtgccgagcgtcctggcgcggccgaggggaagcagcggggctgcccgggttacgctggccacccgcacctggtcctgtggcttcgaccactagtcagcaaggccccggagaggccagcgaagaggaggggctcgttggctttacggagacgcgcggagcaccctcaaggtgccacacgctcgcctgctccctgttcctacatcctgggcgtcttcccaggctgtcatataactcctgagaatagtggttcttaactctgatagaagtggaattactgggcaaagggcattcagatttgggagaagtagccccagaaataaaagcatcagagagacgaacagctgtggccattgcagatttggaatggagagaaatggaaggagatgattgcgagttccgttatggagatggtacaaatgaggctcaggacaatgattttccaacagtggagagaagcaggcttcaagaaatgctgtcacttttgggcctagagacgtaccaggtccagaaactcagcctccaggactctctgcagatcagttttgacagtatgaagaactgggcccctcaggttcccaaagacttgccctggaatttcctcaggaagttgcaggccctcaatgctgatgccaggaataccactatggtgctggacgtgctcccagacgccaggcctgtggagaaggagagccagatggaagaggagatcatctactgggacccagctgatgaccttgctgccgacatttattccttttctgagctgcccacccctgatacgccagtgaaccccttagaccttctctgtgccctgctgctctcctcagacagtttcctgcaacaagaaatagcgttgaaaatggccctctgccagtttgcactcccactcgtgttgcctgactcggagaaccactaccatacatttctgctgtgggccatgcggggcattgtgaggacatggtggtcccagcccccaaggggcatggggagcttccgggaagacagcgtggtcttgtccagggcgcccgccttcgccttcgtgcgcatggacgtcagtagcaactccaagtcccagcttctcaacgccgtcctcagcccgggccacaggcagtgggactgcttctggcatcgggacctcaacttgggcaccaatgcccgggagatttcggatgggttggtagaaatttcctggttttttcccagcggaagggaggacttggacattttcccagaacctgtggcctttctgaacctgagaggtgacatcgggtctcactggctgcagtttaagctcttgacagaaatctcctccgctgtgtttatattgactgacaatatcagtaagaaggaatacaaattgctgtactccatgaaggagtcaaccacaaaatactacttcatcctgagtccctaccgtgggaagcgcaacacaaacctgagatttctgaataagttaattcctgtgctgaaaatagaccactcacatgtcctggtaaaggtcagcagcactgacagcgacagcttcgtgaagaggatccgggccatcgttgggaatgtgctgcgggcaccctgcaggcgggtatctgtggaggacatggcgcacgcagcccgcaaactgggcctaaaggtcgacgaggactgtgaggagtgtcagaaagcgaaagaccggatggagaggattaccaggaaaatcaaagactcggatgcctacagaagggacgagctgaggctgcagggggacccctggagaaaggcagcccaagtggagaaggagttctgccagctccagtgggccgtggacccccctgagaagcacagggctgagctgaggcggcggctgctagaacttcgaatgcagcagaacggccatgatccctcctcgggggtgcaggagttcatctcggggatcagcagcccctccttgagtgagaagcagtacttcctgaggtggatggagtggggcctggcacgggtggcccagccgcgactgagacagcctccggagacgcttctcaccctgagaccaaagcatgggggcaccacagacgtgggggagccgctctggcctgagcccctaggggtggaacacttcttgcgggagatgggacagttttatgaggctgagagctgtcttgtggaggcagggaggctgccggcaggccagaggcgttttgcccacttcccaggcttggcctcggagctgctgctgacagggctgcctctggagctaatcgatgggagcacgctgagcatgcccgtccgctgggtcacagggctcctgaaggagctgcacgtccgactggagagacggtcaaggctggtggttctgtcaaccgtcggggtgccaggcacgggcaagtccacactcctcaacaccatgtttgggctgcggtttgccacagggaagagctgcggtcctcgaggggccttcatgcagctcatcacagtggctgagggcttcagccaggacctgggctgtgaccacatcctggtgatagactccgggggcttgataggtggggccttgacgtcagctggggacagatttgagctggaggcttccttggccactctgctcatgggactgagcaatgtcaccgtgatcagtctagctgaaaccaaggacattccagcagctattctgcatgcatttctgaggttagaaaaaacggggcacatgcccaactaccagtttgtataccagaaccttcatgatgtatctgttcccggccctaggcccagagacaagagacagctcctggatccacctggtgacctgagcagggctgcagcccagatggagaaacagggcgacggcttccgggcactggcaggcctggccttctgcgaccctgagaagcagcacatctggcacatcccaggcctgtggcacggagcacctcccatggccgcagtgagcttggcctacagtgaagccatatttgaattgaagagatgcctactcgaaaacatcaggaacggcttgtcgaaccaaaacaaaaacatccagcagctcattgagctggtgagacggctgtgagtgtgcagagaaacccagttcaggtgtaggaggctgctgtgggcagccctgtctgatggggcacccgtgtggggctgtgctctggtgcctgagaatggctggtgcccaatcgacatgagaagacgaggaaaagacagggtttggagtctcctcaacagtgttaaaagaggaagtgacctcacagaccagctcagagatgttaccaagaatatcacagcccccagggtagggagacaagcagcagtttgttctgtctcagctcctgtcaaggatcctgcggggtgggccctctgtatagctgctctctgtcactggcccctggagtgggagcagcgtccttagtcactgcaggcccaggcgggcaggtggtcccaggacagaggtggggaagttgtcctgaggaagcagaagtaggccttgctcccgcccaacccaagggcctccagtggaccagcattcaagatgtgagtgcccgtggtgtgcaaggcactcccatggcaccgtatttattgactgatctgtgaaggcttccctgacccctgcccaggaagagttcactggtcgctctgttgtgccccacagcactttgttatacctctgccacacacttcacgcagcgcgttgtaactcatgtgtttacatgtctgtccccccagactgtgagctccttgagggcagggactgtacattctccagctctgtgtccccagggcctggcacattgtagacgcttaataaatgtctgttaaatgaatgagtgcacaaaaaaaaaaaaaaaaaaaa

SEQ ID NO: 1226 - DNA, 2772 bp, Homo Sapiens
  NM_001077665
gggcattgtgtgccacatgcctgggctcccacctggggccagtgggcttcagtctgtaggtgactacagaaggaggaggaactccgtctgttctctcttcaggcagttgttgtgtctctcagcgcttgttggtttcacaacctattaaataagccggctggtcttcaccctcccagacaagtcaactcaggggaggcagcagggtgcgggccttggcccgcagccctagccggggccggggccagggctggtgcccggggcctcgctgtgaggtgggcaggcgaggagcgggaagaccatctctgcaagtgcagcatagcctcggcctaggacagcgggagtgcgtggccaaagctgtgagcagaggcacaggtggtggcagacagtagaggcgccccatggggaacatactgacctgtcgtgtgcaccctagcgtcagcctcgagtttgaccagcagcaggggtcggtgtgtccctctgaatctgagacctatgaggcaggagctagggacaggatggcaggagcgcccatggctgctgctgtacagcctgctgaggtgactgttgaagttggtgaggacctccacatgcaccacgttcgtgaccgggagatgcctgaagctttggagtttaacctttctgccaatccagagtcaagcacaatattccagaggaactctcaaacagaagctttggagtttaacccttctgccaatccagaggcaagcacaatattccagaggaactctcaaacagatgttgtagaaataagaagaagcaactgtacaaaccatgtatctgctgtgcgtttcagtcaacaatacagcttgtgttcgacaatattccttgatgacagcacagccatccagcattatcttacaatgacaataatatctgtgaccttggagatacctcatcatatcacacaaagagatgcagatagaactttgagcatacctgatgaacagttacactcatttgcggtttccaccgtgcacattatgaagaaaagaaatggaggtgggagtttaaataactattcctcctccattccatcgactcccagcaccagccaggaggaccctcagttcagtgttcctcccactgccaacacacccacgcccgtttgcaagcggtccatgcgctggtccaacctgtttacatctgagaaagggagtgacccagacaaagagaggaaagccccggagaatcatgctgacaccatcgggagcggtagagccatccccattaaacagggcatgctcttaaagcgaagtgggaaatggctgaagacatggaaaaagaaatacgtcaccctgtgttccaatggcatgctcacctattattcaagcttaggtgattatatgaagaatattcataaaaaagagattgaccttcagacatctaccatcaaagtcccaggaaagtggccatccctagccacatcggcctgcacacccatctccagctctaaaagcaatggcctatccaaggacatggacaccgggctgggtgactccatatgcttcagccccagtatctccagcaccaccagccccaagctcaacccgcccccctctcctcatgctaataaaaagaaacacctaaagaagaaaagcaccaacaactttatgattgtgtctgccactggccaaacgtggcactttgaagccacgacgtatgaggagcgggatgcctgggtccaagccatccagagccagatcctggccagcctgcagtcatgcgagagcagtaaaagcaagtcccagctgaccagccagagcgaggccatggccctgcagtcgatccaaaacatgcgtgggaacgcccactgtgtggactgtgagacccagaatcctaagtgggccagtttgaacttgggagtcctcatgtgtattgaatgctcaggtatccaccgcagtcttggcccccacctttcccgtgtgcgatctctggagctggatgactggccagttgagctcaggaaggttatgtcatctattgtcaatgacctagccaacagcatctgggaagggagcagccaggggcagacaaaaccctcagaaaagtccacgagggaagagaaggaacggtggatccgttccaaatatgaggagaagctctttctggccccactaccctgcactgagctgtccctgggccagcagctgctgcgggccaccgctgatgaggacctgcagacagccatcctgctgctggcacatggctcctgtgaggaggtgaacgagacctgtggggagggagacggctgcacggcgctccatctggcctgccgcaaggggaatgtggtcctggcgcagctcctgatctggtacggggtggacgtcatggcccgagatgcccacgggaacacagcgctgacctacgcccggcaggcctccagccaggagtgcatcaacgtgcttctgcagtacggctgccccgacgagtgtgtgtagtatctgttttatttgactgcagtctccttggtgcaaaaacaaaatgggaaaaataaggataactcagaatttcaaaaggaaatcacaaattcagctaatattagcattttcagtacttttcgtaaactaagtaaatacacaaaatgttgatttttctgaccataagacgtattttatgtccttctgccaaggtggatttgttagtctcaggccctcctggccacattgcccaagtcacacaggcttctgtattatgtatttagataaaatgtgtgaaaacatatttgaaataaagttcataaatatgcattga

SEQ ID NO: 1227 - DNA, 6414 bp, Homo Sapiens
  NM_001077692
agctgtggcgcgcggggctcagtccggcctggcctcaccgcgggaggcccgagctccctcttcagctaggtcctattggtcttcctgggcgggtcagcattcagtcttcgcccaccttagatccctccactgcgctgtaaaactgccttggagtgcggatctgtgatgctcctgggccaggcctagagtgggcacagcctctgtgggagatgtagacaggatcaaagagtataccttttacggctgttcctcacagctccttttattctccctcaagtcccgaccctttactgggcccatccaacccgccatcacctcttcccaaaccctggaggctgcaggttagaactgcattaagggagctgtcaacatatggaattggagtaggctatgtaccttgcacctaggcttctatctgaacataagggggaatgaataaagccatcaaaagcaatgaccttgttaagaaaagaaagaaaaggagaatgacagctttgtggccttcaagttatctgggaacaaagcaggacaagtctgggcacctgaaggatctactgctttcaagtgtctgctttcagcaaggttatgtgctgctctcctgagcaacatctctgactgtgatgaaacattcaactactgggagccaacacactacctcatctatggggaagggtttcagacttgggaatattccccagcatatgccattcgctcctatgcttacctgttgcttcatgcctggccagctgcatttcatgcaagaattctacaaactaataagattcttgtgttttactttttgcgatgtcttctggcttttgtgagctgtatttgtgaactttacttttacaaggctgtgtgcaagaagtttgggttgcacgtgagtcgaatgatgctagccttcttggttctcagcactggcatgttttgctcatcatcagcattccttcctagtagcttctgtatgtacactacgttgatagccatgactggatggtatatggacaagacttccattgctgtgctgggagtagcagctggggctatcttaggctggccattcagtgcagctcttggtttacccattgcctttgatttgctggtcatgaaacacaggtggaagagtttctttcattggtcgctgatggccctcatactatttctggtgcctgtggtggtcattgacagctactattatgggaagttggtgattgcaccactcaacattgttttgtataatgtctttactcctcatggacctgatctttatggtacagaaccctggtatttctatttaattaatggatttctgaatttcaatgtagcctttgctttggctctcctagtcctaccactgacttctcttatggaatacctgctgcagagatttcatgttcagaatttaggccacccgtattggcttaccttggctccaatgtatatttggtttataattttcttcatccagcctcacaaagaggagagatttcttttccctgtgtatccacttatatgtctctgtggcgctgtggctctctctgcacttcagaaatgttaccactttgtgtttcaacgatatcgcctggagcactatactgtgacatcgaattggctggcattaggaactgtcttcctgtttgggctcttgtcattttctcgctctgtggcactgttcagaggatatcacgggccccttgatttgtatccagaattttaccgaattgctacagacccaaccatccacactgtcccagaaggcagacctgtgaatgtctgtgtgggaaaagagtggtatcgatttcccagcagcttccttcttcctgacaattggcagcttcagttcattccatcagagttcagaggtcagttaccaaaaccttttgcagaaggacctctggccacccggattgttcctactgacatgaatgaccagaatctagaagagccatccagatatattgatatcagtaaatgccattatttagtggatttggacaccatgagagaaacaccccgggagccaaaatattcatccaataaagaagaatggatcagcttggcctatagaccattccttgatgcttctagatcttcaaagctgctgcgggcattctatgtccccttcctgtcagatcagtatacagtgtacgtaaactacaccatcctcaaaccccggaaagcaaagcaaatcaggaagaaaagtggaggttagcaacacacctgtggccccaaaggacaaccatcttgttaactattgattccagtgacctgactccctgcaagtcatcgcctgtaacatttgtaataaaggtcttctgacatgaatactggaatctgggtgctctgggctagtcaaagtctatttcaaagtctaatcaaagtcacatttgctccctgtgtgtgtctctgttctgcatgtaaactttttgcagctaggcagagaaaggccctaaagcacagatagatatattgctccacatctcattgtttttcctctgttcaattatttactagaccggagaagagcagaaccaacttacaggaagaattgaaaatcctggtactggatggctgtgataagctgttctccacactctggcctggcatctgagaactagcaagcctctcttaggccatatgggcttctccaccaaagctgtttggcagctcctagcagaccttcttattgaaatcctcatgctgaaaatgaacacagcctagttgccaacccacatgtccttttcacctccagcaagactaagcttctttaaagcacttcacaggactaggaccctgtcctggagctatctcaggaaaaaggtgaccatttgaggaactgtgacctaattttattataatgatgcctctaattttcatttcctttacaaccaactgtaactataaggttgtattgcttttttgttcagttttagcatgctattttttgaattctagactcctccatgtgaagatatcaacagacaaaactacaactgtataggacatatttggagaaaattctatcaattgatacatttggatgacatcacatttttaagtaatgtaatctgaggccattgctgaggaaattaagaattttcctttttttttaaccacccccagtgaaaaggatcagtgtatatttatagcacctattttttagttctgtctgttgtgaggcacatcctgcatggggcacttctagtcaaataggcaatgataaggacctaattaaaatgtgataagtgtatactattactttaaaagcctttacagtcagtacttcagtttacaaggcactttcacagcatctcgtttgatcctcacagtcacaacatgtggtagacaaggcaggtgatttttatccccattttacagataaggaaacaggctgcgggtggggagtgaggggaggtaaagatagttagttgcctaaggtcacacagccagtaagtaatagagctgggactggaacccaggtttccttactctcatctattgctcctccatattcctcactcaaccatgaaaacattacttgaaaggactgatgaggttaaccagagacctaactgatattgtaactttctattttaaggaagaattgtgtctgtatttgagttctttggagcctccagtctgcctgtgtgttagaccagcacagcagtgctgtgtgatgcagcctgacctgtggcaggaaagtagtgcttctgtttggaagtcatgttcttttgcagccacacaggatccaaatatcagtactattcctgtagtcaatctggggtcacattataggtgccttatttccctaagggtaactgatctgaatatctgcaaataggatgaatctatttttcagaagttccatctttcatttttctttttttttttgagacagagtctcattctgtcgcccatgctggagtgcagtggcgcgatctcggctcgctgcaacctctgcctcccaggttgaagcaattctcatgcctcagccacccgagtagctgggattacaggcatgcgccatcatgcccagctaatttatgtatttttagtagagttggagtttcaccatgttggccaggctggtcttggactcctgacctcaggtcatccacccgcctcagcctcccaaagtgctggtattacaggcgtgagccaccgcacccagccccatctttcattttcaaagagaagggcattctaataggaactggtgccaagagagaagaaaagaagtgataacagaagaaatggctagttacaatattaaaaagctcctctttgagatctcctctgcaggaatatcagagacggagttgaagcgctggagaggtaataggtctagacagtacagaacaataactggggagtgtgtgaggatagactgggctcccccttgcttgaaagatctctggcatttaattctcaattcttgattactattttccagtgtaaaactagcacatatgatctgactacaggacagagaattttaagtgaaacatttgccttacttgcagtaataatgtgctgttcttcacagtagctaaggccctctatgtttcccagaggtaaataagaatccaggaatggaggtccatctgtgatgaatggcttttttctaatcaaagtagtataatgctgttttatctgttttgtcatcttgtttttttttttttttaaaaaaacaaaaccttaattataatatagcgcaaagaaaggccaggactgatgcagggattccttggaaatatcagttcctatcacttttaaaacctgattttggatctctctgttctatgtatgtctttagtgagagcacaatacatggcagaacgctgtgccaaatgttataggtaaggaatatagaaatgaatgttttttgttgtgaaggtgttttcatgtgatattttataaacacattttaaaaaatctccatcactttttagtataggaaggatagctttgcctgggaaaaacagtttcaacacacctgctcagagtagcagttctccctcaaaaaagcagtgttcagcctgcactgactgttctgcttgccaaaaggaggaagcatgcaagatacttatttctccatagattgtggagtatagagggatgtgggactacagattattattttttttccccgagacagagtcttgctctgtcgcccaggttggaacacaatggcacgacctcagctcactgcaacctctgtctcccgggttcaagcaattctcctgcttcagcctcctgagtagctgggattacaggcacacaccaccaccgcactcagctaatttttgtatttttagtagaggtggggttttaccatgttggccaggctggtcttaaactcctgaccttgtaatcatcccgcctcggcctcctaaagtgctaggattacaggcatgagccaccgcacccggcccagataatttttaatagcctttgatcatggggtgagtgagggagtaggtatacttggcaaatgcatggttctctgatttctagctctaaagcagccttatctgaatccccaaatcttgtgatgctgagtaccattactgaaccagtctgcacggtaggcatctgctaccaaaatttacctcctacctggtaggtgtcatctgataagaaagaagacaggttattttaattttttgagataatcacagaaaattgcagcccatactctttattaccgaattcaagtttggaaatagaccctttgttttaaatcatgatgggtctttatcccaatcatttatctgggtcatttttccaactttggagttctaggaaagaaccttgaaaacctgatatgattctgcagcatgaggtctacggtgaccatttgggcaaagctccagtggcaatcatttattgtgttttgcatttcctgggatttattgaaataagaattcactgtgattatgtagtcttctggctagtatcaggcagctctgcttttaatttggttaattttattttctctgaagagggagaagaggtacaatttaatcttggcctccacaagcatattaaagctcacgtgttaatcagtgcattcttatgctcctacattaaatgccttgggtaaatggataaatggacatgtgcccagctttaattttttttgcaacagaaagatcagacttccgtatggcatcgttggatttcagaggctttctggtgtatctgtaaatctgaatgttgccttctgccagtctgtataaccaggtgattcatgctgcaaatgaaatcaggaagcagtaaagtgttaaagcaagagtattgtccaattcacttgtcttcctgatccttgtactttatttcacgtgtcggtgtttacattacatacttatatttcctgtgaaagaaagagttaaataaattgtagcagtttga

SEQ ID NO: 1228 - DNA, 1275 bp, Homo Sapiens
  NM_001078172
caccctcgacatgcgcttccggcgacgccttagcgctgacccccacgcaacccagcgaaactccgcggagcgcgcgcggcacgatggacggtcgggtgcagctgatgaaggccctcctggccgggcccctccggcccgcggcgcgtcgctggaggaacccgattccctttcccgagacgtttgacggagataccgaccgactcccggagttcatcgtgcagacgagctcctacatgttcgtggacgagaacacgttctccaacgacgccctgaaggtgacgttcctcatcacccgcctcacggggccagccctgcagtgggtgatcccctacatcaggaaggagagccccctgctcaatgattaccggggcttcctggccgagatgaagcgggtctttggatgggaggaggacgaggacttctaggccgggagacccttgggcctgggggcgggtgctctgggaagagttcgctgtgccagtggccaccgctagggtctccacaggcgccctccctccgcgcctccctccccctcgagccgccgcgatgtcccctgcgctcctgtcccctcccgcgtagtgcttgcctttgttccaggaatagcgctccaggctcctgctgcagctcctgggccgcactctagagcgcgctgcctccgccctcttttgccagcccagcccctccatgcacatttggacgctgtcctgcacttcaggtgcaagctgggctcctgttacatactggacagaccacccacagccgctgctgccaacccacctccactcctccagactgccagccaactacatcattctgcccacagacctacgctaccactgccatcgccatccaccgcatctcaccaacagactgtggctcctagtgatgtggactcacctcggaggtatccgagctggacacagcccctggacagtgatccagacagctggccgtcccccaaggagcctgtcaccttcagcgagacccatttcctccccatccccagagacctcttgtgttcctgccacatagctgccagggcttaagtgtgcctggcaaccaaatcgaatctctcattttctcctgtggaccagttagttttgcctagaatcctgttttcttctgaatttgcagctgtctctctgatgggtgccttttgttcaacacagtaagccctgctcccttccctgctctaatacactacctgtacaaaggttttttccttatttttaataaatgtcagacactattaaatagaaaaaaaaaaaaaaaaaa

SEQ ID NO: 1229 - DNA, 2344 bp, Homo Sapiens
  NM_001078174
gaagggcccctcccactgagtcggctctggtctccccgcccctgagccgcgaggactggacgcagctggctgcggagctctgggcgggcgctggggtcgcctgttgcagcctctcttccgcccggcggcccacaccggtcaggcccggcgcgggctgcgctctccagctgtggctatggccccagccccgagatgaggagggagagaactaggggcccgcaggcctgggaatttccgtcccccaccaagtccggatgctcactccaaagtctcagcagcaggcccctgagggagggagctgtcagccagggaaaaccgagaacaccatcaccatgacaaccagtcaccagcctcaggacagatacaaagctgtctggcttatcttcttcatgctgggtctgggaacgctgctcccgtggaattttttcatgacggccactcagtatttcacaaaccgcctggacatgtcccagaatgtgtccttggtcactgctgaactgagcaaggacgcccaggcgtcagccgcccctgcagcacccttgcctgagcggaactctctcagtgccatcttcaacaatgtcatgaccctatgtgccatgctgcccctgctgttattcacctacctcaactccttcctgcatcagaggatcccccagtccgtacggatcctgggcagcctggtggccatcctgctggtgtttctgatcactgccatcctggtgaaggtgcagctggatgctctgcccttctttgtcatcaccatgatcaagatcgtgctcattaattcatttggtgccatcctgcagggcagcctgtttggtctggctggccttctgcctgccagctacacggcccccatcatgagtggccagggcctagcaggcttctttgcctccgtggccatgatctgcgctattgccagtggctcggagctatcagaaagtgccttcggctactttatcacagcctgtgctgttatcattttgaccatcatctgttacctgggcctgccccgcctggaattctaccgctactaccagcagctcaagcttgaaggacccggggagcaggagaccaagttggacctcattagcaaaggagaggagccaagagcaggcaaagaggaatctggagtttcagtctccaactctcagcccaccaatgaaagccactctatcaaagccatcctgaaaaatatctcagtcctggctttctctgtctgcttcatcttcactatcaccattgggatgtttccagccgtgactgttgaggtcaagtccagcatcgcaggcagcagcacctgggaacgttacttcattcctgtgtcctgtttcttgactttcaatatctttgactggttgggccggagcctcacagctgtattcatgtggcctgggaaggacagccgctggctgccaagcctggtgctggcccggctggtgtttgtgccactgctgctgctgtgcaacattaagccccgccgctacctgactgtggtcttcgagcacgatgcctggttcatcttcttcatggctgcctttgccttctccaacggctacctcgccagcctctgcatgtgcttcgggcccaagaaagtgaagccagctgaggcagagaccgcaggagccatcatggccttcttcctgtgtctgggtctggcactgggggctgttttctccttcctgttccgggcaattgtgtgacaaaggatggacagaaggactgcctgcctccctccctgtctgcctcctgccccttccttctgccaggggtgatcctgagtggtctggcggttttttcttctaactgacttctgctttccacggcgtgtgctgggcccggatctccaggccctggggagggagcctctggacggacagtggggacattgtgggtttggggctcagagtcgagggacggggtgtagcctcggcatttgcttgagtttctccactcttggctctgactgatccctgcttgtgcaggccagtggaggctcttgggcttggagaacacgtgtgtctctgtgtatgtgtctgtgtgtctgcgtccgtgtctgtcagactgtctgcctgtcctggggtggctaggagctgggtctgaccgttgtatggtttgacctgatatactccattctcccctgcgcctcctcctctgtgttctctccatgtccccctcccaactccccatgcccagttcttacccatcatgcaccctgtacagttgccacgttactgccttttttaaaaatatatttgacagaaaccaggtgccttcagaggctctctgatttaaataaacctttcttgtttttttctccatggctaaaaaaaaaaaaaaaaaa

SEQ ID NO: 1230 - DNA, 2317 bp, Homo Sapiens
  NM_001078645
gagcctgggcagtgcacggggcctgggtggggggtgcgggtgtgggtggggacctgcggccttcgagtccgcggccttcgagtcctggggcggcggcggcggctgcaggcacgggcacgggcacggggcggggtgcttagggtgcaggaggcgcgcgcctagcggcggagtgtggcgtgaggccgggcccgcgccgccatgaacctagagcggctgcggaagcgcgtccggcagtacctcgaccagcaacagtatcaaagtgctctattttgggcagataaagtagcttcactctctcgtgaagaaccccaggacatctattggttggctcagtgtctttacctgacagcacaatatcacagagccgcccatgcacttcggtcacgaaaactggacaaattgtatgaagcatgtcgttaccttgcagctaggtgccattatgctgcaaaagagcaccagcaggcccttgatgttcttgacatggaagagcccatcaataaaagattatttgaaaaatacttgaaggacgaaagtggcttcaaagatccttccagcgactgggaaatgtcacagtcttcaataaagagttctatctgtcttctacgcgggaaaatctatgatgctctagataaccgaaccctggctacctacagctacaaagaagctttgaagcttgatgtctactgttttgaagcgttcgatcttttaacatcacatcacatgctgacagcacaagaagaaaaagaacttcttgaatcactaccccttagcaagctgtgtaatgaagaacaggaattgctgcgttttctatttgagaacaaattgaaaaaatataataagcctagtgaaacggtcatccctgaatctgtagatggcttgcaagagaatctggatgtggtagtgtctttagctgagagacattattataactgtgattttaaaatgtgctacaagcttacttctgtagtaatggagaaagatcctttccatgcaagttgtttacctgtacatatagggacgcttgtagagctgaataaagccaatgaacttttctatctttctcataaactggtggatttatatcctagtaatcctgtgtcttggtttgcagtgggatgttactatctcatggtcggtcataaaaatgaacatgccagaagatatctcagcaaagccacaacacttgagaaaacctatggacctgcatggatagcctatggacattcatttgcggtggagagtgagcacgaccaagcgatggctgcttacttcacagcagcacagctgatgaaagggtgtcatttgcctatgctgtatattggattagaatatggtttgaccaataactcaaaactagctgaaaggttcttcagccaagctctgagcattgcaccggaagacccttttgttatgcatgaggtcggcgtggttgcatttcagaatggagaatggaaaacagccgaaaaatggtttcttgatgctttggaaaaaattaaagcaattgggaacgaggtaacagttgacaaatgggaacctttgttgaacaacttggggcatgtctgcagaaaacttaaaaagtatgctgaggccttggattaccaccgtcaggcactggtgttgattcctcagaacgcatccacctactctgctattggatatatccacagtctgatgggcaactttgaaaatgctgtggactacttccacacagcccttggtcttaggcgagatgatacattttctgttacaatgcttggtcattgcatcgaaatgtacattggtgattctgaagcttatattggagcagacattaaagacaaattaaaatgttatgactttgatgtgcatacaatgaagacactaaaaaacattatttcacctccgtgggatttcagggaatttgaagtagaaaaacagactgcagaagaaacggggcttacgccattggaaacctcaaggaaaactccagattccagaccttccttggaagaaacctttgaaattgaaatgaatgaaagtgacatgatgttagagacatctatgtcagaccacagcacgtgactccagtcagtggtcctggtcccactgtcccagtgtaggttagtattccttcacatcctctccatggcttaagaatgtcccacttcctaacgtgactccaaactgcatctctacatttaggaacagagacccgccttaagagactggatcgcacacctttgcaacagatgtgttctgattctctgaacctacaaaatagttatacatagtggaataaagaaggtaaaccatcaaaaaaaaaaaaaaaaaaaaaaaa

SEQ ID NO: 1231 - DNA, 885 bp, Homo Sapiens
  NM_001078650
ggcagcggcgacgctgggtgtgtgggcgcagatggcggcggcgcacggcgcctgagcgggccggggccatgagcgccgcccggccccagttcagcattgatgatgccttcgagctgtccctggaggacgggggccctgggcccgagtccagcggggtcgcgcgctttgggccgctgcacttcgagcgtcgggcccggttcgaggtggctgacgaggacaagcagtcccggctgcgctaccagaacctggagaacgatgaggatggagcccaggcctctccggagccggatgggggagtcggcaccagggattccagccgaacttccatccgcagctcccagtggtccttcagcaccatcagcagcagcacccagcgctcctacaacacctgctgcagctggacccaacaccctttgatccagaagaaccgccgagtggtgctggcctccttcctgctcctgctgctggggctgggtgtctccagcgccatcttcttcgtgccgggcttcctgttgttggtgcctggagtctatcacgtgatcttcatctactgcgcggtcaagggccaccggggcttccagttcttctacctgccctacttcgagaagtgatcgcggcgcagcgtggaccccttgcgcccatgggggcgcccctcttgccctgttccgttcccctcatctcaagggaagaggccctccaggaccctcgaaaccccagcccctagggagtttgctcaggaagttcggggcatgcaggcctggccctgggaaagccgcccgtcgcctgctctgtgccttaacttattctcgggccgtgcggctgctaggttgctgttattttgtgctaataaaagagtaattaattccaccagaggcaaaaaaaaaa

SEQ ID NO: 1232 - DNA, 903 bp, Homo Sapiens
  NM_001078651
ggcagcggcgacgctgggtgtgtgggcgcagatggcggcggcgcacggcgcctgagcgggccggggccatgagcgccgcccggccccagttcagcattgatgatgccttcgagctgtccctggaggacgggggccctgggcccgagtccagcggggtcgcgcgctttgggccgctgcacttcgagcgtcgggcccggttcgaggtggctgacgaggacaagcagtcccggctgcgctaccagaacctggagaacgatgaggatggagcccaggcctctccggagccggatgggggagtcggcaccagctcccagtggtccttcagcaccatcagcagcagcacccagcgctcctacaacacctgctgcagctggacccaacaccctttgatccagaagaaccgccgagtggtgctggcctccttcctgctcctgctgctggggctggtgctgatcctggtcggcgtgggactggaggcgaccccctctccaggtgtctccagcgccatcttcttcgtgccgggcttcctgttgttggtgcctggagtctatcacgtgatcttcatctactgcgcggtcaagggccaccggggcttccagttcttctacctgccctacttcgagaagtgatcgcggcgcagcgtggaccccttgcgcccatgggggcgcccctcttgccctgttccgttcccctcatctcaagggaagaggccctccaggaccctcgaaaccccagcccctagggagtttgctcaggaagttcggggcatgcaggcctggccctgggaaagccgcccgtcgcctgctctgtgccttaacttattctcgggccgtgcggctgctaggttgctgttattttgtgctaataaaagagtaattaattccaccagaggcaaaaaaaaaa

SEQ ID NO: 1233 - DNA, 2450 bp, Homo Sapiens
  NM_001079
aataggttagtttcagacaagcctgcttgccggagctcagcagacaccaggccttccgggcaggcctggcccaccgtgggcctcagagctgctgctggggcattcagaaccggctctccattggcattgggaccagagaccccgcaagtggcctgtttgcctggacatccacctgtacgtccccaggtttcgggaggcccaggggcgatgccagaccccgcggcgcacctgcccttcttctacggcagcatctcgcgtgccgaggccgaggagcacctgaagctggcgggcatggcggacgggctcttcctgctgcgccagtgcctgcgctcgctgggcggctatgtgctgtcgctcgtgcacgatgtgcgcttccaccactttcccatcgagcgccagctcaacggcacctacgccattgccggcggcaaagcgcactgtggaccggcagagctctgcgagttctactcgcgcgaccccgacgggctgccctgcaacctgcgcaagccgtgcaaccggccgtcgggcctcgagccgcagccgggggtcttcgactgcctgcgagacgccatggtgcgtgactacgtgcgccagacgtggaagctggagggcgaggccctggagcaggccatcatcagccaggccccgcaggtggagaagctcattgctacgacggcccacgagcggatgccctggtaccacagcagcctgacgcgtgaggaggccgagcgcaaactttactctggggcgcagaccgacggcaagttcctgctgaggccgcggaaggagcagggcacatacgccctgtccctcatctatgggaagacggtgtaccactacctcatcagccaagacaaggcgggcaagtactgcattcccgagggcaccaagtttgacacgctctggcagctggtggagtatctgaagctgaaggcggacgggctcatctactgcctgaaggaggcctgccccaacagcagtgccagcaacgcctcaggggctgctgctcccacactcccagcccacccatccacgttgactcatcctcagagacgaatcgacaccctcaactcagatggatacacccctgagccagcacgcataacgtccccagacaaaccgcggccgatgcccatggacacgagcgtgtatgagagcccctacagcgacccagaggagctcaaggacaagaagctcttcctgaagcgcgataacctcctcatagctgacattgaacttggctgcggcaactttggctcagtgcgccagggcgtgtaccgcatgcgcaagaagcagatcgacgtggccatcaaggtgctgaagcagggcacggagaaggcagacacggaagagatgatgcgcgaggcgcagatcatgcaccagctggacaacccctacatcgtgcggctcattggcgtctgccaggccgaggccctcatgctggtcatggagatggctgggggcgggccgctgcacaagttcctggtcggcaagagggaggagatccctgtgagcaatgtggccgagctgctgcaccaggtgtccatggggatgaagtacctggaggagaagaactttgtgcaccgtgacctggcggcccgcaacgtcctgctggttaaccggcactacgccaagatcagcgactttggcctctccaaagcactgggtgccgacgacagctactacactgcccgctcagcagggaagtggccgctcaagtggtacgcacccgaatgcatcaacttccgcaagttctccagccgcagcgatgtctggagctatggggtcaccatgtgggaggccttgtcctacggccagaagccctacaagaagatgaaagggccggaggtcatggccttcatcgagcagggcaagcggatggagtgcccaccagagtgtccacccgaactgtacgcactcatgagtgactgctggatctacaagtgggaggatcgccccgacttcctgaccgtggagcagcgcatgcgagcctgttactacagcctggccagcaaggtggaagggcccccaggcagcacacagaaggctgaggctgcctgtgcctgagctcccgctgcccaggggagccctccacgccggctcttccccaccctcagccccaccccaggtcctgcagtctggctgagccctgcttggttgtctccacacacagctgggctgtggtagggggtgtctcaggccacaccggccttgcattgcctgcctggccccctgtcctctctggctggggagcagggaggtccgggagggtgcggctgtgcagcctgtcctgggctggtggctcccggagggccctgagctgagggcattgcttacacggatgccttcccctgggccctgacattggagcctgggcatcctcaggtggtcaggcgtagatcaccagaataaacccagcttccctcttgaaaaaaaaaaaaaaaaaaaaa

SEQ ID NO: 1234 - DNA, 1973 bp, Homo Sapiens
  NM_001079515
ctacagcacttccggccagagcctcaagcttcgctgctgggcagttggctggaggggctgctgctgggaacacctggagtctccgcgggcaggtgagcttcagaggttcggggagctttcggaacgagcattcctggccgatctcatattttggattctggatatattataatgagtgacactttgacagcggatgtcattggtcgaagagttgaagttaatggagaacatgcaacagtacgttttgctggtgttgtccctcccgtggcaggaccctggttaggagtagaatgggacaatcccgagagaggaaagcatgatgggagccacgaagggactgtgtattttaaatgcaggcacccgacaggaggatcctttattcgtccgaacaaggtaaattttggaacagactttcttactgcaattaagaaccgctatgtgttagaagatggaccagaggaagatagaaaagagcaaattgttacaattggaaataaacctgtggagactatcggttttgactctattatgaaacagcaaagtcagctgagcaagttgcaagaagtttctctgaggaactgtgcagtaagttgtgctggtgaaaaaggaggagttgctgaagcatgtcctaatatcagaaaggtagatttgtcaaaaaacctgttgtcatcatgggatgaagtgatacacattgctgatcagctcagacacctggaagtccttaatgtcagtgaaaataaactaaaatttccctccggttcagtattaactggaacgctttctgtactgaaggttttagtcctcaatcaaacaggaataacgtgggctgaggtgctgcggtgtgtcgcggggtgcccaggcctggaggaactctaccttgagtctaacaacattttcatttccgaaaggccaacagatgttctccagacagtcaagttattagatctttcctctaatcaattaattgatgaaaatcagctgtatctgatagcccacctgcccaggttagaacaattaatcctctctgacactggaatttcttctctacattttccggatgctggaattgggtgcaaaacgtccatgttcccatccttgaagtacctggtagtaaacgacaatcagatatcacaatggtcgtttttcaatgagctagagaagttaccaagtctacgggctttgtcctgcctaagaaaccccctgaccaaagaggacaaagaagcagagacggcgcgactactcattatcgccagcattggccagctgaagacgctgaacaaatgtgagattctccccgaggagaggcggagagctgagcttgactaccgaaaagcttttggaaatgagtggaaacaggctggtggacataaggatccggaaaaaaacagactcagcgaagaattcctcacagcccatcccagataccagttcctctgcctgaaatatggtgcacctgaagattgggaactcaaaacacagcaaccacttatgctgaaaaaccagctactaacactgaagataaaataccctcatcaacttgatcagaaagtcctggagaaacaactgccgggctccatgacaattcaaaaggtgaagggattgctgtcacgtcttctcaaagttcctgtgtcagaccttctgttgtcctatgaaagtcccaaaaagccgggcagagaaatcgagctggaaaatgacctaaagtcattacagttttattctgtggaaaatggagattgtctattagtgcgatggtgacaaccaactaataaaatttaaagaccacactgcttatcgtgtctggggttcaccggaaataaatgattcactggaacaattctactgtcaaaacaaagggggtttacaacttgtcctaagtataacaagggatgtattttttgttgggaagtgaccatttctaggcttatacataatagcaataataaaggctttgaacctacaaaaaaaaaaaaaaa

SEQ ID NO: 1235 - DNA, 632 bp, Homo Sapiens
  NM_001079516
gtggaagcggacctgaggagtcgcaattgtgaacaggttcggtgctgcggctggggctcagcgatatgaggcagcatcgacaatttatggaccgcacgcattatctgcttacattcagctcttcagaaaccttgctaaggctattgctacgtattgtggatagagcaccaaaaggcagaactttcggggatgtcctgcagccagcaaaacctgaatacagagtgggggaagttgctgaagttatatttgtaggtgctaacccgaagaattcagtacaaaaccagacccatcagaccttcctcactgtggagaaatatgaggctacttcaacatcgtggcagatagtgtgtaatgatgcctcctgggagactcgtttttattggcacaagggactcctgggtctgagtaatgcaacagtggaatggcatattccagacactgcccagcctggaatctacagaataagatattttggacacaatcggaagcaggacattctgaagcctgctgtcatactttcatttgaaggcacttccccggcttttgaagttgtaactatttagtgaaaagttgatagatcatttaaagaacagctttactctctacacattatataagtgatttcaaatgaa

SEQ ID NO: 1236 - DNA, 2096 bp, Homo Sapiens
  NM_001079529
attctggcaactgaacgttggcagtaaacgcagcttagttgtctcagaggactcacaatgggatgtgcttatagttgttgcctcgaagtgtgttgtggcgaggatgaaatagtgtatcctaggatgccaggggaatccaccgtctgccaccgcgagcgtgagaagccaatcacctatcactggtatcactggcatcccggccatatataccctagagttgcatcaatggaagattacgatgaggacctggtgcaggaagcttcatctgaagatgtcctgggcgttcatatggtggacaaagacacagagagagacattgagatgaaacggcaactacggcgactacgggagctccacctatacagcacatggaagaagtaccaagaggcgatgaagacatccttgggagttccacaatgtgagcgtgacgaaggctccttgggcaagccattgtgtccacccgagatactctcggagacgttgccaggctctgtgaagaaaagggtatgctttccatcagaagatcatctagaggagtttatagcagaacatctccctgaagcatccaatcagagtctcctcactgttgcccatgcagacacaggcatccaaaccaacggtgacctggaagacctggaggagcatgggccagggcagacagtctctgaggaagccacagaagttcacatgatggagggggacccagacacactggccgaacttctgatcagggatgtacttcaggagctgtccagttacaacggcgaggaggaggacccagaggaggtgaagacatccttgggagttccacaacgtggtgacctggaagacctggaggagcatgtgccagggcagacagtctctgaggaagccacaggggttcacatgatgcaggtggacccagccacgccggcaaagagtgacctggaagacctggaggagcatgtgccagggcagacagtctctgaggaagccacaggggttcacatgatgcaggtggacccagccacactggcaaagcaattggaagactccaccattacaggcagccaccagcagatgtcagcaagtccttcctctgcacctgcagaagaagcaacagaaaagaccaaagtggaagaggaagtgaaaaccagaaagcccaagaagaaaaccaggaagcccagcaagaaaagccggtggaatgtcctgaaatgttgggacatttttaatatattttagagacctctgaagattcctcgaccaccaggaagggccccgacgtggggatgtcaacatggctcagacttgatgtggatcgtgatcatttcgggaaatgtgttactccaaaaacttttataatctttgcttaatttgtttttaaatactttcctggctgggcgtggtggcttatgcctgtaatcccagcactttgggaggccgaggcgggtggatcacctgaggtcaggagttaaagaccagcctggccaacaaggtgaaaccccgtctctactaaaaatacaaaaattagctaggcgtggtggcgcactcttgtagtcccagctatttgggaggctgaggcaggagaatcacttgacctcaggaggcggaggttgcagtgagccgagatcatgccactgcaccccagcacctggctacagagtgagactttgtctcaaaaaaaaaaaaaaaagaacaaaaaaattctgactttaacctctgtttttcagagggcacaaattgttcttgtattgtttccattttacatttttttcttgaagttattttccaattgttttcattctttctgaagttttgtttactcggttttaagtttttgtaattttgatagacttttgtgctttcattttcttaatgacttttacctcatttttaaaacaaatccatagtatggtaagttacatcaatatggagtatttttatgttttgtggtgatttacattctgtatgtattttacatatataaatgttaatggcctggtgcaggggctaccacctgtaatctcagcagtttgggagaccaaagcaggacaattgcttgatcccaggagtttaagaccagccggggcaacatagtgagacctcatccctacaaa

SEQ ID NO: 1237 - DNA, 6303 bp, Homo Sapiens
  NM_001079673
ctcccggctccgtagtaagcatggcggcggcggcgttcgtggtccctcgggtgaaacagaaagcgggagctacgcggagagggagcgaagagcggggctgaggcggcggcgtcactgccaggaaacaaccccaacagtcagcgcgccggcggccgcggcggccctgagagctgactctgcagctgaggtagagagacaacgatcaggaaccctaagaagaggcgccagaggagccgccttctgcctcagaacggcgtgactcggagaattggagcgttattcagtatattaatgtcttattgataatggcagaacatccaccactactggatacaactcagatcttaagtagtgatatttctcttttgtctgcccctattgtaagtgcagatggaacacaacaggttattctggtacaagttaacccaggagaagcatttacaataagaagagaagatggacagtttcagtgcattacaggtcctgctcaggttccaatgatgtccccaaatggttctgtgcctcctatctatgtgcctcctggatatgccccacaggttattgaagacaatggtgttcgaagagttgtcgtggtccctcaggcaccagagtttcaccctggtagtcacacagttctccaccgttctccacatcctcctctacctggtttcattcctgtcccaactatgatgccgcctccaccacgtcatatgtactcacccgtgactggagctggagacatgacaacacagtatatgccacagtatcagtcttcacaagtctatggagatgtagatgctcactctacacatggaaggtccaactttagagatgaacgatctagtaaaacatatgaacgtttgcagaaaaaattgaaggatcgccaaggaacacagaaagataaaatgagcagtccaccatcatcaccccagaaatgcccttctcccattaatgaacataatggacttataaaaggacaaattgctggtggtataaacacaggatcagcaaaaatcaagtctgggaaggggaaaggtggtacacaagttgatacagaaattgaagaaaaagatgaagaaactaaagcatttgaagcacttctttccaacattgtcaaaccagtggcctccgacatccaggcaaggacagtagtacttacctggtcaccaccttccagcctcattaatggtgaaacagatgaaagtagtgtaccagagctctatggttatgaagttctgatctcaagtactggaaaagatgggaaatacaaaagtgtatatgtaggagaagaaacaaatatcactttaaatgatctcaagccagccatggattaccatgcaaaagtccaggcagaatataattctataaagggaactccttcagaggctgaaatctttaccaccttgagctgtgaacctgatatacctaatccaccaaggatagccaatcggaccaaaaattcactcactttgcaatggaaggcacctagtgacaatggttctaaaatccaaaactttgtattagaatgggatgaaggaaaaggaaatggagaattttgtcagtgttacatgggctcacagaaacaatttaaaattactaaactttcaccagcaatgggctgtaaattcagactatcggccagaaatgactatggtacaagtggttttagtgaagaagtcttatattacacctcaggctgtgctccttctatgccagcaagtcctgtattaaccaaggctggaattacttggttatccttacaatggagtaagccctcaggaacaccatcagatgaaggaatttcttacattttagagatggaggaagaaacttcaggatatggttttaagcctaaatatgatggagaagatcttgcttacacagtgaaaaatctcagacgtagtactaagtataaatttaaggttattgcttacaactcagaaggtaaaagtaatccaagtgaagtagtagaatttactacttgccctgataaaccaggcatacctgtaaagccttcagtgaaaggaaagatacattcacacagttttaaaataacctgggatccaccaaaagacaatggcggagcaaccatcaataaatatgtagtggagatggcagaaggttctaacggaaacaaatgggaaatgatatacagtggtgctaccagggaacatctttgtgatcgactgaatccaggctgtttctatcgtttacgagtttactgcatcagtgatggaggacagagtgcggtctctgaatctttacttgtgcagactccagctgtgcctcctggcccatgcctccctcccagattacagggtagacccaaagcaaaagaaatacagttacgatggggaccccctctggttgatggtggatcacccatttcctgttacagtgtggaaatgtctcctatagaaaaagatgaacctagagaagtttaccaaggttctgaagtagaatgtacagtgagcagccttcttcctggaaagacatacagcttcagactacgtgcagctaacaaaatggggtttggaccattttcagaaaaatgtgatattactacagcccctgggccaccagatcagtgcaagccccctcaagtgacatgtagatctgcaacttgtgcacaagtgaattgggaggttcctttgagtaatggaacagatgtcactgaatatcgactggagtggggaggagttgaaggaagtatgcagatatgttactgtgggcctggtctcagttatgaaataaaaggactttcaccagcaactacctattattgcagggtccaggctctgagtgttgtgggtgcaggccctttcagtgaagtagtagcctgtgtgactccaccatcagttcctggcattgtgacctgtcttcaagaaataagcgatgatgagatagaaaatccccattattcaccttctacatgccttgcaataagctgggaaaagccttgtgatcatggttcggaaatccttgcctacagcatagactttggagataaacaatccctaacagtgggaaaggttacaagctatattatcaacaatttgcaaccagatacaacatacagaatacgaattcaagccttgaatagccttggagctggtcctttcagccatatgataaaattaaaaactaagcctctccctcctgatccacctcgtctggaatgtgttgcctttagccaccagaaccttaagctgaaatggggagaaggaactccaaagacattgtcaaccgattctattcagtaccaccttcagatggaggataagaatggacggtttgtatccctatacagaggaccatgtcatacatacaaagtacaaagacttaatgagtcaacatcctataaattctgtattcaagcttgtaatgaagctggggaaggtcccctctcccaagaatatattttcactactccaaaatctgtcccagctgccttgaaagcccccaaaatagagaaagtaaatgatcacatttgtgaaattacatgggagtgtttacagccaatgaaaggtgatccagttatttacagtcttcaagttatgttgggaaaagattcagaattcaaacagatttacaagggtcccgactcttccttccggtattccagccttcagctgaactgtgaatatcgcttccgtgtatgtgccattcgccagtgccaagactctctgggacaccaggacctcgtaggtccctacagcaccacagtgctcttcatctctcagaggactgaaccaccagccagcaccaacagagacactgtggaaagcacaaggacccgacgggcactgagtgacgagcagtgtgctgccgtcatccttgtgctgtttgctttcttttccattttgattgcctttatcattcagtactttgtaatcaagtgaaaatataactttattttttaactctattacattttattttgtcatgtactaaaattatttctgtattgcttttataaaaaacagtggcatttagcactggcattgagactatagcacatcatttttgccattttcagtgcttatattgttaggtagaggctggcactttattagaatgcaagccacaaaaatatcaattttgttttttttgttagggtgggtcttctttttttctttccctctctctttttttaacaaatgccttcttatagaaaaactttctaagaggcaacaatttagaatggatattttgacgaatcggcatgagtgtaacagtgataacctgatctgtttgttttaaagattattaccaagtgaaaaattcagaatgaatagaatttacactaacatgctatataaaatgttaaagtctgatgctgtgaaagcaatctagtgctatatttctacctcctcatttgtcttaattatttggtaagtgggattatgatgagtaactggaggggcttagaaacaaaaactggatgaaagagtatgcatgaagaaaagcttctttgataaatgtggagttcttcattataaatatatattcatgaattcacagataagtacttaaagaacagacagtttacttggcctaaaaatattttgatgtttactcaaaaagtacctcttcaggtcttgagaacatggaaaagaattgagtgcttttaaatactttttagaaagtaatcataaaagtaaattgaatttcaaacctatttggcttctgttttgtgaacctttgaactatatgtatgtgtataagggtatacacatacatatatggcatataacaagtgtacacatatacacataacaagtgtagaagtatatattacatacatacactcactctgtctggtataggctaattttgaagaactcccataagtttctgctgcttctcccataactgctgccaccaccatcagaattcataatcaaacctaacctttttgtttggggcaccaaatctgaagacaaaattaatttgcaccagtaaacttcaagctgctttctttcttgaaaactaaacgtttaacgtataatgtctgtttggatactgttccaaattgttgattgcatgtggttaatgttgcattagagcactttgcaattgcataattcattaatgttttgtgagcttgcatttgtgagttattggatgatcagactgaattttgtcaagtatcacattgtacatcttgcctagatgtcgatgactgcaagtaataatacagtttataatgaaactatctacaattcttgttttagcacatctgttatccgtaaaacacctgtaactagcttttttaatttattatttgaattttaggatagcgaatcactaatttttagttgctgaggttggcattttagtgattattaagcacttctgtcagtctttgaaaaaagaacgtattttttgtgctttgaagatctctgaagaatttcttttataatagaatgggcatgtattgtaacagttttatgtcaaatgatctgtgctgtagaaaaacattaacccttgttcaaaaaagaaatggataaacttggcctttctaagtggtaagaatgacctgtcactataatatactgtatgtttacattttatttaaatttaatctcttatgtatagggtgataaccttccccagaaacaacagtgattgcgattgttttctagaaacttctttaaagtgccacatttggcagtacaaatgagtctgagtgtaatagcccagagatttatatatagttgaatgtctaaaatggtaaaatgtgccactgtgtcaagttacagtggcttatgtttttcatagtaattcaaatgaacttcctatttttgatagtaaatgtcatttaatagtatacttgccatttgagcctcactgcaaaattagtgcagaggagaaaacaatttttaatgtaatcttgattttacctcatatactgtacattccaaaaactctaaactttttaaagattatagatacactaccaaacatatcaccttaaaattgtataaggctgaatgaacttcatacaaatgaaaaaaatctcataaaaatacataaactatgtagcaaaagtatctgtaaaatccatggaaaataaaagttgtatcattctttttgagatacgtttattgtattcatatatattcattatttgctacctgtttaagaaagtgaaatgttatggtctcccctcttccaatgagcttaaaacatttttcccaacagtatataaatcttcaacatgagaggatgtatatttattatataaagcccagtaaagaataaaattagaagttttatcctaaaaaaaaaaaaaaaaaa

SEQ ID NO: 1238 - DNA, 3043 bp, Homo Sapiens
  NM_001079691
atcacatggccggagagtcacaaaaacaacagctttggccaagaccgtgacttcagtaaagggaacccggggctctcgcagccagccctcctgcccatggaggacagtttccttcaatcttttgggaggctgagcctccagccccagcagcagcagcagcggcagcggccgccccggccgcccccgcgggggacacctcctcgccgccacagctttaggaaacacctctacctcctgcgaggcctcccgggctccgggaaaactacactggccagacaattgcagcatgactttcccagggccctgattttcagcacggatgattttttcttcagggaagatggtgcctatgagttcaatcctgacttcctggaggaagctcatgaatggaaccaaaaaagagcaagaaaagcaatgaggaatggcatatcccccattattattgataataccaacctccacgcctgggaaatgaagccctatgcagtcatggtatttcagaccgaacaaaagaatcttttcaggctggaaatggacatggtagttttcaggccagaaatgaagaaacattcatggtgtctcaagagaaaaaatccaccgaatgaaagaacggtatgaacacgatgttacttttcacagtgtgcttcatgcagaaaagccaagcagaatgaacagaaaccaggacaggaataatgcattgccttccaacaatgccagatactggaattcctacacagagtttccaaaccggagggcccacggtggatttacaaatgagagctcctatcacagaaggggcggttgtcaccatggatattagaggcctatcttacagccaggcagaattttcctaagtcagtttctacttcagtttttgttattttttgttgcattttagtcagagctccaattccagtgtaaatagctgaactcaaaagtttctgagcaaagtcattatattcactttcttcaccaaaatttgttaaagtgcttctatatgcatggtctgatgctgggaattctgcagatttgagtaaacagtctctttctctagggtaagaatttgaaaccaaaacttgagaacacacccaagaatatatttacataggttcatagatgaaataaagtgtttatattatatataagcttcagtaccatttgctctgaagtgatctatttattttttcaggaaattcatctccatcggtaaagttgggaaggtggagagaagtggtgggggggcattgctacttatcaaagtgccattgctactttgataatctatgtatctaaaaatgtgagatgtgcgactcttatgatactgattttcctttaatgttaatatgccagaaagcatacatctaagggaacattgtccttcaaagtagacactttgggaagttatttctttattttaatgatgtatcattgttaaaaatgctgtcaaatccttaatagctacaggagctactgagggaaatcagtgtcattatttaaagtcacgccttgtgtttttactactttattcagcaggattaaacctgaataacttttggctgttgtgctaatagtgtaaataaaataagcctgccttcataaaacactaacttttaaaaggaataaacgacttctaaaattatgcctattaacatgtgtaattagtcggcagctcaaatgtttgggagtgcaagaaattaggcaccccaggatataggtcatacagggatatataaaagccatgctcattacaaaatgagcagttgatgttttatgtggcattaagacaatcaagtcctcacaactctggaatgtcttcttatactgatgctgaatttatgaatccaaattaatttccaacaggttggaatcagatttaatgtgagatcatgatagacaagaccacagaggacgtatgctctatttcttgttggccaacagcttctttctaatgttctgtgaaaaattattttaagtgtcttatataatggtgcttttatggttattaaaaattgtaaatggtatcacatttatatggatttgtcattggatctttttttggttcaacaataaaaaaatttaattacctaaatgccaagaaactcaacaatataccagtttttctgtatcacaggcttatttaccagtcttttttttaataaataggaatcgtaaaggtaatgacaaaagcagccttataatttagttgcttatatatttgatctgtgtacatgagactgttttaacgttatctgacactactgaaacctgctcgacatctccatgactaccaacaccatgtgtaatgttttcttcactaacattttaaaaactggtatctcctttgagtaagtttggctgacaatagtaaatcccaatgaatctaaggtgttatcagctttgctaacttctgtatctccaagcacaacataaaataatctcctaatgatctacttaataatgctcccattttccaggcccaggtagtcctgggtatcttggttgatagggtggtggcataaccagctcaatatggatggcttgactcgtctgggctggtagaggggagaaatgtcagagagctcaaagtggaaattaccatcctttgatttcacatgagcggttcaaaggaccagattcaagccctcctgacttggctggctccctgctttagggtttttggctcacttgggttaagtgagtgaccactatggagaagtggctctgggttacataacttttctagagctctaaagaatagtttcctggcctatttaatgtctcttctttccctagctgacccctgaaatatttggtttgtaaaccataaaaattgattaaatgccatcaactttatcccctgtagaagtgatctgtttttcaactcccatggcttctgatttgtgtaactctttgaacacccaatattgacttgtattgtgttcgctgtttgcatcattcatagaactggcaaatgctctttatgggcaatagggtctcattaaatgattgctgaataaataacacaaatttttaccattaaaaa

SEQ ID NO: 1239 - DNA, 3302 bp, Homo Sapiens
  NM_001079692
atcaagtaaaagaaactcctttcaaaggagggcagaagcgtggctgagtttaaaaaacatagattttggagacaggtcaagttgagtttgccccttccctgtcctgtatgtctttgggtgacataaccttgctgttcctcagtttcagtattgtagaactgttaaaagaataaatgttagtgcatgtcaacaccttctacacagttcccagaacataaggaatattccataagttttagttcctttataactcatgaacatatgtgtaaggacttgtttcgtatataccatctattctttgtttaccatatgtttgtaagcaaattgacaagagagtaagtcttctggatacagtacttttcaccaggaagatggggggctgagcatgctctagaattctaaaactctgtgactcaactatgattctgagattctactactgagtagagtcatcactaagggctcatctctaagggctccatgtgactctggtggagaggtagatcatgatttgggcggcaatgtttgctcactctttcccttactagagttctgccatagaatcatggagtcaacatcccaggacagaagggcaactcacgtcatcactataaaaccaaacgaaactgtattgactgcatttccctacagacctcatagctctctgctggattttctgaagggagagccaagagtcttgggggctacccagatcctgcttgctctaatcattgtgggctttggaactatatttgcacttaattacatcggtttctcccaaagacttccccttgttgtcctcacaggatatccattctggggagcacttattggtcaaggtgtcacgggcatgaatgttatcagctccttggttgcgataactgggattactttcaccattctcagctacagacatcaagacaagtactgccagatgccatcctttgaagaaatatgtgttttcagtagaactcttttcattgttctgtttttcttgccttcggatgttactcaaaatagtgaacaacctgccccagaagaaaatgatcaattacaatttgtgcttcaagaagagttttccagtgatgattcaacaacaaatgcacaatctgttatctttggaggctatgctttcttcaagttaacactctctaggagtcctttagtctcccaaccaggtaataaaggtagagaatttgtgccagatgaacaaaagcaaagtatccttccatctcccaaattttcagaggaagaaattgaacctttgcctcccacactagagaaaaagccctcagaaaatatgtccattcagctagactctacatttaaacaaatgaaagatgaagatctacaatctgctattgtacaaccttctcaaatgcaaaccaagcttctgcaggaccaagctgcgtcactccaagtttttccatcccattctgcactaaaactcgaagatatatcacctgaagacttgccatcccaagctctaccagtagaaggcctgtcagaacaaaccatgccatctaagtctacatcatcccatgtcaaacagtcttctaatctgacagctaatgacctgccccctcaaggcatactatcccaagacacatcatctcaagatatgctgtttcatgacatgacatcccaagatatgcaatccctagatatgctatctcaagacacaccatcccacgccatgccacctcaagacataccttcccaagatatgctatcccaagctctatcagcgcatgccatattacctgaagcctcaacatcccatattgtgcagttccctgaaatacaacacctacttcagcagcccccagatcttcaaccagaaaacactgaacctcaaaaccagcaaattttacaaatgtcatatcaagatattagatcagaagttatggaagagaccaaagaatggaaatctgaggaggaactccatagaagaaaatcctcaagacggcattccttaaaccagcaaaccaaagccttgcaatacttaaggagacattctttagacgtgcaagccaaaggccagaaatcctcaaagaggcattccttagatcagcaaagcaaaggctggcaatctccaaagcagaaatccttagaccagcaaatcaaagactggctatccccaaagaggcactccgtagataagcaagctcaacttaatcaaactaaagagcaactcccagatcagcaagctgaagatcagcaagccaaaggggaacaatacccagaaggacaatctaaagatggacaagttaaagaccagcagactgataaggagcaaaactcaaagaagcaaacccaggatcagcaaactgaagaccagccggcccaagagaagaaatccccgaaaggacaattccaaaatgttcaagccgaaggacagcaagctcaggtggagaaagtgccaaaactgttatgccaagattcagaatcccaaatacagcaataccaattctggcaattccacaaaggcaatctccaggctggacaacccaggactgtcaatcttttggccaagaatcccctgactggataactcagggctggagaaacaaagattataaagcacgagaatggcaatttgaaatgaagcactggcaaacacaggatctattagagaaagaagccctaaagcagaaagctctataccaagaagtccaaacccagcacgcaacagcccaacataacctagaatgtcaagacactcaagataaagaccaacaagaccttcaatccagagttacacaaaaaggagatatgtacactagagacatcaaaccaggggacatgaaatgtatagggcaaacctcaggggacctgcaatcagaagacgtgaaggcagattttcattcttcttctggccaaagctcagtacaagacacatgtttagcctatttgtccaatctagattcagaacaagatgtgcaaccagacacttcagcttcctcaaattcatataaagaagatgtgaatttaacttctacttcatgtgatccaaaagatcaacagcaatctgaagactctgactaacatgcagaatctacccaataccacactgcccccattaatggaattaaattgggaaaaacaatattgcctcctccaatctgtgttctcaactgtggttgccacctcattaacttacaaaaaaatgaagggcatgctgagcactcaaacaatttgttcttacttaaaataaaatgacaacaaaccaaatgttaacactgtatcatcactttatgtatgtgaagaaataattcacatgtatattccttgtcatcaaa

SEQ ID NO: 1240 - DNA, 1706 bp, Homo Sapiens
  NM_001079809
ccgcggagccgggcggagctggcttgcggctaccggggccggctctctggccggagacatggcccgggggcccggcccgctaggcaggcctcgccccgatacggtcgccatgcccaagagaggaaagcgactcaagttccgggcccacgacgcctgctccggccgagtgaccgtggcggattacgccgactcggatctggcggtcgtgaggtctggacgagtcaagaaagccgtagccaacgctgttcggcaggaagtaaaatctctttgtggcttggaagcctctcaggttcctgcagaggaagctctttctggggctggtgagccctatgacatcatcgacagcagtgatgagatggatgcccaggaggaaaacatccatgagagaactgtctccagaaaaaagaaaagcaagagacacaaagaagaactggacggggctggaggagaagagtatcccatggatatttggctattgctggcctcctatatccgtcctgaggacattgtgaatttttccctgatttgtaagaatgcctggactgtcacttgcactgctgccttttggaccaggttgtaccgaaggcactacacgctggatgcttccctgcctttgcgtctgcgaccagagtcaatggagaagctgcactgtctccgggcttgtgtgatccgatctctgtaccatatgtatgagccatttgctgctcgaatctccaagaatccagccattccagaaagcacccccagcacattaaagaattccaaatgcttacttttctggtgcagaaagattgttgggaacagacaggaaccaatgtgggaattcaacttcaagttcaaaaaacagtcccctaggttaaagagcaagtgtacaggaggattgcagcctcccgttcagtacgaagatgttcataccaatccagaccaggactgctgcctactgcaggtcaccaccctcaatttcatctttattccgattgtcatgggaatgatatttactctgtttactatcaatgtgagcacggacatgcggcatcatcgagtgagactggtgttccaagattcccctgtccatggtggtcggaaactgcgcagtgaacagggtgtgcaagtcatcctggacccagtgcacagcgttcggctctttgactggtggcatcctcagtacccattctccctgagagcgtagttactgcttcccatcccttgggggcagcctcgagtgtagtccattagtaatcagattccagtttggacagggtggctggattgtatatctcgttagtaatgtacatgctcttcaggttctagggctcctgttaggggagggagaaatgttgaatcaagagggaaaacaactactatgatttataaacatattttaatgtaaaaatttgcattcaaaaggagtggccctgttttctgtgttaaaaccccatttggtgctattgagtttgttctttattcttttatcccagtgaaaattgttgatcttgctgtagggaaaaattaaactctttgaatctccaaacaaggaagtttcagcattcccttatggatcagaggaaccttagaggcctgaaattgttgcttccagtttagctgcccctcaaattcaagtgaatattttcccttctccctttacccttctccagaaataaagcaggtgacagggttttcagaatcttaaaaaaaaaaaaaaaaaa

SEQ ID NO: 1241 - DNA, 2500 bp, Homo Sapiens
  NM_001079811
ggggcgcgcgtccttccaggcagctcggtcgcttgtgcgttccgctccggccgccctttgcgcttggatccacttccccatctgtaacgaggtgttgagacgagaatgccacccagaggatgtttgaaattgactatagccgggactccttcctcaaggatggccagccatttcgctacatctcaggaagcattcactactcccgtgtgccccgcttctactggaaggaccggctgctgaagatgaagatggctgggctgaacgccatccagacgtatgtgccctggaactttcatgagccctggccaggacagtaccagttttctgaggaccatgatgtggaatattttcttcggctggctcatgagctgggactgctggttatcctgaggcccgggccctacatctgtgcagagtgggaaatgggaggattacctgcttggctgctagagaaagagtctattcttctccgctcctccgacccagattacctggcagctgtggacaagtggttgggagtccttctgcccaagatgaagcctctcctctatcagaatggagggccagttataacagtgcaggttgaaaatgaatatggcagctactttgcctgtgattttgactacctgcgcttcctgcagaagcgctttcgccaccatctgggggatgatgtggttctgtttaccactgatggagcacataaaacattcctgaaatgtggggccctgcagggcctctacaccacggtggactttggaacaggcagcaacatcacagatgctttcctaagccagaggaagtgtgagcccaaaggacccttgatcaattctgaattctatactggctggctagatcactggggccaacctcactccacaatcaagaccgaagcagtggcttcctccctctatgatatacttgcccgtggggcgagtgtgaacttgtacatgtttataggtgggaccaattttgcctattggaatggggccaactcaccctatgcagcacagcccaccagctacgactatgatgccccactgagtgaggctggggacctcactgagaagtattttgctctgcgaaacatcatccagaagtttgaaaaagtaccagaaggtcctatccctccatctacaccaaagtttgcatatggaaaggtcactttggaaaagttaaagacagtgggagcagctctggacattctgtgtccctctgggcccatcaaaagcctttatcccttgacatttatccaggtgaaacagcattatgggtttgtgctgtaccggacaacacttcctcaagattgcagcaacccagcacctctctcttcacccctcaatggagtccacgatcgagcatatgttgctgtggatgggatcccccagggagtccttgagcgaaacaatgtgatcactctgaacataacagggaaagctggagccactctggaccttctggtagagaacatgggacgtgtgaactatggtgcatatatcaacgattttaagggtttggtttctaacctgactctcagttccaatatcctcacggactggacgatctttccactggacactgaggatgcagtgcgcagccacctggggggctggggacaccgtgacagtggccaccatgatgaagcctgggcccacaactcatccaactacacgctcccggccttttatatggggaacttctccattcccagtgggatcccagacttgccccaggacacctttatccagtttcctggatggaccaagggccaggtctggattaatggctttaaccttggccgctattggccagcccggggccctcagttgaccttgtttgtgccccagcacatcctgatgacctcggccccaaacaccatcaccgtgctggaactggagtgggcaccctgcagcagtgatgatccagaactatgtgctgtgacgttcgtggacaggccagttattggctcatctgtgacctacgatcatccctccaaacctgttgaaaaaagactcatgcccccacccccgcaaaaaaacaaagattcatggctggaccatgtatgatgatgaaagcctgtgtctttgagggattctaccctgaacatacctcacagatcctccctgtcatgccacatttcactgattggaatgtggaaatggaaaaggaatttaggatgtgcattttcacctgaggtttccctgcatccctgcagtgccaaagccccaccttcagggaccacctggaatgtgtgaggggctgacagcacagtaacgtgcatacatatctgcagggctggaatggaagctttaaaggtggtagtgatttttattttggaagaatcatgttacctttttgttaaataaaatttgtactcaaatgatgatgtcactgtttttaatgtgcaggtattgaattatatggtctgacttaaatcataactagacttgagtgggctgaataaaccacttcactaacttgaagttcaaaaggatggaaaata

SEQ ID NO: 1242 - DNA, 740 bp, Homo Sapiens
  NM_001079863
agggaggggaccaacgggctccggcgctgacaccgcggcactcatgccctgtcccctttcagctgtttccagcatactgtgccccgtctgtcctcaggccagggcttcgctgcagccccggccactccctagtgcctggcccggtggtggccaggcagttggccgcgctgcttctcccgcagaggggacccccactgggggcgaaggcttggcctgccctcttcactgctgtatttccagacctgatgcctgcgtttgctgagtttgagaaagctgcagaggaggttaggcaccttaagaccaagccatcggatgaggagatgctgttcatctatggccactacaaacaagcaactgtgggcgacataaatacagaacggcccgggatgttggacttcacgggcaaggccaagtgggatgcctggaatgagctgaaagggacttccaaggaagatgccatgaaagcttacatcaacaaagtagaagagctaaagaaaaaatacgggatatgagagactggatttggttactgtgccatgtgtttatcctaaactgagacaatgccttgtttttttctaataccgtggatggtgggaattcgggaaaataaccagttaaaccagctactcaaggctgctcaccatacggctctaacagattaggggctaaaacgattactgactttccttgagtagtttttatctgaaatcaattaaaagtgtatttgttactttaaataa

SEQ ID NO: 1243 - DNA, 3340 bp, Homo Sapiens
  NM_001079864
agtgacgcaaggcctactgtcggctgggaggggaggtgtagccggtctttgggggtaggcggtagtggcggaagaggttcggcggctgatggcggatcaggatcggaagcctgcgtaactttctcccttgatccgggagtctttccactggattcacaatgacatcctttcaagaagtcccattgcagacttccaactttgcccatgtcatctttcaaaatgtggccaagagttaccttcctaatgcacacctggaatgtcattacaccttaactccatatattcatccacatccaaaagattgggttggtatattcaaggttggatggagtactgctcgtgattattacacgtttttatggtcccctatgcctgaacattatgtggaaggatcaacagtcaattgtgtactagcattccaaggatattaccttccaaatgatgatggagaattttatcagttctgttacgttacccataagggtgaaattcgtggagcaagtacacctttccagtttcgagcttcttctccagttgaagagctgcttactatggaagatgaaggaaattctgacatgttagtggtgaccacaaaagcaggccttcttgagttgaaaattgagaaaaccatgaaagaaaaagaagaactgttaaagttaattgccgttctggaaaaagaaacagcacaacttcgagaacaagttgggagaatggaaagagaacttaaccatgagaaagaaagatgtgaccaactgcaagcagaacaaaagggtcttactgaagtaacacaaagcttaaaaatggaaaatgaagagtttaagaagaggttcagtgatgctacatccaaagcccatcagcttgaggaagatattgtgtcagtaacacataaagcaattgaaaaagaaaccgaattagacagtttaaaggacaaactcaagaaggcacaacatgaaagagaacaacttgaatgtcagttgaagacagagaaggatgaaaaggaactttataaggtacatttgaagaatacagaaatagaaaataccaagcttatgtcagaggtccagactttaaaaaatttagatgggaacaaagaaagcgtgattactcatttcaaagaagagattggcaggctgcagttatgtttggctgaaaaggaaaatctgcaaagaactttcctgcttacaacctcaagtaaagaagatacttgttttttaaaggagcaacttcgtaaagcagaggaacaggttcaggcaactcggcaagaagttgtctttctggctaaagaactcagtgatgctgtcaacgtacgagacagaacgatggcagacctgcatactgcacgcttggaaaacgagaaagtgaaaaagcagttagctgatgcagtggcagaacttaaactaaatgctatgaaaaaagatcaggacaagactgatacactggaacacgaactaagaagagaagttgaagatctgaaactccgtcttcagatggctgcagaccattataaagaaaaatttaaggaatgccaaaggctccaaaaacaaataaacaaactttcagatcaatcagctaataataataatgtcttcacaaagaaaacggggaatcagcagaaagtgaatgatgcttcagtaaacacagacccagccacttctgcctctactgtagatgtaaagccatcaccttctgcagcagaggcagattttgacatagtaacaaaggggcaagtctgtgaaatgaccaaagaaattgctgacaaaacagaaaagtataataaatgtaaacaactcttgcaggatgagaaagcaaaatgcaataaatatgctgatgaacttgcaaaaatggagctgaaatggaaagaacaagtgaaaattgctgaaaatgtaaaacttgaactagctgaagtacaggacaattataaagaacttaaaaggagtctagaaaatccagcagaaaggaaaatggaagatggagcagatggtgctttttacccagatgaaatacaaaggccacctgtcagagtcccctcttggggactggaagacaatgttgtctgcagccagcctgctcgaaactttagtcggcctgatggcttagaggactctgaggatagcaaagaagatgagaatgtgcctactgctcctgatcctccaagtcaacatttacgtgggcatgggacaggcttttgctttgattccagctttgatgttcacaagaagtgtcccctctgtgagttaatgtttcctcctaactatgatcagagcaaatttgaagaacatgttgaaagtcactggaaggtgtgcccgatgtgcagcgagcagttccctcctgactatgaccagcaggtgtttgaaaggcatgtgcagacccattttgatcagaatgttctaaattttgactagttactttttattatgagttaatatagtttagcagtaaaaaaaaaaaaaaaaaccacacctaaaatagaccactgaggagaccatagagcggatgctttcatgcaccctttactgcactttctgaccaggagctactttgagtttggtgttactaggatcagggtcagtctttggcttatcaataaattttaatctctgttaatcttacctgctttaaaaaaaagttcttgtgtgttcgtatctttatttattccctagtttgcagaactgtctgaataaaggatacaaggattatttcaatgttactgcactgaaaaacgtgtatgtattagtgtgctagattatttagcagaatattcacaagtttctgttgaccttgttgattgagcatgactactaaatattatgtaataaaaagcatttgtcataacagtcttatgaagtagttcttcgaatatagaaagttctataatttagcccatgaaatgataggtttttaattttcagaaatggagctgcatgtagaatgagatcacatgcttttatatgtgaaatattggttttagcaattaacagaaggcatactttgctaattttatggcaaaattttagaataacctgaatgattatttttaaactatcttgaagttgtatgtatatatctaatgggaaaatggaacaagagatgtcagtataattgttttcctattaaatgatctcataacaggggtgtttgtggcataaaaatcatagaatatatatcagtatcttttttacattttcctgatgagaatataaatttgaaatattctcagtaagtgattaaaagtacaatacataaacccaaatcaaagtaatgtgtttcttcagttatgtctgtgctgtatagaactgtcactaacattaaagaaagaggacacatttttcaagatctgtaa

SEQ ID NO: 1244 - DNA, 1454 bp, Homo Sapiens
  NM_001079866
gaaaggacccggggcggggccgaacgcagcttccccaaggtgcaggcgcggtgaaaccatcgagacggagggccagagagtcacggcggttttcgtaacaccccagggcctgtaaggtttggtgtttccctttcaagatgccactttcagactttattctggctctgaaggacaatccctactttggggctggatttgggctggtgggtgtgggcacagccctggccctggcccggaagggtgtccaactgggcctggtggcattccggcgccattacatgatcacactggaagtccctgctcgagacaggagctatgcctggttgcttagctggctcacccgccacagtacccgtactcagcacctcagtgtcgagacttcgtaccttcagcatgagagtggccgcatttccactaagtttgaatttgtccccagccctggaaaccattttatctggtatcgggggaaatggattcgggtagaacgaagtcgagagatgcagatgatagacttgcagacggggactccttgggaatctgtcaccttcacggccctgggcactgaccgaaaggttttcttcaacatcctggaggaagctcgagagctagccttgcagcaggaggaagggaagaccgtgatgtacacagctgtgggctctgaatggcgtccctttggctatccacgccgccggcgaccactgaattctgtggttctacaacagggtctggctgaccgaattgtcagagacgtccaggaattcatcgataaccccaagtggtacactgacagaggcattccttacagacgtggctacctgctttatgggccccctggttgcggaaagagcagttttatcacagccctggctggggaactggagcacagcatctgcctgctgagcctcacggactccagcctctctgatgaccgactcaaccacctgctgagcgtggccccgcagcagagcctggtactcctggaggatgtggatgctgcttttctcagtcgagacttggctgtggagaacccagtaaagtaccaaggcctaggtcgcctcaccttcagtggactgctcaatgccttggatggtgtggcttccaccgaggcccgcatcgtgttcatgaccaccaaccacgttgacaggctggaccctgccctgatacgcccggggcgagtggacctgaaggagtacgtgggctactgctcacactggcagctgacccagatgttccagaggttctatccagggcaggcaccttccttagctgagaactttgcagaacatgtccttcgagctacaaaccagatcagtcctgcccaggtgcagggctacttcatgctgtataaaaatgaccctgtaggggcaattcacaatgctgagtctctgaggaggtgatcaggctgggctcagctcagctctcctcctctagctcaataaacatctgccacacta

SEQ ID NO: 1245 - DNA, 5198 bp, Homo Sapiens
  NM_001079872
agactcgctgagtcgctcctgcagaaagggggggagagagatcgaaaagcaggggagggggacggcacggccgtttacctgtctgcctcctcattcgctctcccccctcgttctgctcactcctggtgtcagcctatccgccttcccaaaccctcccattcccccggtgtagccccccccttcactttccttctcgtcctctgtgtttctcctctcttctttcttcccttccccctctagcattgctaccttctctcctacacgcacgcaggcatataaacgtaggtttttgatgctcctctgcctgttgaccccgctattttcatgtttccaacaggtttttcttcccccagtccctcagctgctgctgctgctcaggaggtcagatctgccactgatggtaataccagcaccactccgcccacctctgccaagaagagaaagttaaacagcagcagcagtagcagcagtaacagtagtaacgagagagaagactttgattccacctcttcctcctcttccactcctcctttacaacccagggattcggcatccccttcaacctcgtccttctgcctgggggtttcagtggctgcttccagccacgtaccgatacagaagaagctgcgttttgaagacaccctggagtttgtagggtttgatgcgaagatggctgaggaatcctcctcctcctcctcctcatcttcaccaactgctgcaacatctcagcagcagcaacttaaaaataagagtatattaatctcttctgtggcttcggtgcatcatgcaaacggcctagccaaatcttctaccaccgtctctagctttgctaacagcaaacctggctctgctaagaagttagtgatcaagaactttaaagataagcctaaattaccagaaaactacacagatgaaacctggcaaaaactgaaagaagcagtggaagctattcagaatagtacttcaattaagtacaatttagaagaactctaccaggctgtagaaaatctctgttcttacaagatttctgcaaacttgtacaaacagctgagacagatctgcgaagatcacatcaaagcacagattcatcaattcagagaggattcattggatagcgttctttttttaaagaagattgatagatgctggcaaaaccattgcagacaaatgatcatgatcaggagcatttttttgtttctggatagaacttacgttcttcagaattcaatgctaccctccatttgggacatgggactggagttatttagggctcatattataagtgatcagaaagtgcagaataagacaattgatggcattcttctcttgattgagagggaaaggaatggtgaagcaattgatagaagtttacttcgaagccttttaagcatgctgtctgatttgcaaatttatcaagattcttttgaacaacgatttttggaagaaactaaccggctctatgcagctgaaggccaaaaattaatgcaagaaagagaggttcctgaatatctacatcatgttaacaaacgtctagaagaagaagcagacagacttattacttacttagatcagaccacccagaagtcattaattgctactgtagaaaaacaacttctaggtgaacacttaacagcaattcttcagaaaggtttaaataacctccttgatgaaaaccgaattcaagatttgtctcttctgtatcagctcttcagtagagttcgaggtggagttcaggttcttttgcagcagtggatcgaatatatcaaggcatttggcagcactattgtaattaatcctgaaaaagataaaaccatggttcaagaattgctggattttaaagataaggttgaccatataattgatatctgctttctgaagaatgagaaatttatcaatgccatgaaagaagcatttgaaacgttcattaacaaaagaccaaataaaccagctgaacttatagctaagtatgtagattcaaaacttcgtgcaggcaacaaagaagctacagatgaagaacttgagaaaatgttggataaaattatgatcatatttagatttatctatggcaaggatgtttttgaggccttctataagaaagatttagccaagcgcctgttagtcggaaagagtgcatctgtagatgctgaaaaatcaatgctgtccaaacttaaacatgaatgcggagctgctttcaccagcaaacttgaaggaatgtttaaagacatggaactttctaaagacatcatgattcagttcaaacagtatatgcagaatcagaatgttccgggaaatattgagttaactgtgaatatcctgacaatgggctattggccgacatatgtgcctatggaagttcatttaccaccagagatggtaaaacttcaggagattttcaagacattttacctaggcaaacatagtggcaggaaacttcagtggcagtcaaccctaggacactgtgtgttaaaagcagaatttaaagagggtaaaaaggaactccaggtctctctttttcaaacactggtgctgctaatgtttaatgagggagaggagttcagtttagaagagatcaagcaggcaactggaatagaggatggagagttaaggagaacactgcagtcattagcctgtggcaaagctagagttctggcgaaaaatccaaagggcaaagacattgaagatggtgacaagttcatttgtaatgatgatttcaaacataaacttttcaggataaagatcaatcaaatccagatgaaagaaacggttgaagaacaagcaagcactacagaaagagtatttcaagacagacagtatcaaattgatgctgcaattgttcgaattatgaagatgagaaagacacttagccacaatctccttgtttcagaagtgtacaaccagttgaaatttccagtaaagcctgctgatcttaagaagagaatagaatctttaattgaccgggactacatggaaagagataaagaaaatccaaaccagtacaactatattgcatagaatgttggccttgcagcatttggtgtcatatgcagtagccagtggataaactaacctgttgattcaatattatttgactccttttttactaccgatgaccaaatgaagcagtgtaattaatggaaatagttgagtggactttttctcagtggttaacatgcccattttaaagagtaatacttacctttaagaagaatgttgttgaactctttgcatgttatttagtatgatgtgcagaaaacacttaagaacgtacctggtcttcatgaattcctctttggaactgggaaagagatccctgtggctattaaaaaggggggagggttcttacacaccattaattatgaagcaaaaggtttatttgcttaaaatgtcatttaaagatacttaaactgcatgcaaactttatttactgtacagagttctggatgtatttatcaaatagaaaaaccacccttgacttggttgttcacccgttttgtgatttcccttgaaaagagaaatgaattgtcatagctattgatattttactaggtgatgttctgttacactgaaagggatgttttttaaaaaaaattatttggaaacaagttttcaagtagggggacagttgcttacataatatcttgtatattcacatcctaaaaattttcatttatgagtatgggatgtgtgtatatggcttagccccaagttaactgtgctgattaacaagtacttataaaaatagctaaagtagaaaattaatgatcagttgtactagaggaacatcatagaagagaaaaatccaactctttatattaaaaatgaatacaataagaaaattgcaaaagagaccaaaatgaacgtgttttgtaaattgttacaggagcaaaaactttgcaactagttttcaacatactttagactttaaatgttgtttggacagttttgtcttcaacttggaccaattgtagattgttacaggcttcctaggatttagcattcctattttctctaccaaagttttttttagaagcatcccaactcttctctttgttgataaataagcctttcctgtcatcttcattttaacttgctaaaaccctagatacaaaggtcctccctcatttttcccacagagcccctgtttgggaatttgagattctgtgtcatgctggttttcctttcagaattgcttgaaatcgagttctcttagccactggacacctagttttcaggagaatgtcccaagattgtttatatatacaaaatggcaaaagtactgtttttcgaattgataattcaagcaaaggcttctctttactgtcactgatttttttttgtttttattttgtttccttgtttctatttccttgaagctttgaagggaggagaagcagaaaattttgtttatgtttgttaaaaatcagaactacttaatgctttttgccacagcatatttccttgcctgttggagccgttaggaagattacctatgtcctaatcttcaacctgagaagatttttgactcttgtgtctactgttgattgtttgcttgagttctcaaagacctgtggccaggtattttaaaaagtcgtctatttctttctagttgcatcaacttgcacactggtgtctaactatatgtggtattcggaacttgtaattcttattgagcagccattgcctatattttctcagctcctcactgatttctttatatgagctcagctgacaagcaaatgcagctattttgtttaccctctcttcataccggaccatcaacaacagtgttctaactcatccctgatggtctgtgagatgtagactattacacaagattcaagttactcgtaagcaacttttagatagagttggtcctgttaggaggagactcttgatgtcaccttcagtatcttgaaagcgggtcccctccccgaggctcttaattctttgaaaacttgatgctgtttcagctgaaaaattagcaagactgttaaaaaaaaaaagttgaggggagctgtttaagaaactgaaaagtaattgcaaactacattggataattgtgactttcagttgttgttctgtatcagttgaatttttgtgctcttttccctgtgtacgtggtggttctatttttctccaataaaacttttatttaaaaaaagtttctagagaagatctttaaaaaaaaaaaaaaaaaa

SEQ ID NO: 1246 - DNA, 4171 bp, Homo Sapiens
  NM_001079907
gctgagatgggtgatcgggccttctgggtgacgcaggtgtgtgtgacaacacaacctgtagctccagcttctctgtgctgggatggatgatcgggccttctgggtgacgcaggtgtgtgtgacagcacaacctgtagctccagcgtctctgctgcttcccctgccttcacctcctaaccaagcggtacctgcctgagaacaagggccgcggaaggacgggagtgcctgagccctgccaggaaattcaccaacaagaaggcagaaacagccatgaggccagcatccttcagaaaaagcatccccgaggaggaagacgaatcgttaaacatcttaggtcagctttaccagtgaggaaaccgacactgtgagctctagcctctcggaatttgtcttcttcagtggaaaccccgagaagactgatcagttcttcagttctaaaacaatggcccagggtttggtgacgttcgccgacgtagccatagacttttctcaggaggagtgggcctgtctgaactctgctcagagggacctgtactgggacgtgatgctggagaactacagtaacttggtctcactggatttggagtcagcatatgaaaataagagtttacctacagaaaaaaacattcatgaaataagggcttccaaaaggaattcagatagaagaagtaaatcccttggccgtaactggatatgtgaaggtacgcttgaaagaccacagcgctccagagggaggtatgtcaatcagatgatcatcaattatgtcaaaagacctgctactagagaaggcacccctcctagaacacatcagagacatcataaggagaattcctttgaatgtaaggactgtgggaaggcctttagtcgtggctatcaacttagtcaacatcagaaaatccatactggtgagaaaccttatgaatgtaaagaatgtaagaaggccttccgttggggcaatcagcttactcaacatcaaaaaattcatactggggagaagccctacgaatgtaaagactgtgggaaggcttttcgatggggctcaagcctcgttattcataagaggattcatactggtgaaaaaccctatgaatgtaaagactgtggaaaggcctttcggcgtggtgatgagctcactcagcaccagagattccacactggggagaaagactacgaatgcaaagactgtgggaagacctttagccgtgtgtataaacttattcagcacaagagaattcatagtggggagaagccttacgagtgtaaagactgtgggaaggcttttatttgtggttcaagcctcattcagcataaaagaattcacacaggtgagaaaccctatgaatgtcaagaatgtgggaaggcctttactcgagtcaattaccttactcagcatcagaagatccacaccggtgagaagcctcacgaatgtaaggagtgtgggaaggcctttcgctggggttcgagcctcgttaagcacgagaggatacatacgggcgagaagccgtacaagtgcacagaatgtgggaaggccttcaattgtggctatcacctcactcagcacgagagaatccacacaggcgaaaccccgtataaatgtaaggagtgtgggaaggctttcatttatggatcgagcctcgtgaaacatgagagaattcataccggggtgaaaccctatgggtgtacagaatgtgggaagagctttagtcacggccatcagcttacacaacatcagaaaacgcacagtggggcgaaatcctacgaatgtaaggagtgcgggaaggcatgtaaccacctaaaccatctccgagaacatcagaggatccacaacagttgaagagccttttgaacgcagtagcccgctcgtatctatggtttcgctttccacagtttgttacctgcagtcaactgcagttcaaaaatattaaatggaaaattccagaaataaagaattttaagtctcaaatggtgtgcccttctgagtagcgtgatgaaatctctcgctgtccggctccagccggccggggatgtgagtcatcccttggtccagcacatccacgctgtatacgccacccaccctgctagtgacttagtagccgtcttggtgatcagatcaactatcccagcatcacagtgcctgtgcccaagcagtcctcactttgcttaacagtggccccagagagcaggagtagtgatgctggtgattcggatatgccaaagagaagccacaaagtgcttccttttaaatgaaaaggtgaaagttctcaacttaaaaaagaaaagaaaaaaatcatatactgaggttgctaagatctacatgacaataagatattttgggagagagatacgttcacataattttattacatatattgttacaattgttctattttgttagttactgttggtaatctcttactgtgcctaatttataaattaaactttagatatgtatgtacaggaaaaaatgtagtatatagtatcgtatatatgtacaggaaaaaaacgtactatctgtggtttcaggtgtccactgcgggtcttcaaacgtacccccctcaggtgagaggggactgctgtacaaagaatataggaaggcctctagactacatccattccttcctcaacaggaggaaaattcctggtacagtttaacgtaaggcttcactgatcactgttgtttttgtttttgtttttgtttttttgagacagagtctcactcttgcccaggctggagtgcagtggcacggtcttggctcactgcaacctccacctcccaggttccagcaattctcctgcctcagcctccccagtagctgggattacagacatgcaccaccacacctggctaatttttgtatttttagtagagacagttttcaccatgttgtccaggctggtctcaactcctgacctcaggtgatccacccaccttgccctcccaaagtgctaggattacaggcgtgagccactgcacctagcccactgatcactcttctgcttacagaatatcagaagtcattctagaggcaaatttgaagagtggaaaaatcactttttctgaatgatcttgtttttggtgtagatgtttttattgtgtgggttagtttaatgaatacataaagactaccagtaccattctgtctttactccgtggcatctgtggaataaccctgctaatgtaacacgtgagaaagcctttggtcatgccacccactctaccagttgtccccaccatcccccgccctcctccctgtgagacactgggccaaaggctcactacccctgtgcgttgtccagcacacagacactatgtgcattatttgtacataaggataatcacatctacctgagactgctatcatggaaattaaatgtttggtacatgtaaagtctttgaaagtgtaactggaatattgtgtaattttaataaataataactattgttgtttttatgatcattactaccatttgtgttgccattagtgaatttttacaagaaaactccctgtgggtgcaatgagtctggaaaagaccattgagtcttctagaagaaaacattaagagattattggcacagccgtgggttacgcaatgatttcttagtacacaaaacacagcaaacataaaaagttgttacacttcatcaaaagtacaaagttctgttcatcaaatgatgctgttaagatagggaaaagacaagaaacaggactggaagaagatgtttgctctaaggtacacctgacaaaggaactctcatagaaaatataaagaatccctcaagttgaaaaaaaaatcaatttaaaggggagaaaacttcagcacgtctcaacagaagaccaccaaatggccaataagtaagtgaaaatgtattcaatgtcattgctcctcaaggaactgtagagtaaaaccacaatgtgctgtcactctagacagtcaccaggatgattaaatttaaatcacaataacaaggctgatttcagatgtctcaccacaaagaaggaggataagggagcgaggtgatggatatgttaattagcttgatttaatccttccacattgtatacatgtatcagaacatcacattgtactccatcaatataatacaattattatttgtcaatcaaatattaataaaatcaaagatgagcaggaaaaaaaaaaaaaaaaaaaa

SEQ ID NO: 1247 - DNA, 5455 bp, Homo Sapiens
  NM_001080391
atttgggcggagccctttctgagtcagtctgtcggccgacttcctgcttggggcctgggcagccacactgcacgcaggctgggccgactgaggggctcagaggccaggctctgaggcccacgcagggcctagggtgggaagatggcaggtgggggcggcgacctgagcaccaggaggctgaatgaatgtatttcaccagtagcaaatgagatgaaccatcttcctgcacacagccacgatttgcaaaggatgttcacggaagaccagggtgtagatgacaggctgctctatgacattgtattcaagcacttcaaaagaaataaggtggagatttcaaatgcaataaaaaagacatttccattcctcgagggcctccgtgatcgtgatctcatcacaaataaaatgtttgaagattctcaagattcttgtagaaacctggtccctgtacagagagtggtgtacaatgttcttagtgaactggagaagacatttaacctgccagttctggaagcactgttcagcgatgtcaacatgcaggaataccccgatttaattcacatttataaaggctttgaaaatgtaatccatgacaaattgcctctccaagaaagtgaagaagaagagagggaggagaggtctggcctccaactaagtcttgaacaaggaactggtgaaaactcttttcgaagcctgacttggccaccttcgggttccccatctcatgctggtacaaccccacctgaaaatggactctcagagcacccctgtgaaacagaacagataaatgcaaagagaaaagatacaaccagtgacaaagatgattcgctaggaagccaacaaacaaatgaacaatgtgctcaaaaggctgagccaacagagtcctgcgaacaaattgctgtccaagtgaataatggggatgctggaagggagatgccctgcccgttgccctgtgatgaagaaagcccagaggcagagctacacaaccatggaatccaaattaattcctgttctgtgcgactggtggatataaaaaaggaaaagccattttctaattcaaaagttgagtgccaagcccaagcaagaactcatcataaccaggcatctgacataatagtcatcagcagtgaggactctgaaggatccactgacgttgatgagcccttagaagtcttcatctcagcaccgagaagtgagcctgtgatcaataatgacaaccctttagaatcaaatgatgaaaaggagggccaagaagccacttgctcacgaccccagattgtaccagagcccatggatttcagaaaattatctacattcagagaaagttttaagaaaagagtgataggacaagaccacgacttttcagaatccagtgaggaggaggcgcccgcagaagcctcgagcggggcactgagaagcaagcatggtgagaaggctcctatgacttctagaagtacatctacttggagaatacccagcaggaagagacgtttcagcagtagtgacttttcagacctgagtaatggagaagagcttcaggaaacctgcagctcatccctaagaagagggtcaggatcacagccacaagaacctgaaaataagaagtgctcctgtgtcatgtgttttccaaaaggtgtgccaagaagccaagaagcaaggactgaaagtagtcaagcatctgacatgatggataccatggatgttgaaaacaattctactttggaaaaacacagtgggaaaagaagaaaaaagagaaggcatagatctaaagtaaatggtctccaaagagggagaaagaaagacagacctagaaaacatttaactctgaataacaaagtccaaaagaaaagatggcaacaaagaggaagaaaagccaacactagacctttgaaaagaagaagaaaaagaggtccaagaattcccaaagatgaaaatattaattttaaacaatctgaacttcctgtgacctgtggtgaggtgaagggcactctatataaggagcgattcaaacaaggaacctcaaagaagtgtatacagagtgaggataaaaagtggttcactcccagggaatttgaaattgaaggagaccgcggagcatccaagaactggaagctaagtatacgctgcggtggatataccctgaaagtcctgatggagaacaaatttctgccagaaccaccaagcacaagaaaaaagagaatactggaatctcacaacaataccttagttgacccttgtccggaaaactcaaatatatgtgaggtgtgcaacaaatggggacggctgttctgctgcgacacttgtccaagatcctttcatgagcactgccacatcccatccgtggaagctaacaagaacccgtggagttgcatcttctgcaggataaagactattcaggaaagatgcccagaaagccaatcaggtcatcaggaatctgaagtcctgatgaggcagatgctgcctgaggagcagttgaaatgtgaattcctcctcttgaaggtctactgtgattcgaaaagctgctttttcgcctcagaaccgtattataacagagaggggtctcagggcccacagaagcccatgtggttaaacaaagtcaagacaagtttgaatgagcagatgtacacccgagtagaagggtttgtgcaggacatgcgtctcatctttcataaccacaaggaattttacagggaagataaattcaccagactgggaattcaagtacaggacatctttgagaagaatttcagaaacatttttgcaattcaggaaacaagcaagaacattataatgtttatttagccattcttatctcctcccttcagatcctctggcagctagctacgcaatgtgcctgtggtcccactaatctgtgactgctcctgtggaaactccacatcacaattctccaaaatttatcattgccattttaaaaccgtcttttcagctttcaataaaattcaacaccccttcatgttaaaaattctcaataagctaggtattgaggaacatatcccaaaataataagagccatttatgacaaacccacagacaacattatatggaatgcgcaaaagaagcattccccttgaaaacaagcacaagacaaggattccctctctcaccactcctattcaacaaagtattggaagtcctggtcagagcagtcaggaagcagaaaaaaataaagggtatctaaataggcaaagaggaagtcaaactatccctgtttgcacacaacattgattctatatctagaaaaccccctagtctcagcccagaagctccttctgctgataaacaatttcagagatgtttcagaatacaaaattagtatatgaaaattactagtattcctatacaccagcaatagccaagccaagagccaaatcaggaaggcaatctcattcacaattgccactaaaagaataaaatacctaggaatacagctaatcagggaggtgagagagttctacaatgagaattacgaaacactgctcaaagagattggagatgacacaaacaaatggaaaaacatcccatgctcctgtgtagaaacagtcaatatcattaaaatgaccatactgcccaaagcagtttacaggttcaatgttattcctatcaaaccaccaatgacattcttcacagaactagataaaactattttaaaattcatacagaaccaaaaaagagcccaaatagccaaggcaatcctaagcaaaaagaacaaagctgaaggcatcacgttaccccacttcaaactatattacagggcttcagtaaccaaaacagcatggtactggtaccaaaaaaaaagccacatagaccaatggaacagaacgaagagcacagaataagaccacactcctatgaccatctgatcgtcgataaaaacaagcaatgggaaaaagactccctattttataaatggtgctgggataactgggatagaagattgaagctagacctcttccttacaccatatacaaaaatcaactcaagatcaattaaagacttaatgtaaaatcaaaaactatgaagactctggaagacaacctaggcaataccatcctggacataggaacaggcaaagatttcatgataaagacaaaagcaatagcaacaaaagcaaaatttgacaaatgggatctaattaaacttaagagattctgcacagcaaaagaaacaatcaacagagtaaacagacaacctacaaaatgggagaaaatatttgcacactatgcatctgacaaaggtctaatagccagcttctatagggaacttaaacaaatttacaagacaaaaagaaataaccccattaaaaagtgggcaaaggacatgaaagacactttttttttttaagatggagtttcactcttgttgcccaggccagagtgcaatggcgtgatcttggctcaccacaacctctgcctcccgggttcaagcaattctcctgcctcagcctcccaggtggctgggattacaggcatgcaccacctgactgattttgtattttagtagagacggggtttctccacattggtcaggctggtcttgaactcccgacctcaggtgatccacccacctcggcctcccaaagtgctgggattacaggcatcagccaccatgcccggatgaaaagacactttccaaaagaagatacacatgcggccaacaagcatgttttaaaagctcaatatcactgatcgttagagacatgcaaattaaaactacaatgagacaccatctcacaccagtcaaaatgcctctttctaaaaagtcaaaaaataacagctagtaaggttgtggagaaaagggaacatttatacactattgatgggagtgtaaattagttcaaccactgtggaaagcagtgtggcaactcctcatagtgctaaaagcagaactgccattccacccagcaatcccattactgggtacatacccagaggaatataaatcattctaccataaagacacatgcatgcaaatgtccactgcagcactattcacaatagcaaagatacagaatcaacctaagtgcccatcagtaacagattggataaagaaaatatggtacacatacaccatggaatagtatgcagccataagaaacaatgagatcatgtctcaggaacatggatagagctggaggctattatccttagcaaactaattcaggaacagaaaaccaaataccacaggttctcagttgtgagtgggagctaaatgatgagaactcatgaacacaatgaagggaacagacactagggtctacttgagggtggaggatgggaagagggagaggagcagaaaaagtacctattggtgatgaagtactctgtacaacaaacccgtgacaagagtttccctatataacaaaccttcacatatacccctgaacctaaaagtttttttaattgtaaataaatggatcattaaaaaaaattttaataat

SEQ ID NO: 1248 - DNA, 7296 bp, Homo Sapiens
  NM_001080392
atggtggagcagggagacgcggcgccgctgctgcgctgggccgagggccccgccgtctccctgccgcaggccccgcagccgcaggcgggaggctggggccggggcggcggcgggggcgcccggccggccgcggagccgccccggaggcgggagcccgaggagccggccgccccggaggtgctgctgcagcccgggcgcctggagctgggcgacgtggaggaggaccaggtggtggccgtgttcgtggtcaccttcgacccccgctcgggaaacatggtagaatggtgcttacctcaagatattgaccttgaaggtgttgagttcaagtctatggccagtgggtcccataaaatccaatctgatttcatctatttccgaaaggggcccttcttcggcctggcctgctttgccaacatgcccgtggagagcgagctggaacgtggcgcgcggatgaagtctgtgggcatcctctctccctcctacacactgctttaccgctacatgcacttcttggagaaccaggttcggcaccagttggagatgccaggacattactctcatctggctgccttctatgaggacaaaaagggggtgctccatgctggtcccggcagaggcagcagcctgccccctgtctactggctgccttccatccaccgatacatgtaccctgagatgaagatcacacacccagctggctgcatgtctcagtttataaagttctttggagaacagatcctcatcctctggaaatttgccttacttcgaaagcgcattttgatattttctcccccacctgtgggcgtggtgtgctatagagtgtactgctgctgctgcttggccaacgtttcactgcctggcatcgggggcaccattcctgagtccaaacctttcttctacgtgaacgtggctgacatcgagagcctggaggtagaggtgtcctatgtggcctgcaccacagagaagatattcgaggagaagcgggagctgtatgacgtctacgtggataaccagaatgtgaagacacaccacgaccacctgcagccgctgctgaagatcaacagtgctgacagggagaagtaccgccggctcaacgagcagaggcagatgctgttgtactcccaggaagtagaagaagactacaacccttgtgaagaggacctcttcgtgctgtttttcctagaacaaaacaaccggatatttcagactttgttggaggtgtctgccagtcaagacaaaactctgacagcagagcatgcccggggcatgggcctagacccccaaggagaccggagctttctcctggacctgctggaggcctatggcattgatgtcatgctggttatcgacaacccctgttgcccgtaggaggagccaacaggactgggagccacttcacgtgggatgtcagcagcccggagttcaccccagggccccagagggcctcattttttattaagttgacacaaaggaatattgtttatactttccaacaaacataatttttgcaatttcctttctgcccttttccctagagataaggtgagatcaccttggttttgtgtcctgccatgttaggatattggaatctgccactttctcccagagctgctggtcctctgggcttggtcatgggagttgtatcactaggagtaggctgagctctggaaacattgggatggactgttcagaaagtctgtgtggtctttgtcccttgatgtatttgagaataagacaaccacctgtcccctgtggccttagatgttcatctgcctaaaggcagaaactagaccagatgatcttttaaggtttttagtagttctaggagtctatagtcttgggatcaaatcccttttcttgttcattagggcaactttatgtcttctctgtttacttgagtagggaccacaaagagggaaaaaaggatgtttctgacaccaaatatgagcttatcttatggtcagaatgaaagaggttgcttatcagtgagctgaaaactaaaattatagaatgaagcctggaaaccttcctcaaagtaacttgatggtggccatgcaatgtaatgttcctctttgtctgaaccttcctcttcttgggatgaattggtgaattgctaagggccaatgctggccttggagcttgcaagcaaattaattttccagtttagtctcttaagggttcaataatgctcttggagtaagttgggtatttttaaaggctgaagtttggactaccggaggatagagcaattgaagttcgagcaggatggagaagccactctaagtctcttcatctggacacgaattctctggaggcattagcagcagcacctctgggtcaacacagatttactggattccaaaatctagcaaggatctgagctggttaactcagagggtggagcatgatgctaacaagacggtttatcattttggacccctcacaaacacacttctctttagcagaggtgacattccttaggctaaataattggatccagggacataacagatttgttgagagaaaatgtggcagtgccttcacccgggacagtggtcaggaagccctgagcatccctgatggatttatccatcctcttctgaagtgctctgctctaggctgggtcctgttgccacctgcctgttctctggttggcttttgcaggagggcagcttacgtgtttgtcaaccagttagaaagccagttcctgtgggtcgagtttaggcctttttggccatagttgagaattttgacttgggatactgggttgttggtgacaaataatgtcttccttttcccccttcccgcctggctcggttatgggaatagccgtcagtgcatccatgtctgtgaccaacacccagccagactaatgtacacagcagggagaaataacattcaaatggtggttcacacatctcatctcaagataagattcttagggttcactgctttattcaaaagtgttttcactgtagctccttcatatggaatatcaaaactgaagaaattcacatgtggaaatgcaaatagacattgattaatcaaggtagcatctttatgtaaatatataaataagtttgggcattgaaatgtaaactgtacagctaatagacttttctcctctgcaatgtgggttgctgtcatttcagtaatgtgtatgtttacaaaagaaaaaaaaatctgtgtttcgaggttgaagcctcaccttttattctcctttacatgcaaccctctcttcttgcctctcaagggttgaggggtcctttctgtcaagtaatggttatttttcgtggtatcctgaggttcagggtgttttaagctgggggtaggtggttagaggcaggagtagaagtgaaaggaaaggtctgattctcctagaggacacaagaagacctcctttttctggaattagggaatctgccggaaggagctgtttgaggcatttctgctctgagccttctatatgcaaacactgcagttttaactgcaagctcagaagtgctggtgtaaacatagcagggtgagaatgaagttcctgttttttcctttgaatggtgagtcagggcttctgggttcccttaactttgtgcttgtctcggtagctttctgtctcacatctccacgtgtccaccctcctgctcatgcagagggccagggtatgggtggccccagaggagaacgtgccagtgaggcagtgccatgtttcaggtcataggggccttgggctcagctgaccccaatgcagaacttctccctttaagagagattccaataaattggtccttccctaccttgccagcttcttcataggaccagaaatcttgtgcagagcctctgcttggctgaacagcgtgtgctttatctcttcagttacctttgccactgttgagcatcctcagagtatgtcttgcctgggctatgaagtggagcctgtggcttcggaaatcacctttcgaagccttgctctatgccagattctgctccccaacatgacagattaacaggcacaacctaggatcctttgctaccagttctctactagggaattccacagtggcagcagaagctaggagccatgtggacctgcttttctgccagtcttgaaatattttctgagaaaccatctgcttttgttcagaagaaagtgctgaacatcgttcacagacttctaggtctgtaagctctttaggggcgggcattatgatgaccaccggcctcctggaggagggttggatacctgtggtgtgacaccttctgccaccatctcctgccgggcctcagccctcgcctgcctgagcaggcctagttctcctgtgaagctgtcagcctgatctcatgccacactgtgaaatgaactatgtgccagtttggaaatgattgctgacctgagatgctggctgggctgccctgttgttcctgaataagtcagaagaagttccaggtgggagtggaattcaggtttggggctcgttggtatccatgcaaaatatgacaaaggcctgttcaagagggcattttcaattctgtaggctcagcagatgatactgcccagcctttgggaaaatgtccagttggcccctggcttaggactctccacaaggagtttgaaatggtagggcttatcccctaccagactaaaagtatggcccaaattatgtgtttagaatttgcttggcctttaaacacgaaccattccctatgcctggtagagaccattccagtgtcagtgtcccacctgggacctgtacagtcctcagtaaattatgattgcaatgaattagaaggcttttgccttccatatccatcatccattatagcatctgtgcttccacctggttagggggagggaagctgaaatcattgatgtatcaatagaagtaatttagcttaggaacttgcatctataacttaccttgttttgttccactttaaagtcaagacaagaaagttaagatagcacacaggtgcacatgcttccagatgccacatgtgaacatttgttgatcatgtgactaccgatgacactttagctagaagataaattaaatcttagctaaatcattgtttttccttctggtggctatgaggatgaatttgctctcagtcttgatgcactgaaagcccttcaaacacagtaaaagatgaaatcactcatctttaaactgaggccttcagggaagcttttgtaaaggacagtaatgaattaggctttcagttttaggacatcaaccctccgagaaaaggcagaaacccgagggaccatttatttcccttcgaaactgtatagcccagggaatggattgagatgctttctccagaccctgtataggtcaaccttgcagaggtaaaggaggaggggcaggtggatgaataaaataggataatgctcagcttggcagtggacttgccttagtgtgatgacaggtctaacatgggcaagacaattagaatggggaccaatatgccaggcatgggcttttatctccctagtagatcccaagctagtaggcttggattctgccaaatggccagccctcctgtcttctccccgtaccttgtagttagaccgaggtgagaatcctgctgaccccagtcccatcccctctcatttcaggaaaacccttttgtgattcaggtagggggagaggaggagttaagggctccgtttactcccaagtcatggatttttaatattccatttttatcactaatatacctctcttcctagaagctactggagtattgagtgttgtgggaaaaggctaactgtgaattaagttaatgtttttcttataagaaatggaagtttatttttttattgatattactatgtgatgaactgagtatgcatatactgaaatggaaggaaattttaaaactattattctagaagaaatgggcagttttgtaatttggtggtggctgagaccccatagaagttttactatgtaaataatttggagagtgaataaggagattgtgctatgaaatcctgacagcgctctttaggaggcagacttgacagtcctaggaaggttgacataaaaataccaaccttcagtaaagctctagtacaaaaaagggtaaatgtcatcattcttatttttaggcctctttcttgagagaggtgggagtgggaggtagtgttataactggcactttaatttgtttttggaactagaatttaggggcagttggatgaaattgcaaatttagaaggggaataagaattttctagtgctatataaagaaatgatgatggagacaaaagccttgctttcctctttttagaatttattttcgatttttagcatactgtggggcttttagagctaatatgatctaaattcagaaaatttaattttcatagtaggccaggtgtgaattacttatgtttgctatagaatgcttatttagactaacaataaatttactttgctttctaaggccagtcagcgaatgtggggatgaggcaggatgttttaaatgagccagagatgatccacaaagtgaacagtcgacacagaggtctttgagttggatggttgcaaatatattgacattagagtgaaaactccttcctttgggtaaactaaagaaagataaagtatactaaaaaattttaagatggtgttatacaaaaaaaagtttgggtctaacgtgtccacaaagactgtcaagtgaagaatggtggagattcttggtgtttgagcagccaacctggatgagtgacttcagggacagagcagaggaaagcaaaatgaatttcctttatttacccaaaacttgttgactgaatttttgtataggtccgggaaaataagcctaaacaaatagttgtagccttagaaaaactgttttcccatttctttctgagttagaatcagcatagcctccctgtcgccttaaatgtaaaaatcctattttgattaataccccagcctaagagttatagcaatacgagagactgaatctatttttgtttcgggtctttacctcatagtatgaaattagtaagacactgcatagattttgccctgaatactggtgtgcccaggtatgccgtgctctctctctgtttccagtggtggtaattttaaggcctaaagaaagctggggttaatcctgaagctaaaagtaaatgtttcttgaattgattttgttctgtggtacaaataacatctatgaatatcatatctgtatatatctgaaccaagttgtgtgcagagaggttgatataactatatttacagaaaatgatttttacaattaaagttcacattttaacatgaa

SEQ ID NO: 1249 - DNA, 5327 bp, Homo Sapiens
  NM_001080395
gatgcggcggctcgggccggggccgcgggcgtcctgagcgcagcgccctcccgggatgcccgccggccgctggcccggccatgtcgtcgtccttcttcaaccccagcttcgccttcagctcgcacttcgaccccgacggcgccccgctcagcgagctgtcctggccatcctccctcgccgtggtggctgtgtctttctccgggctcttcgccgtcatcgtcctcatgctggcctgcctgtgctgtaagaagggcggtatcgggttcaaggagtttgagaatgcggagggggacgagtacgcagccgacctggcgcagggctccccggccacggcagcacagaacgggcccgacgtgtacgtcctgccactcacggaggtctccttgcccatggccaagcagcctgggcgctcagtgcagctcctcaagtccacagacgtgggccggcacagcctcctgtacctgaaggaaatcggccgtggctggttcgggaaggtgttcctgggggaggtgaactctggcatcagcagtgcccaggtggtggtgaaggagctgcaggctagtgccagcgtgcaggagcagatgcagttcctggaggaggtgcagccctacagggccctgaagcacagcaacctgctccagtgcctggcccagtgcgccgaggtgacgccctacctgctggtgatggagttctgcccactgggggacctcaagggctacctgcggagctgccgggtggcggagtccatggctcccgacccccggaccctgcagcgcatggcctgtgaggtggcctgtggcgtcctgcaccttcatcgcaacaatttcgtgcacagcgacctggccctgcggaactgcctgctcacggctgacctgacggtgaagattggtgactatggcctggctcactgcaagtacagagaggactacttcgtgactgccgaccagctgtgggtgcctctgcgctggatcgcgccagagctggtggacgaggtgcatagcaacctgctcgtcgtggaccagaccaagagcgggaatgtgtggtccctgggcgtgaccatctgggagctctttgagctgggcacgcagccctatccccagcactcggaccagcaggtgctggcgtacacggtccgggagcagcagctcaagctgcccaagccccagctgcagctgaccctgtcggaccgctggtacgaggtgatgcagttctgctggctgcagcccgagcagcggcccacagccgaggaggtgcacctgctgctgtcctacctgtgtgccaagggcgccaccgaagcagaggaggagtttgaacggcgctggcgctctctgcggcccggcgggggcggcgtggggcccgggcccggtgcggcggggcccatgctgggcggcgtggtggagctcgccgctgcctcgtccttcccgctgctggagcagttcgcgggcgacggcttccacgcggacggcgacgacgtgctgacggtgaccgagaccagccgaggcctcaattttgagtacaagtgggaggcgggccgcggcgcggaggccttcccggccacgctgagccctggccgcaccgcacgcctgcaggagctgtgcgcccccgacggcgcgcccccgggcgtggttccggtgctcagcgcgcacagcccgtcgctgggcagcgagtacttcatccgcctagaggaggccgcacccgccgccggccacgaccctgactgcgccggctgcgcccccagtccacctgccaccgcggaccaggacgacgactctgacggcagcaccgccgcctcgctggccatggagccgctgctgggccacgggccacccgtcgacgtcccctggggccgcggcgaccactaccctcgcagaagcttggcgcgggacccgctctgcccctcacgctctccctcgccctcggcggggcccctgagtctggcggagggaggagcggaggatgcagactggggcgtggccgccttctgtcctgccttcttcgaggacccactgggcacgtcccctttggggagctcaggggcgcccccgctgccgctgactggcgaggatgagctagaggaggtgggagcgcggagggccgcccagcgcgggcactggcgctccaacgtgtcagccaacaacaacagcggcagccgctgtccagagtcctgggaccccgtctctgcgggcggccacgctgagggctgccccagtccaaagcagaccccacgggcctcccccgagccggggtaccctggagagcctctgcttgggctccaggcagcctctgcccaggagccaggctgctgccccggcctccctcatctatgctctgcccagggcctggcacctgctccctgcctggttacaccctcctggacagagacagccagtagtgggggtgaccacccgcaggcagagcccaagcttgccacggaggctgagggcactaccggaccccgcctgccccttccttccgtcccctccccatcccaggagggagccccacttccctcggaggaggccagtgcccccgacgcccctgatgccctgcctgactctcccacgcctgctactggtggcgaggtgtctgccatcaagctggcttctgccctgaatggcagcagcagctctcccgaggtggaggcacccagcagtgaggatgaggacacggccgaggccacctcaggcatcttcaccgacacgtccagcgacggcctgcaggccaggaggccggatgtggtgccagccttccgctctctgcagaagcaggtggggacccccgactccctggactccctggacatcccgtcctcagccagtgatggtggctatgaggtcttcagcccgtcggccactggcccctctggagggcagccgcgagcgctggacagtggctatgacaccgagaactatgagtcccctgagtttgtgctcaaggaggcgcaggaagggtgtgagccccaggcctttgcggagctggcctcagagggtgagggccccgggcccgagacacggctctccacctccctcagtggcctcaacgagaagaatccctaccgagactctgcctacttctcagacctcgaggctgaggccgaggccacctcaggcccagagaagaagtgcggcggggaccgagcccccgggccagagctgggcctgccgagcactgggcagccgtctgagcaggtctgtctcaggcctggggtttccggggaggcacaaggctctggccccggggaggtgctgcccccactgctgcagcttgaagggtcctccccagagcccagcacctgcccctcgggcctggtcccagagcctccggagccccaaggcccagccaaggtgcggcctgggcccagccccagctgctcccagtttttcctgctgaccccggttccgctgagatcagaaggcaacagctctgagttccaggggcccccaggactgttgtcagggccggccccacaaaagcggatggggggcccaggcacccccagagccccactccgcctggctctgcccggcctccctgcggccttggagggccggccggaggaggaggaggaggacagtgaggacagcgacgagtctgacgaggagctccgctgctacagcgtccaggagcctagcgaggacagcgaagaggaggcgccggcggtgcccgtggtggtggctgagagccagagcgcgcgcaacctgcgcagcctgctcaagatgcccagcctgctgtccgagaccttctgcgaggacctggaacgcaagaagaaggccgtgtccttcttcgacgacgtcaccgtctacctctttgaccaggaaagccccacccgggagctcggggagcccttcccgggcgccaaggaatcgccccctacgttccttagggggagccccggctctcccagcgcccccaaccggccgcagcaggctgatggctccccaaatggctccacagcggaagagggtggtgggttcgcgtgggacgacgacttcccgctgatgacggccaaggcagccttcgccatggccctagacccggccgcacccgccccggctgcgcccacgcccacgcccgctcccttctcgcgcttcacggtgtcgcccgcgcccacgtcccgcttctccatcacgcacgtgtctgactcggacgccgagtccaagagaggacctgaagctggtgccgggggtgagagtaaagaggcttgagacctgggcagctcctgcccctcaaggctggcgtcaccggagcccctgccaggcagcagcgaggatggtgaccgagaaggtggggaccacgtcctggtggctgttggcagcagattcaggtgcctctgccccacgcggtgtcctggagaagcccgtgggatgagaggccctggatggtagatcggccatgctccgccccagaggcagaattcgtctgggcttttaggcttgctgctagcccctgggggcgcctggagccacagtgggtgtctgtacacacatacacactcaaaaggggccagtgcccctgggcacggcggcccccaccctctgccctgcctgcctggcctcggaggacccgcatgccccatccggcagctcctccggtgtgctcacaggacacttaaaccaggacgaggcatggccccgagacactggcaggtttgtgagcctcttcccaccccctgtgcccccacccttgcctggttcctggtggctcagggcaaggagtggccctgggcgcccgtgtcggtcctgtttccgctgcccttatctcaaagtccgtggctgtttccccttcactgactcagctagacccgtaagcccacccttcccacagggaacaggctgctcccacctgggtcccgctgtggccacggtgggcagcccaaaagatcaggggtggaggggcttccaggctgtactcctgccccgtgggccccgttctagaggtgcccttggcaggaccgtgcaggcagctcccctctgtggggcagtatctggtcctgtgccccagctgccaaaggagagtgggggccatgccccgcagtcagtgttggggggctcctacctacagggagagggatggtggggaaggggtggagctgggggcagggcagcacagggaatatttttgtaactaactaactgctgtggttggagcgaatggaagttgggtgattttaagttattgttgccaaagagatgtaaagtttattgttgcttcgcagggggatttgttttgtgttttgtttgaggcttagaacgctggtgcaatgttttcttgttccttgttttttaagagaaatgaagctaagacaaaagaaaaaaaaaaaaaaaaaa

SEQ ID NO: 1250 - DNA, 7391 bp, Homo Sapiens
  NM_001080398
atgacctcacggacaaagcgaaggcagaaagttaaaatcagcatatcgaaaataaatcactctagttaccgaaaagaacataggccgttttgggagcaccagccacctccacaccagaactgggctgtcgggggccgctgcggcgcaggggctcgtccgggactgagtcagcgccggggccgagaagttcggcgggaggcgcagggcggggcttcctcccgccgactccgagcccggctctacttttctgagtccacgtctcttcctttggacaggcgtggcagcccgggcccgctcggcccagcccctcacggactgcggcgcgcggctccccggggcccggcccgccgaacgcctcgctctacagccctcacctcgcggcgccgagcgcagcgtccgcggcatggagaccggctccgactcaggtcagaggcccgcccccgggccgcgggggactggccctgcgcgcgcggcggcgcggttaggccgggccgcccgcacaggccgccgcgtgtcgagtccgcgcggggagcgcacgcggggcgggcggcgacagatcagcttgaacgggtctttttacgacttggccatgctgaaacagatgaacaattacagaatattatatctaaattccttcctcctgttttgctcaaactctctagcacccaagaaggagtacgtaaaaaggtaatggaactgctggtccatctgaataaacgtataaaaagccgccccaaaatacaacttccagtagagacactgttggttcagtaccaggaccctgctgcagtttcctttgtcacaaattttactataatttatgttaaaatgggctatcctcgcctaccagtggaaaaacaatgtgaactggcccctacgcttcttactgccatggaagggaagcctcagccacagcaggatagcttaatgcatcttttaataccaaccctttttcacatgaaataccctgttgaatcatcaaaatcagcttctccatttaatcttgctgagaaaccaaagactgtgcagctgcttttggacttcatgctagatgtccttctgatgccttatggttacgtgttaaatgaatcccagagtcgccaaaattcatcttcagcacagggttcttcttcaaacagtggcggaggttctggaatcccacagcctcctccgggaatgagcttttatgcagccaaacgagttattggtgataacccatggacacctgaacaattggaacagtgcaaattgggaatcgtgaaattcatagaagctgaacaggtgcctgaacttgaagctgttctccacttggtgattgcctctagtgatacacgccacagtgtggcaacggcagcagacctggaattgaaaagcaaacagagcttaattgactggaataatcctgccatcattaataagatgtacaaggtgtaccttggagatataccactgaagacaaaagagggtgcagttctgaagccagagttgaaaagggaccctgtcagtacaagagtcaagttaaagattgtcccccatctcctccgctctagacaagctgctgaaacgttcccagccaacattcaggtggtgtatgatggactttttggtacaaatacaaattcaaagttaagaacattatccctgcaatttgtgcatcatatttgtataacctgtccagaaatcaagattaagccattaggtccaatgcttttgaatggcctcaccaagctaatcaatgaatacaaagaggaccctaaactactgtcaatggcatattcagctgttggaaaactctccagtcggatgccacatttattcactaaggatatagcgcttgtgcagcagctttttgaagccctttgcaaggaagagcctgagactcgacttgctattcaagaagctttatctatgatggttggagcgtatagtactttggaaggggcacagcgaactctcatggaggcacttgtggcttcgtacttaataaagcctgaagttcaagttcgacaagtggctgtgaaatttgccagtacggtgtttccctcagatcatatcccttccagatatttgctgctactggctgcaggagatccacgtgaagaagttcatggagaagcacaacgcgtattaaggtgtcttccaggtagaaacagaaaagaaagtacttctgagcagatgccttccttcccagaaatggtttattacatccaagaaaaggcttctcatcgaatgaaaactccagtcaagtacatgaccgggaccactgtccttccatttaacccagcagcctttggagagatcgttctgtacttgcgcatgtgccttgcgcacagtgcgggggtggtgcccacctctcagagtttggctgatatgcaggatcatgccccagccattgggcgctacatacggactttaatgtcaagcgggcagatggcaccctcatcatctaacaagagtggggagactaaccctgtccagatctacattggcctgcttcagcagctgttagcaggtgttggaggtttgccggttatgtactgtctattggaagctgtgtcagtgtatccagaaaagctggctaccaaatttgtagacaaaacagaatggataaagagtctgatgaataacagtaaagaagaaatgcgcgaactggcagcgttgttttattctgtagtggtatcaacagtgtcggggaatgagttgaaatcaatgatagaacagcttataaagactacaaaagacaatcacagcccggagatacagcatggatccttgcttgcattgggattcacggtgggaaggtatttggctaaaaagaaaatgagaatgtcagagcaacaagacctggagagaaatgctgacaccctccctgatcaagaggaactcattcagagtgctacagaaacaataggctcatttttggacagtacatcacccctcctggcaattgctgcctgcacagccctgggtgaaattggcagaaatggtccacttccaatccccagtgagggatctggctttaccaaattgcatcttgtagaaagcttactaagtagaataccttccagtaaagaaacaaataagatgaaagaacgagcaatccaaacactgggatattttccagttggggatggagattttcctcaccagaaactcctcttgcaaggtctgatggattctgtggaggccaagcagatagaacttcagttcactattggcgaagccattaccagtgctgcaataggaactagttctgtggctgcccgagatgcctggcaaatgactgaagaggaatatactccacctgctggagccaaagtgaatgatgtggttccatgggtgttggatgtgattttaaataaacatatcatcagccccaacccacacgtgaggcaagcagcctgcatctggctcctttcccttgtcaggaagctaagtacccacaaagaagtgaagtctcatcttaaagaaattcaaagtgcatttgtttcagttctatcagaaaatgatgaacttagccaagatgttgcatcaaagggccttgggttggtttatgaactaggcaatgaacaagatcaacaggaattggtttctacacttgtggaaacacttatgactggcaaaagagttaaacatgaagtttctggagagacagtggtatttcaagggggagctcttggcaaaacaccagatggtcagggcctttctacttacaaggaactttgttctctggcaagtgatcttagccagccagatctggtgtataaatttatgaatttagccaaccatcatgcaatgtggaactctaggaagggtgctgcttttggttttaatgtaattgctaccagagctggagagcagctggctccttttctgcctcagctagttcctcgactttatcgttaccagtttgatcccaaccttggcattcgacaggccatgacaagtatttggaatgcgttggtcactgacaaatccatggtggataaatatttgaaagaaattcttcaagatttggttaagaaccttacaagcaatatgtggcgagttcgagaatccagctgtttagctttgaatgatttattgagaggaagacccttagatgacatcattgataaacttccagaaatttgggaaacgctttttagagtacaagatgatatcaaggaatctgtacgaaaagcggcagaactagctctgaaaactctgagcaaggtctgtgtgaaaatgtgtgaccctgccaaaggagcagctggccagagaaccatcgctgcccttctgccttgccttctggacaaaggaatgatgagcaccgtgacggaagttcgagccctcagcattaacacccttgtgaagatcagcaaaagtgcaggagccatgttgaaaccgcatgcaccaaaactcattccagctctgctagagtccttaagtgtattggagccccaagttctcaattatttgagcctccgggcgacagagcaagaaaaggctgcgatggatagtgctcggcttagtgctgccaaatcttctccaatgatggaaacaatcaacatgtgcctgcaataccttgatgtgtcagtgctgggcgagctagttcctaggttgtgtgaactgatcagaagtggtgtaggtcttggaactaagggtggctgtgccagtgtcattgtgtcattaactactcagtgtcctcaggacctaacaccttactcaggtaaacttatgagtgctttgctgagtggcctgacagatcggaacagtgtgattcagaaatcttgtgcatttgctatgggccatttagttcggacctcacgggatagcagcactgaaaaactcctgcagaagctcaatgggtggtatatggagaaagaagaacctatctacaagacctcttgtgctttgactattcatgctattggacgatacagccctgatgtattaaagaatcatgcaaaagaagtcctgcctctggcatttttaggcatgcatgaaattgctgatgaggagaaatccgaaaaagaagaatgtaatttatggaccgaagtgtggcaggaaaacgtacctggatcctttggtggcattcgattatacctgcaggagttaattactattacccagaaggctttgcagtctcagtcctggaaaatgaaagcccagggtgcaattgccatggcatcaattgcaaaacagactagctctctagtacctccatatctcggaatgatactgaccgcattgctgcaaggcctggctggaagaacgtgggcaggaaaggaggagctattgaaagccattgcctgtgtggtgacagcttgcagtgcagagctggaaaagtctgtgcccaatcaacccagcacaaatgaaattcttcaagctgttctgaaggaatgtagcaaagagaatgtcaaatacaagattgtagcaatcagctgtgcagctgatatcttgaaggccaccaaagaggacagattccaggagttctctaacattgtcatacctctcatcaagaagaactcacttgaaagcagtggggtccggacaaccaaaaatgaagaggagaatgaaaaggaaaaggagctccagctggaatatctgctgggtgcctttgaaagcctgggcaaagcctggccgcgaaacgcggagacccaacgttgttatcgtcaggagctgtgcaaactgatgtgtgaacggctaaaactcagcacgtggaaagtgcagctaggagtcctgcaatcaatgaatgccttttttcaggggttaatgcttttggaagaagaacatgccgatcctgaggctttggctgaaattctgcttgaaacttgtaaatcaatcacatattctttagaaaataagacctactcatctgtgagaacagaagctttatctgtgatagaattgctgcttaaaaaacttgaagaatctaaacagtgggaatgtttgacatctgaatgcagagtgctcctaattgagtctttagctactatggagccagacagcagacctgaactgcaggagaaagcagcgttactgaagaaaacacttgaaaatctggaataaattagaaggggaagaaacaaacaagtgccatgttcattgggggttgaagtggtggtgttctttgaaaaaccaagtgggaaaaagtaaagattaatctgtagcatgcatcattccttggctgaaataaaaagaaaaagccttaaattttgttccttattagctttattttactttatgtttttaaagtatctgggctgagtgagcttaatggaaccttggatgtttgaggggtggttgtaaaggaaactggcagaaatagttactaaaagagttcaagctgttattaaaggaattaatagacagagttgcagagcaagctggataaaaatcttagaactgcattcaaattagttatttcaggaaggggccctataaataacttattttaacctccctcttacacctgaagaaataggaagctgtgtcatctcagaggctttctgaggcctgtgccaaagtcagaacccaggtgtttaatgtctggccctggatactttcttttatggccatctgccaaatcagtgctaaccccggcttacccaagaaacttccaagatgaggtacgtttagggtggcacacagcagtctttgtgccagaactaaactgacccttaccattgggtttctgaaagccagaagctaaacattgtcttgtcatgtgtttaggtggttgatttggagaaaatgattgtttagcatctttacagatggagaggacagagtcagtctccttcggataattccaatcgtcttccttttacaggtggataaagtagattaggacaagatcacacattctatctgtgtctgtggctgcatattttgcaaaaccagaaacaaaatcgcagactgccgtggtttagaccatttataatgtcaaaactgtaatgacaaatttctgttcacttttatgctaccagtatgactttataggggagaaggaaagccttttaattagccacctgggaattactcttttaaaaaatgccttttctcaaaagaacatgataccactccaagtaaatcattgccactaggggttttcctccttccttctgttgcccatgcccctgcctgaaagtgtagggtaagaggaaaaacaagtaaaaccttagtgttgatggtaaactgagaactctgtagcttaccttggattccagagcagaagactggtttacattcagtactcatccttattgacgttaacaccaggaatctccatgtttattatttttcgtggaaactccatgtttattatttttggtggtctctattgaccaatgtatttcaaacttttttgactgcaagtcataataaaaataactttttacatcacg

SEQ ID NO: 1251 - DNA, 1718 bp, Homo Sapiens
  NM_001080401
atggcggtcctggcccgccagctgcagcgtctcctctggaccgcttgcaagaaaaaggagagggagaaggaggggagggaggaagaggaggaggaggaggcggggcgcagggcccccgaagggcctcggtctctgttgacagcgccgcgccgcgcccagcggccgcacgggggtgccgaggcgtctgggggcctgcgcttcggggcgagcgcagcgcaaggctggcgcgcgcgcatggaggatgctcactgcacttggctttcgttacctggtctgcccccgggctgggccttgtttgccgtcctcgacggccacggtggggctcgagctgcccgcttcggtgcacgccatttgccaggccatgtgctccaggagctgggcccggagcctagcgagcccgagggcgtgcgcgaggcgctgcgccgagccttcttgagcgccgacgagcgcctgcgctccctctggccccgcgtggaaacgggcggctgcacggccgtggtgttgctggtctccccgcggtttctgtacctggcgcactgcggtgactcccgcgcggtgctgagccgcgctggcgccgtggccttcagcacagaggaccaccggccccttcgaccccgggaacgcgagcgcatccacgccgctggcggcaccatccgccgccgccgcgtcgagggctctctggccgtgtcgcgagcgttgggcgactttacctacaaggaggctccggggaggccccccgagctacagctcgtttctgcggagccagaggtggccgcactggcacgccaggctgaggacgagttcatgctcctggcctctgatggcgtctgggacactgtgtctggtgctgccctggcgggactggtggcttcacgcctccgcttgggcctggccccagagcttctctgcgcgcagctgttggacacgtgtctgtgcaagggcagcctggacaacatgacctgcatcctggtctgcttccctggggcccctaggccttctgaggaggcgatcaggagggagctagcactggacgcagccctgggctgcagaatcgctgaactgtgtgcctctgctcagaagccccccagcctgaacacagttttcaggactctggcctcagaggacatcccagatttacctcctgggggagggctggactgcaaggccactgtcattgctgaagtttattctcagatctgccaggtctcagaagagtgcggagagaaggggcaggatggggctgggaagtccaaccccacgcatttgggctcagccttggacatggaggcctgacagctgttgtcctttggggatcctttgcttctctggggcctcaacagaactaaagaagaaaaccgaccctttccccaactacatgtaccagcggaaggaaggaaggccaatgtaggaacccaaaatgcttatttcttcttctcttacttccctctcacagaaaagtcttacgaatggggaaattccaccaacatccagaccaaaaagaaaaaagcccaaatcgaaaaaaaaaaaaaaaaaaaaaaaaaacaaaaaaacccaaccaaatgtttttgaaatattcagagccgaacagattctgagagataacccagtccaataacctctttccttcttattactcatctgtttttgaggggaagtagagttttgattattaaactttatttacataagtgattccaaatacattttcttgtaaaaaa

SEQ ID NO: 1252 - DNA, 3111 bp, Homo Sapiens
  NM_001080409
atgtctttttggtctgaaaaatgtacaagacttattctgtatgatttaaaaatagcactcaaaaatggatcgttgacattttgggatgtgaccatagaattcgctctggaggagtggcaatgcctggacatggctcagcagaatttatataggaatgttatgttagagaactacagaaacctggtcttcctgggtatcgctgtctctaagctagacttgataacttgtctgaagcaagggaaagagccttggaatatgaagagacatgagatggtaactaaacccccagttattagttctcattttacacaagacttttggccagatcagagcataaaagattctttccaagaaataatattgagaacatatgcaagatgtggacataagaatttacgattaagaaaagattgtgaaagtgtcaatgagggtaagatgcacgaagaagcttataataaacttaaccaatgttggacaactacccagggaaaaatatttcagtgtaacaaatatgtgaaagtctttcataaatattcaaattcaaatagatataagataattcatactgggaagaaaccatataaatgtgaagaatgtggcaaagcttttaagcaatcctcacaccttactagacataaagcaattcatactggagagaaaccctacaaatgcgaagaatgtggcaaagcttttaaccatttctcagcccttagaaaacatcagataattcatactggaaagaaaccctacaaatgtgaagaatgtggcaaagcttttagccagtcctcaacccttagaaaacatgagataattcatactgaagagaaaccctacaaatatgaagaatgcggcaaagcttttagcaatttgtcagcccttagaaaacatgagataattcatactggacagaaaccctacaaatgtgaagaatgtggtaaagcttttaagtggtcctcaaaacttactgtacataaggtaattcatactgcagagaaaccctgcaaatgtgaagaatgtggcaaagcttttaagcgtttctcagcccttagaaaacataagataattcatactggaaagcaaccctacaaatgtgaagaatgcagcaaagcttttagcaatttttcagcccttagaaaacatgagataattcatactggagagaaaccctacaaatgtgaagaatgtggtaaagcttttaagtggtcctcaaaacttactgtacataaggtaattcatatggaagagaaaccttgcaaatgtgaagaatgtggcaaagcttttaagcatttctcagcccttagaaaacataagataattcatactggaaagaaaccctacaaatgtgaagaatgtggcaaagcttttaacaattcctcaacccttatgaaacataagataattcatactgggaagaaaccatacaaatgtgaagaatgtggcaaagcttttaagcaatcttcacatcttactagacataaagcaattcatactggggagaaaccctacaaatgtgaagaatgtggcaaagcttttaaccacttctcagcccttagaaaacatcagataattcatactggaaagaaaccctacaaatgtgaagaatgtggcaaagcttttagccagtcctcaacccttagaaaacatgagataattcatactggagagaaaccctacaaatgtgaagaatgtggtaaagcttttaagtggtcctcacaccttactagacataaagtaattcatactgaagagaaaccctacaaatgtgaagaatgtggcaaggcttttaaccatttctcagcccttaggaaacataagataattcatactggaaagaaaccctacaaatgtgaagaatgtggcaaagcttttagccagtcctcaactcttagaaaacatgagataattcatactggagagaaaccctacaaatgtgaagaatgtggtaaagcttttaagtggtcctcaaaacttactgtacataaggtaattcatactgcagagaaaccctgcaaatgtgaagaatgtggcaaagcttttaagcatttctcagcccttagaaaacataagataattcatactggaaagaaaccctataaatgtgaagaatgtggcaaagcttttaacaattcctcaacccttagaaaacatgagataattcatactggagagaaatcctacaaatgtgaagaatgtgcccttagaaaacatgagataattcatactggaaagaaaccctacaaatgtgaagaatgtggcaaagcttttaacaattcctcaacccttaggaaacataagataatttatactgggaagaaaccatacaaatgtgaagaatgtggcaaagcttttaagcagtcctcacaccttactagacataaagcagttcatactggggagaagccctacaaatgtggagaatgtggaaaagcttttaacaattcctcaacccttaagaaacataagctaattcatactagggagaaatcgtacaaatgtgaagaatgtggcaaagcttttagcaatttctcagcccttaggaaacataagataattcatactggggagaaaccatacaaatgtgaagaatgtgaatgtggcaaagcttttaacaattcctcaacccttatgaaacataagataattcatactggggagaaaccgtacaaatgtgaagaatgtggcaaaggttttaacaatttctcgacccttatgaaacataagataattcatactggggagaaaccgtacaaatgtgaagaatgtggcaaagcttttaagcaatcctcacaccttactaaacataaatcaattcatactggagagaaaccctacaaatgtgaagaacgtggcaaagcttttagccatttctcacgccttactaaacataggataattcatactggaaagaaaccctacaaatgtgaagagtgtgagaaaccctacaaatgtgaagaatgtggcaaagcctttaaccagtcctcacaccttactcaacataaaacaattcatactggagggaaaacctacaaatgtgaagaatgtggcaaagcttttaaccatctttcagcccttactaaacataagataattcatactggggagaagccctaa

SEQ ID NO: 1253 - DNA, 6939 bp, Homo Sapiens
  NM_001080410
atggcctcgctggacctgccgtaccgctgcccccgctgcggggagcacaagcgcttccggagcctgtcgtcgctgcgcgcgcacctggagtacagccacacctacgagacgctctacatcctctccaagaccaacagcatctgcgacggcgccgccgccgccgcggccgccgccgccgctgcctcggggttcccgctggctcccgagcccgccgccctgctggccgtgcccggcgcccggcgagaggtcttcgagagcacttccttccagggcaaggagcaggcggccgggccgtcgcccgcggcgccgcacctgctgcaccaccaccatcaccacgctcccctcgcccacttccccggcgacctggtgcccgctagcctgccctgtgaggagttggccgagccgggccttgtgcccgccgcagcagcgcgctatgcgctgcgcgagatcgagatcccgctgggggagctgttcgcccgcaagtccgtggcgtcctcggcgtgctcgacgccgccgcctggccccggccccggcccttgccccgggcctgcctccgcttcgcccgcgtccccctcacccgctgatgtggcctacgaagagggcctggcgcgcctcaagatccgcgcgctggagaagctggaggtggaccggcggctggagcggctgagcgaggaggtggagcagaagatcgcgggccaggtgggccggctgcaggccgagctggagcgcaaggcggccgaactggagactgcgcggcaggagagtgcgaggctcgggcgcgagaaggaggagctggaggagcgcgcgtctgagctctcccgccaggtggacgtgagcgtagagctgctggcctcactcaagcaggacctggtgcacaaggaacaggagctgagccgcaagcagcaggaggtggtgcagatcgaccagttcctgaaggagacggcggcgcgggaggccagcgccaagctgcggctgcagcagttcattgaggagctccttgagcgggctgaccgtgccgagcggcagctgcaggtcatcagcagcagctgtggcagcacgcccagcgccagcctgggccgtggaggtgggggcggtggtgctggacccaatgcccggggcccaggcagaatgcgagaacaccacgtgggcccggccgtgcctaacacatatgcagtgtcacggcatggctcctctccgagcacaggggcctccagccgtgtgccagccgcatcccagagctcaggctgctatgacagtgacagtctggagctgcccaggccagaggagggggcccctgaggacagtggccctgggggcttgggcacacgggcccaggctgccaacgggggctcagagcggtcccagccccctcgcagctcaggcctgcggcgccaggccatccagaactggcagcgcagaccccgccgacacagcactgagggggaagagggtgatgtctccgacgttggctcccgaaccactgagtcagaggctgagggcccgttggatgcgccccgccccgggcctgctatggctgggccattgagcagctgccggctctcagcccgccccgagggaggcagtgggcggggtcggcgagcagagagggtcagcccctcacgctccaatgaggtcatcagcccagagatcctgaagatgcgagctgccctcttctgcatcttcacctacctggacacgcgcacactgctgcatgctgccgaggtctgccgggactggcgcttcgtggcccgccaccccgcagtctggacaagggtgctgcttgagaatgcccgtgtctgctccaagttcctggcaatgctggctcagtggtgcacccaggcccactctctgacgctgcagaacttgaagccccggcagcggggaaagaaggagagcaaggaggagtatgcccggagcacccggggctgcctggaagctgggctggagtccctgctgaaggcagctggggggaacctgctgatcctgcgcatctcccactgtccaaacatcctcaccgaccgctcgctctggctggccagctgctactgccgtgccctgcaggctgtcacgtacaggagtgccacagaccccgtgggccatgaggtcatttgggccctgggcgcaggctgcagagagatcgtctccctccaagtggcaccacttcacccctgccagcagcccacacgcttcagtaaccgctgcctgcagatgattggtcgctgttggccccacctgcgggccctgggggtcgggggtgccggctgtggggtgcagggcctggcatcactcgcgagaaactgcatgcggctgcaggtcctggagcttgaccacgtgtcagagatcacccaggaggtggcagcagaggtctgccgggaaggcctgaagggactggagatgctggtgctcacggcgactcccgtcacccctaaggccctactgcacttcaacagcatctgccggaacctcaagtccattgtggtccagattgggattgcggattatttcaaagagcccagcagccctgaggcccagaagctgtttgaggacatggtgacaaaactccaggctctgcgacggaggcccggcttctctaagattctgcacatcaaggtggaaggcggctgctaacccgggtagggggcggcagggcccctgccagccccacaccagggcactctctttggacctcagagggaccctggtttggactagacctttggaggccgagtgttatccctggcttctggagggggactgtcaagtctcctgtcctcctcctggagcagcagagcaacaggcctgacccagggcactgcctccccagtacaggggcttggacagaagctgccctccgacccccaccctaccccggctggagtagcctctggcacagccagtgaggagctgtcaccaccagcgcctggtgtcatcacctggaggatctgcaataaccacccagtggctcctcagctgttctggctggcctctccttcctgaggcccagcctcctggtcaggagcatctggggccccaagccaatgggggctccacaaggcagctcagacttggcaaggagggctcttctcctcaaccttgctgcagccttctgggggcaccccttcagacagcctgcccaggctgtggatccacatttcctgggggtaccacagccagacctaggggcctgggcacgtggtcagccaaaagctgggggcagcagtacagtggggtagtgggggtgggtttggaaaggaaacagtcacccagaacttctccccaggatgagaccacccttccaaggtgggggattgccagggggagaaaacttatttattgctgtaagacaggacccctcctcccaacctcataccccaccgcacaccagagctaaattcaaagctgaaaggcgcacgtttctatacctacattcattcctgagggaccctccagagggtcaaggtcccagccccaggcagccctgtcacagtgagaagtagttcctgtccttaaggaatttccttctaatccaggtgcttgggcaggaacccgatggccttcgggtcaccaaggctgtctgggagggaggcacagggccgccctctgtgctgaggccgtggaggaagccaggaggagggtggcttgctttgcttccttgtctaattagcttgcttgaagatgtggccttggcagggagccagacccatggggccaaggaagaggaagagcatcctcaatagactcactcccccttccttggtctccacgggccccgtggactgagggctgcattggggtcttctgcctaggggaagtgctggacctgagctggagccacttggcttagaagccacaggattcacttttcactggcctttgcagtccccaaaggatcaggtctcagaaccaaggctccaaaggctgaggtctccccagttcctcctctcagaactcccacagtagctcagaggccgggggtcctgccaactttcatttggaaagttctttcgaacatctaaactagatctatcttagggtttctttctctcctagataggatcagctcccagccctagccattaggctgctggtcctggcgggggatggggtcccctcgttacccagtccttcccagggacccaacttcctaacacaacctggcttggacatgaagaccctcccccaggttaccttgtaaagagtcctccagagctgggatcccatgggcgcagcagcacacccagctcccatggcgtcactccctagctctgtcccagcttttgctatcattgctgacttttcctcctgtggctcattctgtccctgccctttgaaaacctaaaataccaagggtgtcatgctggcaactccctgcccagtcctgcacaaagccttggctgtgtgtggcaccccttgcctcctaccccagagcagctggctccattggcttctccctgcaccagccctgtcctcaggggtcaggaaaaagcagcacagctttctttcctctcctccagaggcctggaagggaggtggaggtccagtaagggcctggctgccttggatttcttggtcctgccttgccaactgcaccctgtagctcctgctccctgtgaccccagaaccagaggtgctgccttccctgtctcctagacaaagcacaaagggatgccctgcttggcttgagcctgcccaactgaaggattttctctgccccagggaccttccatccctgaatacaaggctctaggcaacttctctctgggtggtacacactagaatgcctggcattagccctagaaaggaggttggggtgtatgggtagtgagctagggtgggagaaaggtggtgctgaaaggacagatgctagttgtagtttcactcactcattcattcattagtgcaacagtactgagcaccacctgcactagaggcagaggggtgaacaagatacccttctgcctggggggacgtccacttcccatgggtttggctatttccaggaaagcccctcagtcctccaccctgttctggctgtgtgtgaaggatgtgtgtgagcaggcccaatcctttgcagcaagaatgagaggtcagagtattccattgcacacgcaccctggggctgacagacttgtgccccctagccttcatgcatgcccaagcactggcagctttgcagcccctgccccaccagccccttgacgctcttcttttgttctctcctcggggatgagctctgctgctgagtagggagcttttgcttgctgggaggctctatgcatggatttttttggtgaccatacagctagggctgaggatgggaacagggacagagggcctggctatccctagaagcacttcatccatctttacccacccaaacgggatcccttcacatctcatacccagtaagatgcaagaaaggaatatctgagagcaagcagccctgctccaggggccccaggtatgtgtagaggcccagtgggggtggccacttggtgtttctaccaccccctgccatccagtctggccccagtacctacctgggaggttggtgtacttggcttaagtacttcatgctttattcaggctgcttccccacagcaccggcaggaaatgaaggtgcacttatatgcatccctgcaggaataaagagtgggtggcctgcccagcccagcaccacagcctttccccagccaggagagaccacctaaggatcaaggcagctcctgttttcttggttctgtgacactcgagtctgagccagcccctcaggaattgcctcaaaagagaaaaacaaaaaaaagtcctccttcccaaggcctgctactccaaggtttggctccatcccttgcctttgggtcctgcctatttccccactcctggtctcttatctttggggccaccagtggggagtcacccgggccccaatccctctaaggcgctaagttgaaggaggccttcccagagtgactattggtgccaaagtcccagttcctgttggacttggggtaaaaacaggagatggtgagtgggtgtaaggcccaaatgcccagagaagttaactcgaacccatgggacctgtcccagcctgtcagtccctgatgagtgtaacttccttcccctgggggcctggcccttctctccaacccagtggccatgctttctcacccagccttgtgcccggcctgcatttctgtatatattgctgtgtattgtgtgtatgtatgtattcctggacaagtgtgttcatctgcagcccttgcctgaggataaggtttaggattgggtaaagatcagaataccagggccagctaaggcaacgactccctccccaaacccttgggacctcagccagtcccaaggctgccctgacaatcaggcaggctccccaccgtgaggccaagcctcctctgccactgccagcatggcccaagggaggcttggccttgggcttgccagcctcagctctgccctgacaagggtcttgtatccagggcagaggcctgaggtgacccaggcttgctttgtggctgatgccagcaggcttggttctagtgggcaccactggtgggcaacctccataactggcccttaggccctaccttcctacacagctaggctataatgggcctgagtgagagggtagcttccccagccccaagcacaggcagaggggtggagagcaatttttggttttatttttgtttctgaagtggtgcctgtacctccagcccccagggggccttccctggccacacttctctgccccacccaggcatcgccatcccagcactttgctccatgtcacccgtaagatgccctttgctgaatgtacctgagtgtatgtatttaaaaggactcacatgggcatcagagaatttatggctctgtatccaataaaaaagatggtgaaactggtctatctgccaaaaaaaaaaa

SEQ ID NO: 1254 - DNA, 7464 bp, Homo Sapiens
  NM_001080415
gccttgcaggcgcctctggcgggcttcactgagatccgctctttcggtgctcgactcgcccgtgctgctgccgccgccgaaggaggggcaaagctcaagatggcggacaaaacgccaggcggatctcagaaggccagttcaaagacgagatcatcagatgttcattcatctggatcttcagatgcacatatggatgcatctggaccctcagatagtgatatgccaagtcggacacgacctaagagcccaagaaaacataattataggaatgaaagtgcccgtgaaagcctttgtgattctcctcatcagaatctctcaagacctcttctggaaaacaaacttaaagcattcagtattggaaaaatgagtacagctaagcgaactttaagtaaaaaggaacaggaagaattaaagaaaaaggaggatgaaaaggcagctgctgagatttatgaggagtttcttgctgcttttgaaggaagtgatggtaataaagtgaaaacatttgtgcgagggggtgttgttaatgcagctaaagaagaacatgaaacagatgaaaaaagaggtaaaatctataagccatcttcaagatttgcagatcaaaaaaatcctccaaatcagtcttccaatgaaagaccaccatctcttcttgtgatagaaaccaaaaaacctccacttaaaaaaggagagaaagaaaagaaaaaaagcaatttggaactcttcaaagaagaattaaagcaaattcaagaggaacgtgatgagagacataaaacaaaaggcagattaagtcgatttgaacctcctcagtcagattctgatggtcagcgtcgttctatggacgcgccttcaagaagaaatagatcatctggtgttcttgatgattacgcacctggctcacatgatgtaggagatccaagcactactaatttataccttggaaacattaatccacagatgaatgaagaaatgctgtgccaagaatttggaagatttggaccgttagccagtgtgaaaatcatgtggcctagaactgatgaagaaagagccagagagagaaattgcggctttgtggcctttatgaatagaagagatgctgaaagagctttaaaaaatttgaatggaaaaatgattatgtcttttgaaatgaagttaggttggggtaaagctgtacctattcctccacatccaatatacattccgccttctatgatggaacatacgcttcccccacctccatccggactgccttttaatgcgcagcctagagagcggttaaaaaaccctaatgctcctatgttaccgccacctaaaaacaaagaggattttgagaagactctgtcgcaagccatagtcaaagtggttatcccaacagaaaggaatttgctcgccctgatacatcgaatgatagagtttgttgtacgtgaagggccaatgtttgaagctatgattatgaacagagaaatcaacaatcctatgttcaggttcttatttgaaaaccagacaccagcccatgtttactataggtggaagctttattctattctgcagggagattctccaactaaatggcggacggaagattttcgtatgttcaaaaatggatctttttggaggccaccaccattaaatccgtacttgcatggaatgtcagaagagcaagaaacagaagcttttgtagaggaacctagtaaaaagggagcacttaaggaagaacagagggataaattggaagaaatcttgcggggattaactccaaggaaaaatgatattggagatgcaatggttttctgtcttaataatgctgaagctgctgaagaaatagtggattgcattactgagtcgttgtccatcttaaagacaccccttcctaaaaagattgccagattatatttggtttctgatgttttgtacaactcttcagccaaagttgctaatgcttcatattatagaaaattttttgaaacaaagttatgtcagatattttcagacctcaatgccacctatcgtacaattcaaggccatttacaatctgaaaactttaagcaacgggtaatgacttgcttcagagcatgggaagattgggcaatttatccagaaccatttttgatcaaactacaaaatattttcttaggacttgtaaatattattgaagaaaaggaaacagaggatgttccagatgaccttgatggtgcccccatcgaggaagagcttgatggtgcacctctggaagatgtagatggaattcctattgatgctactcccatcgatgatcttgatggagtccctataaaaagtcttgatgatgatcttgatggagtgcctttggatgcaactgaagactcaaaaaagaatgagcctatatttaaagttgccccatcaaaatgggaagctgtggatgaatctgaattggaagcacaggctgttacaacttctaaatgggaattatttgaccagcatgaagaatcagaagaagaagaaaatcaaaatcaagaagaagaaagtgaagatgaagaagatactcaaagttccaaatctgaagaacatcatttgtactctaatccaatcaaagaagaaatgactgagtctaagttctctaagtactctgaaatgagtgaggaaaaacgagccaaacttcgtgaaattgagctcaaagttatgaagtttcaggatgaattggaatctgggaaaagacctaaaaaaccaggccagagttttcaggagcaagtagaacactacagagataaacttcttcaacgagagaaagagaaagagttagaaagagaacgagaaagagacaagaaagataaagaaaaattggaatctcgctccaaagacaagaaggaaaaagatgagtgtactccgacaaggaaggaaaggaagaggcgacacagtacatcccccagcccatctcgcagtagcagtggtagacgagtgaaatccccatcaccaaaatcggagcgatcagagcgttcagaaagatctcataaagagagctcacggtccaggtcatctcacaaagattctcctagagatgttagcaaaaaagccaaaagatcaccatctggttcaaggacacctaaaaggtctaggcgatcacggtctagatctcctaaaaaatcaggaaagaagtccagatcccagtccagatctccacacaggtctcataaaaagtcaaagaaaaacaaacactgacgtaaatttttaagatgctgtcacttattggaaatgcgatttgttttgtgcctgaacggtctgttttttaaaaaaacaaaaaatcaaatgaaagagcattcctggggttttttgtttgtttgtgtatgcatgtgtaaactcatgagcaactgcatctgtagatctgtcattgttttatattgtgtaaattactttcattgtggctatttctcaagatgaaatttttattgttctaatggatttcatcagaaatgtgtataatggatctgctgacagtagtagtattttgttttaggatgttgtgacttagcaaaaataatacagatgtcttccccccttttgtagctttgacaatttgaattagatttcaaataaaatctgaacagaaaactataatgttgtttttttgccccaccggtgatattaagtcccttaaagtcctactgagtttcacactactgttgtgcttcttatacctgatgcactttataagccccagtgttcaagtagcttaagttttatatttactaagatgactatccaaattaagggacctgagactcctatttggtggtttgctaaccatttgcttttgataagtttctcttgggtaatactaatacccagatatcaaagactaggtagatatggcatggcgttttgttagtggaatgcctggctaaaacatttttttcacagaagcaatatgatttccatacatccaacccatgttctgagcaactacttacttttagggggaaattaaatatcttttcatttcctcttctattatgaaagaagtttatttgtaaaacaaattttctaacaaggtttggccatagaattctcttgtatgatcgttgaccttttataatcttctgtaggctatctttcaaacactggcatcagaatattttttataagtttgtgtttaaacagcttagttggtccccccccactcccaagagacttgggtttagttatagctttaagtaaaatttaaaaataaaatgtttttcaggaaacttcgtatctaatggtttgtaaattcaaggtgcaaaaagttgatttaaaccatttgcagagttgaactctattatgaaaataaatttgctacggtatgaggaagaaataaaacttgtgtaatgttggtcataatactgctataaatataataaagggttatgtagaattgaactgacactattatttgtgaatcttgatttcagttttttatgtaggcacttcatacactggtttgatgggttttttttttcctccctaaaagagaaagtagaaaactattctaacaatggattattttgatttagcttgctttttaaaaaaatcttttcaacttgttttacttaatcttgcctagtcacaaaataagatgtgcacccatggtttggagagttcctatattagctgagcagtgagatacactatttccaaacggtgcacacctacagtagctttggaaatgagccaatcactgttttacttaatggttcttatcagcatgcaaatattgcttgaaagttatttccttattcactgttttgttagtccattttgttaggaaacattaattcctaaaaatttgttcagaataattaaaagtgaacatttggtgctgatactcaaaaacctacaaatgtagccatttaaaaagtaacatgtttttctcccctgctcattgcctgggagaatggaattttatataactacctttctttgcaaaaataacggtcgtgtcgagttggtggtgattttggcattccatcttgcactggtttctagtataggcttagaaataattggtcaggtaataatctttccagtcaagttgcaagggatgcttatttctcttcaaaaaaagacatcctgcgggattgagtagaaaattttaggtcagttttgggtgcttatttgtaatatttttcctactacattggagtttagcagttctttttttctggatccagatacaagtgtcatggtttatcttacagtgggtgaaactgactttcttttggttgggtgggtgaggatttcttaggcctgatagaatatatattctgtgaagtttgttaatgtacatattagattgtattggatttttttttcttgaattgcaaatggtattattagataggttatttccagttttacttcatgacaaattacctagagtaaacctacttaatactcccatggattctatgaaagtttaatgggatcagaaattggtgacttataagggggaagatattctaccatatttttataatagcttattattcatgtttcttgtctgaaggacactcaagttacagagcaaaatttctataggttgactagaatgttcataagcatggtcttccagttgcaggaaagatcatgttctatctgtggacacttactgtcctctaccacagctacgtgccagagttgttttccacagttcttataaagggcatgacttaggctctttaccctccaacttaatgtttatacacagggattgtttactaggttaatgacatttaactcccctctcttctgtaggtgagagaaaataagtaagtcttgatctgtttcttaccaaagagagacagacctatgatggaaaatgatcacgtctctgaattttttctttaacgttatagttccttattacagatagtaagcatatgggaatttctgagctataacatgttgagaagttagaaattaaaactaacacaacaaaaggcgctgaatcaaaagatctttgcttttatttggctcagaatgtttttggcttttctgctaaagatggcagaaattactctacacagacctgatttttctttattgcagaccattcttgtgggcttaccctgagacttttatcccaattagtgaatcttggagggaatacttgcttatttatgacttaggtatttccccccaaactttaatattcttgagcacttgaaaatacttttgagaaattttaactgtgattaaatttaggtttattagaaatattctgtacacatttgcctccatggtggcgtaagttctgaaaaattatatgaccgtgacaatagtttatcatcatcattattgttattcaaaataagggtaaataaatctctgtattgccaaagtgacttaaactgttctgatgaccacacagtgtgatttctttagcagagaaagttggttttaaaaataaatagtaccacttttctaagactgtacagtttacaaataaggtttttttctttgttgttttcctcttctattaagttttagtgaaaagcctaattacagaaaattgtgcagatactagtgaagatactagtataagtttaaaggaacacgtgactgtaaaatctcacatttacaaagtgcttgatctcttcatatttcacacgcatgttttagaatagattttagggagtgtttaattcattatccttttgacttaaaatttttgttaccaacttcctaggacttagataatatataaataagtacaaatcccaggggaagtgttgtgatgctagactaaaaggtgggaatgtgctgctgttccgtgagccttgttccattgttgaaaatttgatgcctcagtgtttattcagtaccacctcatggagcttcaatgtaaatggattatatgtataattggtaatttgtatagttttgtagattgtagattaaatgcactcatcatgtcacatgtaattgtgcttggagtatttgtgttttattcttttacttcaacgggttcttgtctgttacatctctggtgatttgaaatatcaggaaagacagtttgtcagaaatgagaataatatagttgaaatcagttgggctaaaatattctacagcaagacaatttcttttgggtgaactgattctataatttacttacttttaatgtaaggattagatttattgttgagctgctttccagatcagactgtcactttatagtttttctacataaagattatatagttgcaaacaaaggttgtgaaatttcccttttgttgtttttgacttttaattaataaaagtacattgttttcatagcaaacttagactgtccatgtaattttctccatattgtttttccgatgcaagcccagttaataattagttttttagcagctttctctcaagtgaaataagtgatgtgacatgtttatcagttatggctaaaatgttacactttacatgtttaaactataatcatatgttttcatgctagatggt

SEQ ID NO: 1255 - DNA, 1512 bp, Homo Sapiens
  NM_001080422
gtggaggtggcagggcaggggtgcggagggaccgacggacgcacgggcgggcggccgggagccatggagcgcggccctggggcccgggggcgcgggccggggtgggcttcccacggcacgacatggagacctgtggttgcgaggctccctggggctcggcttggaccgcgatggggctgggccctggcctcctaacggggctgctgtctggggcggtagctgggggggcgctctcccccctgcccgcgactcggagcaccccacccctcccctgccgggccaggccgggcggcgttgttggcgggggccccggtggaggcccggcccgggcggcgcccgccatgaacgggctgtcgctgagtgagctctgctgcctcttctgctgccctccctgccccggccgcatcgctgccaagctcgccttcctgccgccggaggccacctactccctggtgcctgagcccgagctggggcctggtggggccggggccgcccccttggggaccctgagagcctcctcgggcgcacccgggcgctggaagctgcacctgacggagcgtgccgacttccagtacagccagcgcgagctggacaccatcgaggtcttccccaccaagagcgcccgcggcaaccgtgtctcctgcatgtatgttcgctgcgtgcctggtgccaggtacacggtcctcttctcgcacggcaatgccgtggacctgggccagatgagcagcttctacattggcctgggctcccgcctccactgcaacatcttcacctacgactcctccggctacggtgccagctcgggcaggccttccgagaggaacctctatgccgacatcgacgccacctggcaggccctgcgcaccaggtacggcatcagcccggacagcatcatcctgtacgggcagagcatcggcacggtgcccaccatggacctggcctcgcgctacgagtgtgccgcggtggtgctgcactcgccgctcacctcgggcatgcgcgtcgccttccgcgacaccaagaagacctactgcttcgacgccttccctaacatcgagaaggtgtccaagatcacgtctcccgtgctcatcatccacggcagggaggacgaggtgatcgacttctcgcacgggctggcgctctacgagcgctgccccaaggcggtggagccgctgtgggtggagggcgccgggcacaacgacatcgagctctacagccagtacctggagcgcctgcgtcgcttcatctcccaggagctgcccagccagcgcgcctagcggcggccccaaccagccggacctcagcaataaggcggcccccggacctcaccccgcgccggcccccacccaggggctgcatgtggacccccccgggcggcccaggggaccccgccccgacccaggggctgtggacgatgtacaggcaacagagctacgcactcctttccttttggaagcaagaagaaaatacgtgaaaacggaaattaaagatttaaaattaaaaaaaaaaaaaaga

SEQ ID NO: 1256 - DNA, 1290 bp, Homo Sapiens
  NM_001080425
gtgaccggccaacactgagtgttgtctcgctctggcgtcagagccgtcgtggctcgttccattctcggcggtggtacctgctcccggtggccctgaggacgtgtgggccaggggcggccccgaaattaggaagcggagggggagcagtctgcaggtctgcggggctaagtgtcgcggcggcgcacctcgcgtcaagaatccggaggaggagactgcaaggataggcccaggagtaatggagtccaaagaggaactagcggcaaacaatctcaacggggaaaatgcccaacaagaaaacgaaggaggggagcaggcccccacgcagaatgaagaagaatcccgccatttgggagggggtgaaggccagaagcctggaggaaatatcaggcgggggcgagttaggcgacttgtccctaattttcgatgggccatacctaataggcatattgagcacaatgaagcgagagatgatgtagaaaggtttgtagggcagatgatggaaatcaagagaaagactagggaacagcagatgaggcactatatgcgcttccaaactcctgaacctgacaaccattatgacttttgcctcataccttgaatcctaaaagttttcgctgaggttaatgtgaacactgctttacaagcttgtatttttgtgatttactttttctgtaagccttttggggtttacacttaccagtttctaatggaaattagaattctaattgaatattgttttgtctcagcctaaaagttacggtcagcatggcaattcacctattttaggaaaaatactcttttcataatatgaaatgcataaagcagttcaaaaagcagtctgtattccatcatcttcctttttcattccagtccttatttttgtaagtattacttttcctcctccggctacctggactcaaaatctcagttgtctttgacagtttttttcttgtccctgaccaaaaaagaatgatcatacccagaattcaatgtttgatattttaagaatgtatgttctagtgtttttcagagtgagtctaccatctgtataaaaacaccttgggggcaggcaggggcatttaaaaatgtaggacctatcgtccagactcacagagtggggctccagaatctccatttttaacaaactctcttaagtaattctgatgtgtaccaaaatcagtgccattggtgtgtgtgtacgtaactatatacatatgtgtgtgtgtgtatatatataatgtgtcataaccgtaaacaataaacaatatcaagataaaaaaaaaaaaaaaa

SEQ ID NO: 1257 - DNA, 4313 bp, Homo Sapiens
  NM_001080432
ctacgctcttccagctgtcggacctgggaaattctcctgtgctaaatcccgtggcgctcgcgggtgtcgccgcggtgcatcctgggagttgtagttttttctactcagagggagaatagctccagacgggagcaggacgctgagagaactacatgcaggaggcggggtccagggcgagggatctacgcagcttgcggtggcgaaggcggctttagtggcagcatgaagcgcaccccgactgccgaggaacgagagcgcgaagctaagaaactgaggcttcttgaagagcttgaagacacttggctcccttatctgacccccaaagatgatgaattctatcagcagtggcagctgaaatatcctaaactaattctccgagaagccagcagtgtatctgaggagctccataaagaggttcaagaagcctttctcacactgcacaagcatggctgcttatttcgggacctggttaggatccaaggcaaagatctgctcactccggtatctcgcatcctcattggtaatccaggctgcacctacaagtacctgaacaccaggctctttacggtcccctggccagtgaaagggtctaatataaaacacaccgaggctgaaatagccgctgcttgtgagaccttcctcaagctcaatgactacctgcagatagaaaccatccaggctttggaagaacttgctgccaaagagaaggctaatgaggatgctgtgccattgtgtatgtctgcagatttccccagggttgggatgggttcatcctacaacggacaagatgaagtggacattaagagcagagcagcatacaacgtaactttgctgaatttcatggatcctcagaaaatgccatacctgaaagaggaaccttattttggcatggggaaaatggcagtgagctggcatcatgatgaaaatctggtggacaggtcagcggtggcagtgtacagttatagctgtgaaggccctgaagaggaaagtgaggatgactctcatctcgaaggcagggatcctgatatttggcatgttggttttaagatctcatgggacatagagacacctggtttggcgataccccttcaccaaggagactgctatttcatgcttgatgatctcaatgccacccaccaacactgtgttttggccggttcacaacctcggtttagttccacccaccgagtggcagagtgctcaacaggaaccttggattatattttacaacgctgtcagttggctctgcagaatgtctgtgacgatgtggacaatgatgatgtctctttgaaatcctttgagcctgcagttttgaaacaaggagaagaaattcataatgaggtcgagtttgagtggctgaggcagttttggtttcaaggcaatcgatacagaaagtgcactgactggtggtgtcaacccatggctcaactggaagcactgtggaagaagatggagggtgtgacaaatgctgtgcttcatgaagttaaaagagaggggctccccgtggaacaaaggaatgaaatcttgactgccatccttgcctcgctcactgcacgccagaacctgaggagagaatggcatgccaggtgccagtcacgaattgcccgaacattacctgctgatcagaagccagaatgtcggccatactgggaaaaggatgatgcttcgatgcctctgccgtttgacctcacagacatcgtttcagaactcagaggtcagcttctggaagcaaaaccctagaaggagcacaagtctcaggcggaggagaaaaagagatcggcttttctcctccaacgttgtcatgggcttaagcaagagcagtggagacttctcttggcccctagattgtagcacccgggtcccaatccaaaacagctaggaaatggtgcccatgaagttttaaatgttttaaaatgaccctgtgttatagtctgatttggtgttaaacaggaccttcttcccccaaaattgttcagattataaaatgtgagccattcagcccccaaggtccagggcaggcgacaggaacgagcccagcgtgtgacaaagcctaacctactttcctctttcccaagctttttcagagactctggagtggacccagccctctggggaaagacagaacttagagacatcccagttactcaccacacccatagtgctgtccaatatggtagccactagctagctgtggctacttcaatttaaattcagttttaattttaattaaaaatgcagctcttcagtcgccctggccacatttcaagtgcttaacagcctcatgtggctagtgactgctgtattggacggtacagatatggaacattttcatcatcgaagaaagtcctattggacaacacttctataaaaagtttgagagcaggaattctcatttccattcgtctgtagcttctatccccaaaggcaaagaaactaaaagagaaatgactcattgaagattggcctctttcctttctctaagacaaacctaagtaaaagcctgagctttgagtcctatgctcagcacacgggaaggagatgttaataattaaaataaagttgatatcctgtctttagggagttcccttgatctcttgaaagagacacagccccatttacattatttcgtggatttcaccagcatagtatagtttttttctgtaagtccctcattcttatgtaataacaggtggaactgaggtttgaagaacctcagtggcccatcctgatgacattggagactcaaagagacaagagagagtagggtttaaaacctgagctttaagactcccactagcttcgtgtcctttggcatgttaacgtgcctcagtttcctcatctgtataatggggatatatgaaaggcaccagtcctaaggtgaacattaagtgagatgattctagttacagacttagaacaatttccagcacatagttaaatatccaggaaattctggtactgttatgtgtgggtgagctgacctggatgtagatgttttcctctctcttgctgacccctccgccagttttgtcttgtgatgccattaacacatctctccctttctgacctggctcctgcccattggtgtcccaagaaatcgtgagaatagttagccccccgtctccccagcctgttgctttctcgtgtagttgttcacagtagttgagaagttgaagagcttttgcctattgaaggtgcactgagaataaactctttcctgccaccagaattgcagtggttcacggcctgcactcattcccatgaatgcagttaatagccacagaaatgtcacattaagcaaagcagccagggtctcatcgtgttgagactcgagtctctcagaccttggattcattccctggtgtctttgagcctcagtttcctcattggtaaaagagaagtgaagcagtgtctcacagggtcattacagagattaaatgaaataaatgaaataacatagaccaggagggcgtggtgtttaaaagtcacagatggggcaccctcgggccatccagcccagtgttttctttagcccctatgatgttcattttttgttatatcccattaggtgcccatatttaaaaattgggagatttcacataaaattaaaaggtctgcattttcttttttcttttctttttttttttttttgagacacagtctcactctgtcaccaggctagagtgcagtggcacgatctcagctcactgcaacctctgcctcccaggttcaagtaattctcctgcctcagcctcccaagtagctgggactacaggcacgtgccaccacgcccagctaatttttgtatttttagcagagatggggtttcaccacattggccaggatggtctcgatctcaacctcgtgatccacccacctcggtctcccaaagcgctgggattacaggcgtgagccaccgcgccaagccaaggtctgcatttttctttagaactcagaacacccaatagtcctaggcccccatcctcgcatggcagcaagctaaataagcatcttcccactgcgagttggggcatgacccagcctatggtttgccatactccctctttttctccgttttttcattaattgtgaacctgacctgcatcaccctttcatgtcagtgctctccaaacctgcttgcttgcacccctctagtcgaaatattttgtgcttaccccaatatatgtgtgtgactattgaactctattcgtagactgcttgtactaatgtcatttgcatcataaaatattcatatccaataaacatattaaaaggatgagataagaaaccgaaaaaaaaaaaaaaaaaaaaaa

SEQ ID NO: 1258 - DNA, 4261 bp, Homo Sapiens
  NM_001080435
tatttcatctccccaacgcatttgtgacattcttaagggcgtgaaccatgtactcaatagggccctgatgatagaaaagaaaatcagcttggtccctgttctcaagttcatagtttagtgtgggagactaatacaataactcgccgattcaacagatatttttccaacgtccgtatgtattgggtggaaaaggtgaggcaagagttgtatttcccagactcctgaacaggttgcgagatgattgactcctgagggagaccttctcaccttttcattggttgtcgctggccctctcgtctatcacccaaccaaccccgaatgcctcttgtaagccccacctccggcagccagccaatcagaagtgccgggggccagggtgctgctggggcactgacgcggtttcgattctagcgaaaaatgatttggctcggactgtcccgtgacaggcggtgcgaggaggccaggcccgcgcccgccgagccctagggccgctgctgccgacagccatggaggacgagcagcctgacagcctggagggctgggtgccggtccgggagggcctcttcgccgagcccgagaggcaccggctgcgcttcctggtggcctggaacggcgcggagggcaagttcgctgtgacttgtcacgaccgtaccgcgcagcagcggcggctgcgcgagggggcccggttggggcccgagcccgagcccaagcctgaggccgccgtctccccgtccagctgggccggcctgctctcggccgcggggctccgcggcgcgcaccggcagttggcggcgctgtggccgcctctggagcgctgcttcccgcggctgccgccggagctggacgtgggcggcggcggggcctggggtctggggctcgggctgtgggcgctgctgtggccgacgcgcgcgggtcccggcgaggcggcgctgcaggagctgtgcgggcagctggaacgctatctgggcgcggcggccgacggctgcggcggcgccacagtgcgcgacgcactcttcccggctgagggcggcgcggccgactgcgaaagcccgcgcgagttccgggagcgggccttgcgcgcgcggtgggtcgaggcggacgcgcggctgcgccaggttattcaaggacacggaaaagccaacaccatggtagcattaatgaacgtttaccaagaggaagatgaagcataccaggaattggttaccgtggcaaccatgttcttccagtacttattgcagccatttagggctatgcgagaagttgcaactttatgtaagcttgatattttgaagtctttggatgaggatgacctaggtcctagaagggtagttgccctggagaaagaagctgaagaatggaccagacgggctgaagaagctgtcgtctctattcaggatatcacagtgaattattttaaggagacagtaaaagcattagcaggaatgcagaaagaaatggaacaggatgcgaagagatttggtcaggctgcctgggccacagcaattcccaggttggaaaaacttcagctaatgctagctcgagagactctgcaactcatgagagcgaaagagttgtgtttaaatcacaaaagagctgaaattcagggaaagatggaagatcttccagaacaagaaaaaaatacaaatgttgtagatgaattagaaatacaattttatgaaattcaattagaactatatgaagttaaatttgagatattaaaaaacgaagaaatactgcttactacacagttggactctcttaaaagacttataaaagaaaaacaagatgaagttgtctattacgatccatgtgaaaatccagaggaacttaaagtcattgactgtgtggtggggctgcaggatgataagaatttggaagtgaaagaactcagaaggcagtgccagcagctggagtctaaacggggcaggatctgtgccaaaagagcctctctccggagtagaaaggatcagtgcaaagaaaatcatcggttcagattgcaacaggctgaagaaagcataagatactctcgtcagcatcacagtattcagatgaaaagagacaagataaaagaagaggagcaaaagaaaaaagaatggatcaaccaagaacgtcaaaaaacactccaacgattgagatcatttaaagataaacgcctagctcaatctgtccgaaacacctctggctcagaacctgtggctccaaacctgccaagtgatctttcccagcagatgtgcttgccagcttcccacgcggtgtcagtaattcacccgtcctctaggaaaactagaggtgttcccctatcggaagctggtaatgtgaaaagccccaagtgtcaaaactgtcatggaaatatccctgtccaggtttttgttccagttggtgatcaaacacattccaaatccagtgaggaattgtcactgccaccacctcctcctcctccaccaccaccaccgccgccaccgccgcccccaccccctcctctccgtgctctgtcctcatcctctcaagctgcaactcatcagaacttaggcttccgggctccagtgaaagatgaccagccacgtcctctagtgtgcgaatcacctgctgagcgaccacgtgactccttggaaagtttttcatgtccaggatctatggatgaagtgttggcctccttaaggcatggcagagctcctctccggaaggtggaagtgccggcggtgcgccctccccacgcctcaatcaatgagcacattctggctgccataaggcaaggggtcaaactgaagaaagttcaccctgatcttggcccaaaccccagcagcaaaccaaccagcaacagacgcaccagtgaccttgagaggagcatcaaggctgcgctccagagaatcaagagggtgtctgctgactctgaggaggacagtgatgagcaggaccctggccagtgggatggttaggctcaagtttgacaaaggcacctgccacagtaggcttgaataaagtgggtgagtcttagacctatcgaaaagcatactaacagggtgctgatagatgggccacataacaccccggaagatcagcagggccttgtgtaggctgctgcagcattttttttttttttcttttttgagatggagtctcactctgtcgcccaggctggggtgcagtggcgccatctcggctcaccgcaagctccgcttcccaggctggggtgcagtggtgcgatcttggctcactgcaagctccgcctcctgggttcacgccattctcctgcctcagcctcccgagtagctgggactacaggcgccaccaccttgcccaactaattttttgtattttttagtagagacgaggtttcaccgtgttagccaggatggtctcgatcttctgacctcgtgatccgcctgcctcagactcccaaagtgctgggattacaggtgtgagccaccacgcccagccttttttttttctttcttttgagacagaatctctctgtcatccaggctagagtgcagtggcacgatcttggcttactgcaacctccacctcccaggttcaagcaattctctgtctcagcctcccgagtagctgggattacaggcatgcaccaccacgcctggctaatttttgtatatttaagtagagacaaggtttcgctatgttggccaggctggtcttgaactcctgacctcgtgatccacctgccttggccacccaaagtgttgggattataggcatgagccaccgtgcctggctgatgctggagcttttatgtgacatggtgactcttaaaactggggagggacgtagagatgagagtttcacacaccagcccataggtgggatgtcaagacccatcggaagtgtcgctggcctaagagaagagcacttatttctcaccatggctgatctagaattgttccctgattctgaaagaagtttacactacactggtaagcagtactattagactactgactgtggccttctgtgcatatggaataatgatttctcagatttgtaggcttgaatgtgaatgttattttatcagtaatcagaataaattgcttatattcaggagttattttaaatatttaaatgaaatttattttaggcaccaagcactacataaactcataataactatttgcaatgcattagcatcactcacggggtaatgaaaacataccttagctgctgtaaaagcaaagtcttccgtgtccgggtgggctgaaagtttttaataaaattttagctaaacatttgtttaagtgaatactaa

SEQ ID NO: 1259 - DNA, 7000 bp, Homo Sapiens
  NM_001080453
gtttccgattccggggtggccgggtggcggcggcggcgctccggtcgcgatgggccagaggtgacgccgcagccgccgggagccgcgagggacggggcaggatgaaccgggccaagcccaccacggtgcgccggcccagcgccgcggccaaaccctcagggcaccctcccccaggagacttcattgctctgggctcaaagggtcaggccaatgaatcgaaaacggcgtccaccctgctgaagccagccccttccggcctgccttctgagcgcaagcgggatgcggcggccgcgttgtccagtgcctcggccctcaccggtctcaccaaacgccccaaactctcctccacaccccctctgagtgccctggggcgcctggctgaggctgcagtggcagaaaaacgagccatttctccgtcgattaaagagccatctgtggtgccaattgaagtgctgcccacggtgctgctggatgagatcgaggcggccgagctggagggcaacgatgacaggatcgagggcgtgctgtgcggggccgtgaagcagctgaaggtcacccgcgccaagcctgacagcaccctctacctgagcctcatgtacctggccaagatcaagcccaacatcttcgccactgagggcgtcattgaggctctgtgtagcctcctgcggcgggacgcctccatcaacttcaaggccaaggggaacagcctggtgtctgtgctggcctgtaacctcctcatggccgcctacgaggaggacgagaactggcccgagatctttgtcaaggtgtacatcgaggactccctgggggagcggatctgggtggacagccctcactgtaagacgtttgtggacaacatccagacggccttcaacaccagaatgccccccaggagcgtgctgctgcagggggaggcgggccgcgttgcgggcgacctgggtgcagggagcagcccacacccctccctcacggaggaggaggacagccagacggagttgctgatcgcggaggagaagctgagccccgagcaggagggccagctcatgcccaggtacgaagagctcgcggagagcgtggaggagtatgtcctggacatgctgcgggaccagctgaaccggcgccagcccatcgacaacgtctccaggaacctcctgcggctcctcacctccacctgcggctataaggaggtgcggctgctggcggtgcagaagctggagatgtggctgcagaaccccaagctgacccggccggcccaggacctgctgatgtccgtctgcatgaactgcaacacgcacggttccgaagacatggacgtcatctcacacctgatcaagatccgcctcaagcccaaggtcctcctcaaccacttcatgctgtgcatcagggagctgctgagcgcgcacaaggacaacctgggcaccaccatcaagttggtgatcttcaatgagctctccagcgcccggaacccgaacaacatgcaggtcctctataccgcactgcagcacagctcagagctggcgcccaagttcctggccatggtgttccaggacctgctgaccaacaaggacgactacctgcgggcctcgcgggccctgctgcgggagatcatcaagcagaccaagcacgagatcaacttccaggccttctgcctggggctcatgcaggagcgcaaggagccgcagtacctggagatggagttcaaggagcgcttcgtggtgcacatcaccgacgtcctggccgtgtccatgatgctgggcatcacagcgcaggtgaaggaggccggcatcgcctgggacaaaggagaaaagaggaacctggaagtgctccgctcattccagaaccagattgccgccatccagcgggatgccgtctggtggctccacactgtggtcccctccatcagcaagctcgcccctaaggactacgtgcactgcctgcacaaggtgctgttcacagagcagccggagacctactacaagtgggacaactggccacccgagagtgaccgcaacttcttcctgcgtctgtgctccgaggtgcccattttggaggacacgctgatgcgcatcctggtcatcgggctgtcccgggagctcccgctcgggcctgcggacgccatggagcttgctgaccacctggtgaagcgggcggctgccgtgcaggcggatgatgtggaggtgctgaaggtggggaggacccagctgatcgacgccgttctgaatctgtgcacctaccatcaccctgaaaacatccagctcccaccggggtaccagcctccgaacctcgccatctctaccctctactggaaggcctggcccctcctgctggtcgtcgccgcattcaacccagagaacatcggcctggctgcgtgggaggagtacccgaccctgaagatgctcatggagatggtgatgaccaacaactactcctacccaccgtgcaccctgacggatgaggagacccggacggagatgctgaaccgtgagctgcagaccgcccagcgggagaagcaggagatcctggccttcgaggggcacctggcggccgcgtccaccaagcagaccatcactgagagcagcagcctcctcctgtcgcagctcaccagcctggacccccaggggcccccccggaggcctccccctcacatcctggatcaagtgaaaagcctcaaccagtccctccgcctcgggcacctcttgtgccgcagccgaaaccctgactttctcctccacatcatccagcggcaggcctcctcgcagtccatgccctggctggcggacctggtacagtccagcgagggctccctggacgtgctgcccgtgcagtgtctgtgcgagttcctgctgcacgatgctgtggacgatgctgcttccggggaggaggacgacgagggcgagagcaaggagcagaaggccaagaagcggcagaggcaacagaagcagcggcagctgctgggccgcctgcaggacctgctactgggcccgaaggctgatgagcagaccacgtgtgaggtgctggactacttcttgcggcgcctcggctcctcccaggtggcctcccgcgtgctggccatgaagggtttgtcgctggtgctttcggagggcagcctgcgggacggggaggagaaggagccccccatggaggaggatgtgggggacacagatgtgctgcagggctatcagtggctgctgcgggacctgcctcgcctgcctctgttcgacagcgtcaggagcaccacagccctggccctgcagcaggcaatccacatggagactgatccccagaccatcagcgcctacctgatctacttgtcccagcacacgcctgtggaggagcaggcccagcacagcgacctggccctggacgtggcccggctggtcgtggagcgctccaccatcatgtcccacctcttctcgaagctctccccgagtgccgcgtcggacgccgtgctgagcgctctgttgtccatcttctcacgctacgtgaggcgcatgcggcagagcaaggagggcgaggaggtctacagctggtcggagtctcaggaccaggtcttcctacgctggagcagcggggagacagccaccatgcacatcctcgtggtccatgccatggtgatcctgctgacgctgggcccgcctcgagccgacgacagcgagttccaggcgctgctggacatctggtttccggaggagaagccactgcccaccgccttcctggtggacacatcggaggaggcgctgctgcttcctgactggctgaagctgcgcatgatccgttctgaggtgctccgcctggtggacgccgccctgcaggacctggagccgcagcagctgctgctgttcgtgcagtcgtttggcatccccgtgtccagcatgagcaaactcctccagttcctggaccaggcagtggcccacgacccccagactctggagcagaacatcatggacaagaattacatggcccacctggtggaggtccagcatgagcgcggcgcctccggaggccagactttccactccttgctcacagcctccctgccgccccgccgagacagcacagaggcacccaaaccaaagagcagcccagagcagcccataggccagggccggattcgggtggggacccagctccgggtgctgggccctgaggacgacctggctggcatgttcctccagattttcccgctcagcccggaccctcggtggcagagctccagtccccgccccgtggccctcgccctgcagcaggccctgggccaggagctggcccgcgtcgtccagggcagccccgaggtgccgggcatcacggtgcgtgtcctgcaggccctcgccaccctgctcagctccccacacggcggtgccctggtgatgtccatgcaccgtagccacttcctggcctgcccgctgctgcgccagctctgccagtaccagcgctgtgtgccacaggacaccggcttctcctcgctcttcctgaaggtgctcctgcagatgctgcagtggctggacagccctggcgtggagggcgggcccctgcgggcacagctcaggatgcttgccagccaggcctcagccgggcgcaggctcagtgatgtgcgaggggggctcctgcgcctggccgaggccctggccttccgtcaggacctggaggtggtcagctccaccgtccgtgccgtcatcgccaccctgaggtctggggagcagtgcagcgtggagccggacctgatcagcaaagtcctccaggggctgatcgaggtgaggtccccccacctggaggagctgctgactgcattcttctctgccactgcggatgctgcctccccgtttccagcctgtaagcccgttgtggtggtgagctccctgctgctgcaggaggaggagcccctggctggggggaagccgggtgcggacggtggcagcctggaggccgtgcggctggggccctcgtcaggcctcctagtggactggctggaaatgctggaccccgaggtggtcagcagctgccccgacctgcagctcaggctgctcttctcccggaggaagggcaaaggtcaggcccaggtgccctcgttccgtccctacctcctgaccctcttcacgcatcagtccagctggcccacactgcaccagtgcatccgagtcctgctgggcaagagccgggaacagaggttcgacccctctgcctctctggacttcctctgggcctgcatccatgttcctcgcatctggcaggggcgggaccagcgcaccccgcagaagcggcgggaggagctggtgctgcgggtccagggcccggagctcatcagcctggtggagctgatcctggccgaggcggagacgcggagccaggacggggacacagccgcctgcagcctcatccaggcccggctgcccctgctgctcagctgctgctgtggggacgatgagagtgtcaggaaggtgacggagcacctgtcaggctgcatccagcagtggggagacagcgtgctgggcaggcgctgccgagaccttctcctgcagctctacctacagcggccggagctgcgggtgcccgtgcctgaggtcctactgcacagcgaaggggctgccagcagcagcgtctgcaagctggacggactcatccaccgcttcatcacgctccttgcggacaccagcgactcccgggcgttggagaaccgaggggcggatgccagcatggcctgccggaagctggcggtggcgcacccgctgctgctgctcaggcacctgcccatgatcgcggcgctcctgcacggccgcacccacctcaacttccaggagttccggcagcagaaccacctgagctgcttcctgcacgtgctgggcctgctggagctgctgcagccgcacgtgttccgcagcgagcaccagggggcgctgtgggactgccttctgtccttcatccgcctgctgctgaattacaggaagtcctcccgccatctggctgccttcatcaacaagtttgtgcagttcatccataagtacattacctacaatgccccagcagccatctccttcctgcagaagcacgccgacccgctccacgacctgtccttcgacaacagtgacctggtgatgctgaaatccctccttgcagggctcagcctgcccagcagggacgacaggaccgaccgaggcctggacgaagagggcgaggaggagagctcagccggctccttgcccctggtcagcgtctccctgttcacccctctgaccgcggccgagatggccccctacatgaaacggctttcccggggccaaacggtggaggatctgctggaggttctgagtgacatagacgagatgtcccggcggagacccgagatcctgagcttcttctcgaccaacctgcagcggctgatgagctcggccgaggagtgttgccgcaacctcgccttcagcctggccctgcgctccatgcagaacagccccagcattgcagccgctttcctgcccacgttcatgtactgcctgggcagccaggactttgaggtggtgcagacggccctccggaacctgcctgagtacgctctcctgtgccaagagcacgcggctgtgctgctccaccgggccttcctggtgggcatgtacggccagatggaccccagcgcgcagatctccgaggccctgaggatcctgcatatggaggccgtgatgtgagcctgtggcagccgacccccctccaagccccggcccgtcccgtccccggggatcctcgaggcaaagcccaggaagcgtgggcgttgctggtctgtccgaggaggtgagggcgccgagccctgaggccaggcaggcccaggagcaatactccgagccctggggtggctccgggccggccgctggcatcaggggccgtccagcaagccctcattcaccttctgggccacagccctgccgcggagcggcggatccccccgggcatggcctgggctggttttgaatgaaacgacctgaactgtcaaaaaaaaaaaaaaaaaaaaaaaaaa

SEQ ID NO: 1260 - DNA, 2990 bp, Homo Sapiens
  NM_001080469
tgggggaaacccgcgtagccgagggagatgcagcgcgcggcgatggtggcatgtggagcctcccaccaccacctaggtcctgagatgcgctgaagcccagcctgtctgccatcatcccccagcatggaccgtgggagcctcctgcccttccagctatggtgcccccggccctttggcacctactcacagaaccagccacgcccgccttctgcggccctcaagccatcagcctgccctgagcctggtggcggggccgagccagaccatgggcctgcccactcagagaacacaccacccgccttggccactgaggtccctgcctcccagccggctccgctcctctcagcagcagctgctggtgatgagggtcgagtcctcctggacacgtggtatgtcatcaagcccgggaatacaaaggagaaggtggccttctttgtggcccaccagtgtggtgggggcagccgggccagctccatgaaggtcaaggggcactggggcagcgatagctccaaggccaagcggcggaggcgctgtcttgaccccaccaaggctcctcctgacccagggggccgggagggcccccctgctgctgaggagggccccgcctcagccggtgaggacgtggacctgctctctgtggccgagatggtggccctggtggaacagcgggcagccctggccctgcagagctacccacgaccgaccaccccagcgcctgtagtctttgtgtccgccgagcaaggtggaccggccaagggggtgggatctgaacggcggtccggtggtggggactgcagccgtgtagccgaggccgtggcccactttgaagcgcagagggacagccctcccaccaagggcctccgcaaggaagagcggcccgggccaggccctggggaggtgcgcatcgccttccgcatctccaacggccgggagccccgtgcaccagacagcggcctgcccagtgggggcgggggcaggcctggttgtgcctaccctggcagcccaggtcctggggcccgagccaaggacaagatcacatgtgacttataccagctcatcagcccctcgcgggatgccctccccagcaacgtggagttcctgctggccagggcggatgaggccagtgagggtgacagcccggcacccgccaggcctgaggacactcccccggcgccccctccgccccctgcccgggactgcggagcgtcaggcttccacgtggacgtggtggtgacgggcgtggtagatgagtgcatcttctttggcaaggacggcaccaagaacgtgaaggaggagactgtgtgcctgacggtcagcccggaggaaccgccgcctccgggccagctcttctttctccagaaccgcgggccggacgggcccccggagccacccccggccgactccccggccactgcgcccggcccagacgatgccgagggcacggcggacacctccctgtgccgcttgtaccggcacgtgtcgcacgacttcctagagatccgcttcaagattcagcggctgctggagccgcgacagtacatgctgctgctgcccgagcacgtgctggtcaagatcttcagcttcctgcccacgcgcgcgctggccgccctcaagtgcacctgccaccacttcaagggcatcatcgaggcgtttggcgtgcgggccacagactcgcgctggagccgagacccgctctaccgcgatgatccgtgcaaacagtgccgcaagagatacgagaagggcgacgtgtcgctctgccgctggcaccccaagccctaccaccatgacctgccttacggacgttcctactggatgtgctgccgtcgagccgaccgcgagactcccggctgccgcctgggcctccacgataacaactgggtgctgccctgcaatgggccaggcgggggccgggccggccgggaggaggggaggtgaagccgggggaggggaggggagagcccaccacgcccacccctcccctctccccccgggagccgagggtccggactgggccgcctgcccattcccctactccaggcagcattgatccctcaccggaactgagctggggttcagcaggggtgacccaggaaagccctctgcttgatcctgttgattttctactcttcagaaccagggccgtggaccctctgagaagggtgttttttttttttttatcagcatctcactttcttctccattcagccccaaccccctccctgccatgctttccaccccaaggacccaccagcagggagcagacggcagctaattttggtaccacttaagggtccccccattctggcccccatcctctccctcaccccaattctttctcgctggagctgttatttcccaagaagccgcatcgcccaaggttggcacctctcctaacctgccacacgacagctctcacctctctaggaattgggggctgtcaggtcacaggtgggatctggcatttttttatgacagtccatttctagatggtttgcctattaaagaagtgggggggaaatactgttttctccttaacctcaagctaccagtctctcctcttccgcgtagaggaagaggggggcagacaaaaaaaaagctgaagtataaaaaccctcctcctcccgttattatttaagctactgccatcaaccccacccccataaagctgtgaagccctttgcctcgcttttgacagcgtgggggggccccgtgggcagggacttcggatttgcatttctgggttgtttttccttccactctggggtctcgttcaggcattggggtctcctcaccccagccacatgtttctttaagaatcctttggtcaaccaggaccttgatttttcaggcattttggtctggggtatttttgtttgttctctctgttttttgttttcttttttttctttccatcgtggttctggaagcttctagcgtgtggcatctgaccaattttgaattggtcctttctataaaatcaatatttataa

SEQ ID NO: 1261 - DNA, 4866 bp, Homo Sapiens
  NM_001080471
ggctcgaagtggggaccctcgccccgtcctcggctgtccagtcctcctcctcgcagaccccggcggttcctaccccaggccgcaggggagacggggccccaaggcaggcctctgcaatgtcaccgcctctgtgtcccctccttctcctggctgtgggcctgcggctggctggaactctcaaccccagtgatcccaatacctgcagcttctgggaaagcttcactaccaccaccaaggagtcccactcccgccccttcagcctgctcccctcagagccctgcgagcggccctgggagggcccccatacttgcccccagcccacggttgtataccggaccgtgtaccgtcaggtggtgaagacggaccaccgccagcgcctgcagtgctgccatggcttctatgagagcagggggttctgtgtcccgctctgtgcccaggagtgtgtccatggccgttgtgtggcacccaatcagtgccaatgtgtgccaggctggcggggcgacgactgttccagtgagtgtgccccaggaatgtgggggccacagtgtgacaagccctgcagctgcggcaacaacagctcgtgtgatcccaagagtggggtatgttcttgcccttctggtctgcagcccccgaactgccttcagccctgtacccctggctactatggccctgcctgccagttccgctgccagtgccatggggcaccctgcgatccccagactggagcctgcttctgccccgcagagagaactgggcccagctgtgacgtgtcctgttcccagggcacttctggcttcttctgccccagcacccattcttgccaaaatggaggtgtcttccaaaccccacagggctcctgcagctgcccccctggctggatgggcaccatctgctccctgccctgcccagagggctttcacggacccaactgctcccaggaatgtcgctgccacaacggcggcctctgtgaccgattcactgggcagtgccgctgcgctccgggttacactggggatcggtgccgggaggagtgcccggtgggccgctttgggcaggactgtgctgagacgtgcgactgcgccccggacgcccgttgcttcccggccaacggcgcatgtctgtgcgaacacggcttcactggggaccgctgcacggatcgcctctgccccgacggcttctacggtctcagctgccaggccccctgcacctgcgaccgggagcacagcctcagctgccacccgatgaacggggagtgctcctgcctgccgggctgggcgggcctccactgcaacgagagctgcccgcaggacacgcatgggccagggtgccaggagcactgtctctgcctgcacggtggcgtctgccaggctaccagcggcctctgtcagtgcgcgccgggttacacgggccctcactgtgctagtctttgtcctcctgacacctacggtgtcaactgttctgcacgctgctcatgtgaaaatgccatcgcctgctcacccatcgacggcgagtgcgtctgcaaggaaggttggcagcgtggtaactgctctgtgccctgcccacccggaacctggggcttcagttgcaatgccagctgccagtgtgcccatgaggcagtctgcagcccccaaactggagcctgtacctgcacccctgggtggcatggggcccactgccagctgccctgtccgaaggggcagtttggagaaggttgtgccagtcgctgtgactgtgaccactctgatggctgtgaccctgttcatggacgctgtcagtgccaggctggctggatgggtgcccgctgccacctgtcctgccctgagggcttatggggagtcaactgtagcaacacctgcacctgcaagaatgggggcacctgtctccctgagaatggcaactgcgtgtgtgcacccggattccggggcccctcctgccagagatcctgtcagcctggccgctatggcaaacgctgtgtgccctgcaagtgcgctaaccactccttctgccacccctcgaacgggacctgctactgcctggctggctggacaggccccgactgctcccagccatgccctccaggacactggggagaaaactgtgcccagacctgccaatgtcaccatggtgggacctgccatccccaggatgggagctgtatctgccccctaggctggactggacaccactgcttagaaggctgccctctggggacatttggtgctaactgctcccagccatgccagtgtggtcctggagaaaagtgccacccagagactggggcctgtgtatgtcccccagggcacagtggtgcaccttgcaggattggaatccaggagccctttactgtgatgccgaccactccagtagcgtataactcgctgggtgcagtgattggcattgcagtgctggggtcccttgtggtagccctggtggcactgttcattggctatcggcactggcaaaaaggcaaggagcaccaccacctggctgtggcttacagcagcgggcgcctggacggctccgagtatgtcatgccagatgtccctccgagctacagtcactactactccaaccccagctaccacaccctgtcgcagtgctccccaaaccccccaccccctaacaaggttccaggcccgctctttgccagcctgcagaaccctgagcggccaggtggggcccaagggcatgataaccacaccaccctgcctgctgactggaagcaccgccgggagccccctccagggcctctggacagggggagcagccgcctggaccgaagctacagctatagctacagcaatggcccaggcccattctacaataaagggctcatctctgaagaggagctcggggccagtgtggcttccctgagcagtgagaacccatatgccaccatccgggacctgcccagcttgccagggggcccccgggagagcagctacatggagatgaaaggccctccctcaggatctccccccaggcagcctcctcagttctgggacagccagaggcggcggcaaccccagccacagagagacagtggcacctacgagcagcccagccccctgatccatgaccgagactctgtgggctcccagccccctctgcctccgggcctaccccccggccactatgactcacccaagaacagccacatccctggacattatgacttgcctccagtacggcatcccccatcacctccacttcgacgccaggaccgttgaggagccaggatggtatggcagaggccagcacacctggctgttgctgctcaaggctggggacagagcctagtgtacccctgccaggagcagggagtggaccggcaggctgtgaacatgaacaacgcttaacagagcaagtgatgggagccttgttcctgggttctaccatgggagacgctgatcagcaggatgcctggctccctttcccaacccactgctcccaaggcctccagggccctgtgtacataaactggtgggttggaagttgctgggtaactctgatttcagacatgcgtgtggggtaccttttctgtgcatgctcagcctgggctctgtgcgtgtgtgtgtttctgtgattttagaagggtaccaggcacaggttctgtcctagggcacttaccatttagtagggagatggaaccaacccaattaactctagcaatagcctcctaactggcctcctccattgattcagtgaaccttccaatgcatggctcataatttcaaaatacaggctggttagttactccctacctgaaagccttcataggtgcctctttgctcttctgccagtatcaaaacttttgaaggccttaaaggccctgctttgcctggcccatctgtctctccagcctcaccttgaactgtgttcctgtcactgcacgccagtcacaccggcctctaggtcctcctgtaggccactcttctttctggcacagggacctgcacacctggagtgcccttcctcccccactcgcctgttcacccctgcttttcctttacacctcctcctcagggaagtgcccaccctccgtacatctttcacagccctgattgcagctgtgttcactcaccaggtacctgcagaaggcctacagggtgccaggcacttctttaatgtgttctttctttatgtgattatttgattaatctctgcctcccccactagactgtaagctccctgaaggcaagaatcctgtgcttatgctcaatattagctctcccttggcacagagtaggcactcaacaaatgctccccaaaaggctgagtggctgactgaattaagtaccagtgacatgcagtaactgctaagatagatgagccatctgtatgctctgacagttacagactgaataagttggagacttccctaaagggtggcatttccccagggtaacaacgcagagctcaggtgtgggaaggtgccaggggcaggggtgcagaggggctgaggctgaggggggtgcagaggctggagaaaggataacaggagagagtatacaggcatgccttgatttattgcacttcacaggtagcagaatttttaaagaaattgaaggttttgggacatatatgtgacagcaataggttaagaaaagcaaagcagagaaattgaagatttgtgtcaacactgctttaagcaaatctgttggcaccatttttccaatagcatgtgcccattttgggtctctacattgcattttggtaattgcttgcaatatttcaagcattttcattgttattatatgtgttatagtgatctgtgatcagtgatctttgatatattattgtaattgtttcggggcgccatgaaccgcacccatataacacggtaaacttaatcagcaaacgttg

SEQ ID NO: 1262 - DNA, 3275 bp, Homo Sapiens
  NM_001080480
agcgccaaagccaagtttgcgcctcgagagtttgcgcctcgagagtttgcgccggttcgcattccccggcctcccgttcgctcccccgcgaaccaggcggccgtgcgcctctcggggcaaccacccaagagcacccgggcgggaggacgccgagcagggggtgttgcgggctgggacaggggcagccacctcccgaagatgcaggatggcagcagagccgcagccgtccagcctttcctaccgcaccacgggctccacctacctgcacccgctcagcgagctcctgggcatcccgctggaccaggtgaattttgtggtatgccagcttgttgctctgtttgctgctttctggtttcgcatctacttacgtcctggtacaaccagctctgatgtccggcatgcggttgccaccatttttggcatctattttgtcatcttttgtttcggctggtactctgtgcatctttttgtgctggtgttaatgtgctatgcaatcatggtcactgctagtgtatccaatattcacagatattccttttttgtagcaatgggatatcttacaatatgccacatcagccgaatatacatcttccactatggaattctcactacggatttttctgggcctctgatgattgtcactcagaagatcacaaccttggcattccaggttcatgatggattaggtcgaagagctgaagacctttctgctgaacaacatcgacttgctatcaaagtgaaaccctcttttttggaatacttaagttaccttctcaatttcatgagtgtcatagctggtccttgtaacaatttcaaggactacatagccttcattgaggggaagcatatacacatgaagttgctggaggtgaactggaagcgaaaaggtttccacagcttgccagaaccttctcccacaggagctgtgatacacaagttgggcatcaccttggtgtctctccttttgtttttgacgctaacgaagacctttcctgtcacctgccttgtggatgactggtttgtccataaagcaagctttccggctcgactctgctacttatatgttgtcatgcaagcctcaaagcccaagtattactttgcatggacattagctgatgcagtgaataacgcagctggctttgggttcagcggagtggataagaatgggaatttctgttgggatctgctttcgaacctaaacatctggaaaattgagactgccacaagtttcaaaatgtacttggaaaactggaatattcagacagctacttggctaaagtgtgtgtgctatcagcgggttccatggtaccccacggtgctaaccttcatcctgtctgctttgtggcatggtgtctaccctggatactattttaccttcttaactggaattcttgtcacattagcagctagagcggtcaggaacaactacagacattacttcctttcttcaagagctctcaaggctgtgtatgatgcaggcacctgggccgtcactcagctggctgtctcttacacggtagcaccctttgtgatgttggcagttgaaccgaccatcagcttatacaagtccatgtacttttatttgcacatcataagtctcctgataatactatttctgccaatgaaaccacaagctcatacgcaaaggcggcctcagactctgaactctattaataagagaaaaacagattgatacctccaagagaagcggaacaagcaaaactgcagaacgttcgaaagatgagatgacaaggcttcaagggctcctccggtggcttagaggcgatgtttacatgcatctttattttgttcttttttaaagtgcagggagtatttttttttttttttttttttttttttttttgagacggagtctcgctctgtcgcccaggctggagtgcagtggcgggatctcggctcactgcaagctccgcctcccgggttcacgccattctcctgcctcagcctcccaagtagctgggactacaggcgcccgccactacgcccggctaattttttgtatttttagtagagacggggtttcaccgttttagccgggatggtctcgatctcctgacctcgtgatccgcccgcctcggcctcccaaagtgctgggattacaggcgtgagccaccgcgcccggccgggagtatttttataaagcctttttgtacagattaatcggccatgtccaggttattggttttgatattttataggacatttgagtggtgtggcgatgtgtagagaatgtgccagagctgcagagacagtccattctgggctgctggctttttgcccttcctgcatgatttccagctactgtgacctggatgctgggaacccaggcatcggctccaaaaattagaaggcgagtgctgagaagacttgtcacaggtttctcaaatcagaatatactcagtcatagtggttccctgggaagccccagaccctttgacttgtgacattactggtttgcagacataataactacactcagaggaccatggaggcagagggatcatggtttcagggcactgaaaactctacgagccaagaggactagtgcatggactgaaagtcaggcatgccctcaaataggctgtattttctttccaggaatgtaacctttcccctttttcttctgacctgagccaagattggaaatcagaaagtctcctgtacatggagctgaagaggggctgctgttttccgaatgttttccatttcacaggcgccacctgcttgcccggggttggtcttgagaagacacccaaatgttcatgcctcagaaaggcagcagaatgccttttaggaaatttttttaaagtaatttgaagttatatagaagtttggtaagaagaagcagttgtttctctcttttctccctcatttcatggaggtgttaatgatcatggctggccgtgatgtacacatgggctgattttcattttttcagtttcatagctgagaaattcagctttgttttagttgaatcatcatattggaaagcagacattgaaagttttcttttctatctttgttatgaatgtgctatggccccttttggagacttctattgggtaatattctatgtgagagaaggaaacttggtattaaatgttgtggaaaataataatgatgataataataaagtatatgctgcaatggtgtactgccaatcagattgcttgggagaagaaaatttattcaaatccaacgataaaaaattaatttcttattgaataaacagtatgttcccatataaaagaaat

SEQ ID NO: 1263 - DNA, 6320 bp, Homo Sapiens
  NM_001080485
aaacgcgccgcggggctgttagctcggctgggcacgggcggctccgtggcgcttcctgccacgccaggcctgcctgggccgcgccagcgccgctccaccgagggccgcgcgtcggccgccgccgggcctggatggggccttacctgccaggctgatcccttggagtagttctgaggcatgatgagtcatccgtgtgtgtctcttttgggcgttcctgttttaaatcctgccttggtccctcacctggcacaaggacaagtgctactggtgtcagacccatcgcccaacactgatcctgctaagtactctgaaagcacctccgcgacccgacaccagatgaagggggaagatgcccagccacaggagatggcgtccacaagcttcccaagggccagtggtcccagtcctgaattcagacagcacggggactctgacgggaagagagggagcccacagaatctgcccatagaacatcattttgcttgtaaagagtgtggggacacctttcggcttaaagtcctgcttgtccagcaccagagagtccacagtgaggagaagggctgggaatgtggcgactgcgggaaggtctttaggggggtggcggagtttaatgagcacaggaaaagccacgtagctgcggagccccagcccggccccagtagggccctggagaatgccgcggagaagagggagcagatggagagggaggcaaagcccttcgagtgcgaggagtgcggaaaacggtttaagaagaatgcaggcctgagtcagcatctgagggtccacagcagagagaagccctttgattgcgaggaatgcgggcggtcgttcaaagtcaacacccacctcttccgacatcagaaacttcacacttcggaaaagcctttcgcctgcaaggcgtgcagcagggatttcctggatcgccaggagcttctcaagcaccagcgcatgcacactggccacctgcccttcgactgcgacgactgcggcaagtccttccgaggggtcaacgggctggccgagcaccagcgcatccacagtggggccaagccatacgggtgtccccactgcggcaagctcttccgaaggagctcggagctcaccaagcaccggcggatccacacgggcgagaagccctacgcctgcggccttccgtgggccctctgacctcatcaagcaccggcgcatccacagcggactgaaaccctatgagtgcgacaaatgcggcaaggccttccgccggagctccggcctcagtcgccaccggcggatccacagtggggcgcggcgctgcgaatgcagccagtgtggccgcgtgttcaagaggcgctcggcactgcagaagcatcagccaacccaccacgagtagaaacgccctgtggtcccgcgggacagggacggagtccccagaggggatggcagagtcaaaggagatgaacagttttgtagcgcttatatattttgtcttccaaaaggttgagaccgatttatactgccaccagcaatttataagtgttacgttatgcccatcaagagtagcttgtaccatttaacttagtttggctagtttaactggtaggaagtaccatcaaggtatttcagtccacatgccttgaatccaagaatgagagaggacaaatctggatgtggggtagggaggggcttagaggtcatcaactccaagctccccccgccccagagaaacacacagagctgttccacgatggcgtcctcataatgtgatcccagctttcctgaagagaacgttgccctcatgatttttggcctacttgaatttataaatttttagggatgtaaatagaacactcaaatgtcttaaaatatttaatttattaatttagttatacatacatactgtaaatcacatattatataaaataatatattaatttagaaaataccccatttttgccaccctccctttcacgaaatcattttactctgactcctcaccgtcttcaccaacatgggaaccctgtttgagtcatcagacagtttcaagacacacccagtcacttccatccgagctctgcacggtcgctcagtgacgatcccttcatgaggctctcattagaaattttctcccaagccataagaccatatttgcagaacattaggacgatttctcttgtcgttttttaatctgtcctgtgactgtacaatataaccacttaaggtcatactttttcaaacaacctttaaacgtcttttcttttaaagcacccaaaatgtcattgtgaggccaaacgcctagtaacagttactgaatctgggttaaatgtcggtatctttttttcttaaaccatttcaatttggtgtcccctatacatatccaaaactagcatcgattggggttgttttgaactaatgggtcttgtcctcaagcagcactattttgttcaaaataaaatagttgagagcatgcccctaagaagagatacatctcaaggactcaagtgcagggtgacgcctccttttggaaatgagcctctcctggtatcaggcctagatggtacttctccagccttccgtttcttgttctataaaacaggggtgatcacagcacctacctccgaaggttatcacgaggactgccatcgtggctgcagagtgccaggaccaccggcctggtatggaggtacacactcagtgaaggccatctgctgtcattgtcattgtcatagttattgccgtcattctgtggcttgtcaattccagaactggggatagaccccaggcctcctgaccaccagtctcatctttctcttatgcgatgacttaaatggtgtttctgttttttgcatgcaaatggtccgttcatctcctttgactagttatcaacttaccttcggatatattaactttatgtagcagttctttctatattgatggtgatgttctcttttccaattttattgctttgctttttgtagcagttttattacgtttttgttgtgaaagcttttaatttttacatatccaagcattcattttttgtccactcagtcataactttcattgcttctgtagctagatatgatgacattttctctagaattttaattacaaacaaaaagctgcaaccccagcccatcagaaggtgagtacaccaggtgggcaggctggatggaaatgggccagagaagcaggctctttcctcatccgagatgcggactccctgtctatctgtgggcaccacttgactatccaacctgaccactgcggcacactggagatgctcccatcatagattagccagaactctgtgactgctcatcattatagaccccgccagcagcagtggggcttggcctcacctagatcaatggagtggtccaaacttggtctgggagcaagcagcccagccatcctttgagctcctgggagccttggcaatgctccgagtggattcagtgactgagcagcagattcacccaagaaacatctccttggacacaagaagacttgcctagaccacatcctcctttcagccggtgactctagaactagaaagagattggttcataggcttctgctgtgggcagctaggggaaaattcacccatgtgttctggcatcacttcctatagccacacctaagtgagggcaacagagcagaggctcggagaggaaccctgcccctccgatggcttgtgcgttatgctgatagaagctggcagcactgccctgggctatgatttgcaacagccatgcccaggaggagcactaaagcaaaggtttggagggcagtggaacccttctgaaagcctgtgtggcatagaagtagaagctggtcctcctgggtctgagctaccatttccagtgggctcccccaagaggaacagcagcaagggctagcgaggaacctgcccctccagtggcccacagaagccacagatagaagccagccccaccagggctgtgctgtgacttcccagcagctgtggctggggacagggacactaggagggcctggcaaggaagtgtgcccttctcgtgggcccaccaaggctgaggcagagcttcctagcagacacaacttggaagggcttctcaggcacccatcctgacccccaggctggagaggagccaaaagcacttgttacatagtgattccttttgccctgtgggcctcagttcttgcagtagttgtgaatctgtgtctgaaatcactactttcttctcggatcctttttctcttttcgagttgttaggatgtgttttgtacagctgtcatttgataaagaaggttgacctctaccaggggcaagtctggcacctttacctagaagtactctgccatgtcttgcccgttcatttatcgtttgttgggtttcatgagggatcccattgaagtagatcccttttatgaagggatcccattgaatgcagcattaactcagaacgtagcataaagtcgtcactgctcccagctgggacgtggtgtcttggcatcccttcctgccgtccttgactctttcccatcttcagttctataattttctcccaaacaaatgctcttttagagttaacactaaagatctggtctttgccgtcaaggttgacagaacagctgttcatggtgtttgcggtgaaacccgtgttctctttcaatgcagtctgtggctttaacgtgtgtcctgtaatttcgccaagatcatttcttgcctctggtaacttgggggtggatttccttgggctctctaggtgtactgctatgtcagatgcaaaatgtcacccagcttcctgtcacatatccttgtctgtgcattcatgcatctacctcattccggttttctttctaatctcatgtattcctgttgtgaggaaatgtgttcttttcccgatccttttgtagttcatacacatgacaattgggtttccacgcacgtgcatgagatgttcctccttcaaaccttgttactatgtcagcacattaactgcctggcatggaaaaagaaaaaaaaaaaagaaatatgttcttttcctaccatttgaaaaaaatcctccattgcttttattagagttttgaatacttgtgaaaattttcaaaagaaagtaattgattaccatttttgctgcttattacgatgagctgtgtccattagctgtgtcaccccactcttgcatttccagaatagtccctacccaattgcagcgggcatgtttttgagtggtgttgcattccatgtgcttgattttgtcctagaactggcacagcgcctgccctacctgcagccctgggttgtggccctgttgcgtaccatgtgatttgccaccccgcttctaggccatattaattcagccagaactgaacacctgacccaagggcagcaagcaatcatcagagcatagagctgacagaacatgatggaccacggacaccaccaggccttccagatctgaaatgcaaacaaggaaacagaagcttctaggcatcagaaggtgtggggagcagcacagtactcagaggagtgaggagcgtggcgcctgctgggaggaaggcctggccatggtatgttcttggatttctggcagcagccctcattggtccacgtgcgtccccactacagactccttgacttgagccagcttgagtgggtctctactcttttctattgtgttttgccacttggctgcttcctggccaagtcgcacctgactgcatgaacacctgttcaaacgtgtgttctctgttctctaagatgggtgaaagtcgatgccttctagtctcagtgaatttaacctgtgattttatgtctacgtatattgttcctttactgaacccaccacatgcgggccataaaatgagtgaaatcacagtgcaccctgttctcttatttttgaagtgtttcacgatttccagcatgtccatcagatggggggattgctaacttctctcttactcatgtacttacattctgtagttctcattgcatcactttggatgtttactttgaaaagcagaaactgtctctttaaacttggccctcaatgtcatttgcgtatctctgagaacaatagctatgtcccaccccagtttgtatttccgttggttgttggcacttttttctcattcccccatctcattaccttgtctgttttctggcactcactataatcagccttgcactagagctgtttgtggacttggcttcaccccctcctcctcagccctcccccacccattaaattgtgagctcttagaagacaggggtggcctttcatgtctgatcccctaccaaatctagcacagtgccttgcatcaagtagatttcaataaatatatgttaaatggca

SEQ ID NO: 1264 - DNA, 2414 bp, Homo Sapiens
  NM_001080493
cctgcgctctgagtcctggctctggcgctgagagagagacgccctggaaggtctgtatcagcgtctgtcgcgctgggacccacactggcttttaaggaggacacccggacacctggaagctgggaaatggactcagtggcctttgaagatgtggctgtgaacttcacacaagaggagtgggctttgctgggtccatcacagaagagtctctacagaaatgtcatgcaggaaaccattaggaacctggactgtatagaaatgaaatgggaggaccagaacattggagatcagtgccaaaatgccaagagaaatctaagaagtcatacatgtgaaattaaagatgacagtcaatgtggagaaacttttggccagattccagatagtattgtgaacaagaacactcctcgagtaaatccatgtgacagtggtgagtgtggagaagtcgtcttgggtcattcgtctcttaattgcaacatcagagttgacactggacacaaatcatgtgagcatcaggaatatggagagaagccatatacacataaacaacgtgggaaagccatcagtcatcagcactccttccagacacatgaaaggccccccaccggaaagaaacccttcgattgtaaagaatgtgcaaaaacctttagttctcttggaaacctccgaagacacatggcggcacaccatggagatggaccttataaatgtaagttgtgtgggaaagcctttgtttggcccagtttatttcatttgcacgaaagaacacacactggagagaaaccgtatgaatgtaagcagtgttctaaagcctttcctttttacagttcctatctaagacatgaaagaatccacacgggagagaaagcgtatgaatgtaagcagtgttccaaagcctttcctgattacagtacctatctaagacatgagagaactcacaccggagagaaaccctataaatgtacacaatgtgggaaagccttcagctgttactattacactcgactacatgaaaggactcacacgggagaacaaccctatgcatgtaagcaatgtgggaaaacgttttatcatcacacaagctttcgaagacacatgataaggcacactggagacggaccacataaatgtaagatatgtgggaaaggctttgattgtcctagttcagttcgaaatcatgaaactactcacactggagagaaaccctatgaatgtaagcagtgtgggaaagtgttatctcatagctcgagctttcgaagtcacatgataacacacacaggagatggaccccagaaatgcaagatatgtgggaaagcctttggttgtcccagtttatttcaaagacatgaaaggactcacactggagagaaaccctatcaatgtaaacaatgtggtaaagccttcagtcttgccggttcccttcgaagacatgaagcaactcacactggagtgaaaccctataaatgtcagtgtgggaaagcctttagtgatctctcttcctttcaaaatcatgagacaactcacactggagagaagccatatgagtgtaaggaatgtgggaaagcattcagttgtttcaaatacctttctcaacataaaaggacccacacagtagaaaaaccttatgagtgtaaaacatgtagaaaagccttcagtcatttcagtaacttaaaagtccatgaaaggattcactctggagagaagccatatgaatgtaaggaatgtggaaaagcattctcttggctcacttgccttctacgacatgaaagaattcacactggagagaaaccctatgaatgtctacaatgtggtaaagccttcactcgttcccgtttccttcgaggacatgaaaaaactcacactggagagaagctgtatgaatgtaaggaatgtgggaaagcattgagttctctccgttccttgcatagacataaaaggactcactggaaagatactctctaaatgtatggaatgtgggaaaacattcagtactttaatttcagaaacttgaaagaactcactttggagatagaccctatgaatgtaaacatgggataaagccttaagtagtttcaatttttttaaatacagttatcccccaatatattgcaggggattggttccagcaccctctaaatccacagatgccaagtcctttgttatatggcatatttgcatgtaacctatgcatatcttccagtatactgtgtaaatcatctctagatgacttttaatacctcatgcattgtaaaagctatgtaaatagttgtttgattgtattgtttagagaatcatgacaagaaaaatagtctctacatgttcgatgcagacacaaccattgcaggcccacctacgtggtatatgtcacccagaacattaaaatttgttttaacattcaaaaaaaaaaaaaaaaaaaa

SEQ ID NO: 1265 - DNA, 6227 bp, Homo Sapiens
  NM_001080497
ggggccggccgcctgtcagagggaggtggcgatggtgcgcccggtggcggtggcggcggcggttgcggaggcttccttggtcggattgcaacgaggagaagatgactgaccaaccgactggctgaatgaatgaatggcggagccgagcgcgccatgaggagcctgccgagcctgggcggcctcgccctgttgtgctgcgccgccgccgccgccgccgccgccgtcgcctcagccgcctcggcggggaatgtcaccggtggcggcggggccgcggggcaggtggacgcgtcgccgggccccgggttgcggggcgagcccagccaccccttccctagggcgacggctcccacggcccaggccccgaggaccgggcccccgcgcgccaccgtccaccgacccctggctgcgacttctccagcccagtccccggagaccacccctctttgggcgactgctggaccctcttccaccacctttcaggcgccgctcggcccctcgccgaccacccctccggcggcggaacgcacttcgaccacctctcaggcgccgaccagacccgcgccgaccaccctttcgacgaccactggcccggcgccgaccacccctgtagcgaccaccgtaccggcgcccacgactccccggaccccgacccccgatctccccagcagcagcaacagcagcgtcctccccaccccacctgccaccgaggccccctcttcgcctcctccagagtatgtatgtaactgctctgtggttggaagcctgaatgtgaatcgctgcaaccagaccacagggcagtgtgagtgtcggccaggttatcaggggcttcactgtgaaacctgcaaagagggcttttacctaaattacacttctgggctctgtcagccatgtgactgtagtccacatggagctctcagcataccgtgcaacagttctgggaaatgccagtgcaaagtgggtgtcattggctctatatgtgaccgatgccaagatggatattatggctttagtaagaatggctgcttgccctgccaatgcaataatcggtctgccagttgcgatgccctcacaggtgcttgtttaaactgccaggaaaatagcaaaggaaatcactgtgaagaatgtaaagaaggattttatcagagtcctgatgccactaaagaatgtcttcgctgcccttgttcagcagtgacatctacaggcagctgctctataaaatcgagtgaattggaacctgaatgtgaccagtgtaaagatggttacataggcccgaactgcaataaatgtgaaaatggctattacaattttgacagcatctgtagaaagtgccaatgtcacggccatgtggacccagttaaaactccaaagatttgtaagcccgagagtggtgagtgcatcaactgcctccataacaccactgggttttggtgtgagaactgcctagaaggttatgttcacgacctcgagggaaattgcatcaagaaagaagttattcttccaacacctgaaggttctaccattttggtttccaatgcctctttgaccacatcagtgcccacccctgttataaatagtacttttacccctacaaccctgcagactatcttttcagtaagcacttctgaaaacagcacttcagctttagctgatgtatcatggacccaatttaacatcatcattttgacagtcatcatcattgttgtggtgctgctaatgggatttgtgggggctgtatatatgtaccgcgagtaccaaaaccggaaactcaatgcccccttttggaccatcgagctgaaagaagacaatatcagtttcagcagctaccatgacagcattcccaatgcagatgtttcgggattgttggaagatgatggcaatgaagtggctcccaatgggcagctgaccctgacgacgcccatacataactacaaagcctaaggagctagaactgttctgaattgttaaaccacagtgcttgctaagacagagtcagcccctgggccagacaaagcctggctagagtttgctgagaaagcaaaggcaaatagtgcatctgaaattttcaggtacaaatttgtaatgcgcttagcctatctattgctcttagttttcccatgaagatctgaagcgttcactgtcattaggacttgaagtaaagtatatttttgtaccaaaccacatgggagtatggaaaggctgaaccccatagtgcagcccaaaaccactttgacctccagatagactcctggggaagcattcaccaagccagtggtaacaagatgatgaatgtggagggggaaaagactgctggaagacttcatctccattcctgaaacattttttttaaaacagtgtcagggattatattcgttttactatacaaaaggacatcattgaggaaaagcttgtttctaggctgtatcacagtaaataatcttgattgtttctagaacaggggtagaaaagtcccaagatcttcagaagggcttggttttttcctcccaggattcttgctcagtgatgagttgaaagcacaggataagcttctaagggaggaaggcagcattggggagcaggaggctgatggtcctcctcagggtctcagtgtaaatgataaattgtctaaaaataaggaatattcctgcctctagagaaataaggtgtacatagttaatgtagcatatctggtcgacgttgtatttgtatctatttgtaaaaaaaaaatcatgtcatattttatcatctggaatttatttgtacagcagttaatggtgttgtaaaaagaaaaatatggggattgcttaaaatactgtaaaatagatggcaatattgctagagctgggactctggtgagcatccgtcatttttagtccttcttgaggacattgctgaaatttataagaggtcgaatgtttctttctttcctttctcagtctaaaagtagagttatatgctctttgacttactatgattcaagcaatagattttgaagtcagtaatcgttaagctgggacataggatgcattctccaaaaacattaatctaattagacattagccaccctatatattttacatagattaatataaaacatatcctcattaaaaaatgtttttcttgaatgtaaaagatagtcttccaaaggatagaaatattttagttccaagagaaaagccatcatattacttgggatctgtagttttcatgcctatgaaatatttataatcctccctcaccccaaataaaaaatctcctacatgtgaacatagcctgtcactcatttgccatgaggtatgtgccatctccctgcagtgctatagttctcccattgtcttcctgtctggttaatgagcagctttgtagatgggtgtgtctagttagttcttgctttttgatggagttttttcctagaggccaactactgttgctctcgtttattatgatattgacattttgggttaagcaaggtgggtgggaaaggtggtcagatgttaaatataacttattaggaggaacagtgaactgtgaagtggttagaaaaaaaataaaaacttcttattagattagacctaggaaattcaagctgacccctttgcctaacttccctagagaaaaacctagaacttggtcatccctttataggagacccctaagttgttctcagggtttggagatgatgttctggagggagtacaagcaaataatctacttctggtaatctgagggtgctttgcgtatttggccattgctcagaagaatagaggttacattatattacattatatgaaaattatttagtttttctatagccctttgtagtttgcaaagcacttttccatatgtgtgtcctctcttccacaccatagccccctgaggaagtaattgttgtccccattttatagatgaaaaggctgaggcacagaggagctaaatatcttgttcaaggctatacaatgtgtgtgattattaggcttggaatcagggcctctaactctaaagcacatgttttttcaactatatgcagaaattgcctagccatggacacaagaaagctgggaggaagagttctacttgtggatgtttttaattttttttaaatatcaggagcaatccagggccatacagctatgaagcacttagtgaaaagaacacaagaagatttactaactgaagttagtattagtgattagaaaacaaaactgccagtttgtgcttcattaaggtgaactcatctctccaagcaggaagggaaaatttgctttccctagcagttgctgcatatgtgtgtacagactgcacaattctaagaaattgtgcaaaatggcatacctgtctttctcccagatacaccgccccctgccccccccaaaaaaggtcaggattaaaggtggtgagaagtgaacatttattaaacagaagttaaaccaatagagagaaaggaggtttgttggagtctaagaggattttgaccatgtagaaattccttgaaacagaccttaaaaggtattgaaaaattgaatcacaaagaaagtttacctttaaatacttgttaatggctcctagatcatggttataatttttctcaatgggaaaaaaagtcttaaaatttgttttaaataagatcctctaatgtctcgagctttttgattctggaaataatttgctttaaaatataaatcaatcagaaagtgatctaccactgaaatcattctaggaaactagcatgggatgcactgcacaatgttctttcctctaaaggcatgggccccataaactgtggcatctggcagcaggatgccatcagtcctttagaaagcctaattttgggccgggtgcggtggctcacgcctgtaatcccagcactttgggaggccgaggcgggtggatcacaaggtcaggagttcgagaccagcctggtcaacatggcgaaatcccgtctctactaaaaacacaaaaattagccgggtgtacgtgcctgtagtctcagctacttgggaggctgaggcaggagaatcacttgaacctgggaggcagaggttacagtgagccgagatggcgccatttcactccagcctgggcgacagagcaagactctgtctcaaaaaaaaggaagaaaaagaaagcctaatattgggagaatgtttgtgtaaggattggaaatctgtttatttttaaataagatagcactgatgtgaatcttatttggaaattacagatactgccattaagcgatgcttttatcttcattaattcattttggtaagcgcctatgcatttctgatggttaggtgccctaggtagtgttaagtatgtccgtgtcctcccttactcccctctcgctccctctaccctctatcccctagggttcttttattaatggaatttctccagttatagagaaaaaaatgacatttgaaaactaaagctcatttatattaatactaaggtcctgtgggcctagtgcgttactcttcccagtgatacctagattttaagagtagagaacagaggaaacatgggatgagaggagagaggttttttagacaacatttgtagacacctcaaattatatcactgttctctagcgccaatattcccaggtaaattgaccattaaagcaatactcactgacctactagtttattttggtcagctgagtaccatcaggatatttaaccctttaagtgctgttttgggagtagaaaactaaagcaacaatacttcctcttgacagctttgattggaatggggttattagatcattcaccttggtcctacactttttaggatgcttggtgaacataacaccacttataatgaacatccctggttcctatattttgggctatgtgggtaggaattgttacttgttactgcagcagcagccctagaaagtaagcccagggcttcagatctaagttagtccaaaagctaaatgatttaaagtcaagttgtaatgctaggcataagcactctataatacattaaattataggccgagcaattagggaatgtttctgaaacattaaacttgtatttatgtcactaaaattctaacacaaacttaaaaaatgtgtctcatacatatgctgtactaggcttcatcatgcatttctaaatttgtgtatgatttgaatatatgaaagaatttatacaagagtgttatttaaaattattaaaaataaatgtatataatttgtacctattgtaaaaaaaaaaaaaaaaaa

SEQ ID NO: 1266 - DNA, 2732 bp, Homo Sapiens
  NM_001080498
tctgaccacgtcctgcttcagagagattgttcccggcgtctcagtgctatggggagcaggttcctcctggtcctgctctcaggtctcactgtcttactggctctgccaggatcagaagccaagaattctggagcttcctgtcctccatgccctaaatatgccagctgccacaacagcacccactgtacttgtgaagatggctttcgggccaggtctggcaggacatactttcatgattcctctgagaagtgtgaagatattaatgaatgtgaaaccgggctggcaaagtgcaagtataaagcatattgtaggaataaagttggaggttacatctgtagctgtttggtaaaatatactttattcaactttctggctggtattatagattatgatcatccggattgttacgagaacaatagtcaagggacgacacagtcaaacgtggatatttgggaaaatctgagaagaaatggaagcagagaggactttgcaagaagggctactcaactaattcaaagcgtggagttgagcatctggaatgcgagttttgcttctccaggaaagggtcaaatttctgaatttgatatagtctatgaaaccaagaggtgcaatgagacaagggagaatgcttttctggaagctggaaataacaccatggatatcaactgtgctgatgctttaaaaggaaacctaagagagagcactgcagttgccctatcacttatcaatctcttggggatattctgaatgcatccttttttagtaaacgaaaagggatgcaggaagtaaaactgaactcttacgttgtgagcggcaccgtcggtttgaaggaaaaaatttccctctctgaacctgtgttcctgacttttcgccataatcagcctggtgacaagagaacaaaacatatctgtgtctactgggagggatcagagggaggccgctggtccacggagggctgctctcatgtgcacagcaacggttcttacaccaaatgcaagtgcttccatctgtccagctttgccgtcctcgtggctcttgcccccaaggaggaccctgtgctgaccgtgatcacccaggtggggctgaccatctctctgctgtgcctcttcctggccatcctcaccttcctcctgtgccggcccatccagaacaccagcacctccctccatctagagctctccctctgcctcttcctggcccacctcctgttcctgacgggcatcaacagaactgagcctgaggtgctgtgctccatcattgcagggctgctgcacttcctctacctggcttgcttcacctggatgctcctggaagggctgcacctcttcctcaccgtcaggaacctcaaggtggccaactacaccagcacgggcagattcaagaagaggttcatgtaccctgtaggctacgggatcccagctgtgattattgctgtgtcagcaatagttggaccccagaattatggaacatttactcactgttggctcaagcttgataaaggattcatctggagcttcatggggccagtagcagtcattatcttgataaacctggtgttctacttccaagttctgtggattttgagaagcaaactttcctccctcaataaagaagtttccaccattcaggacaccagagtcatgacatttaaagccatttctcagctatttatcctgggctgttcttggggccttggtttttttatggttgaagaagtagggaagacgattggatcaatcattgcatactcattcaccatcatcaacacccttcagggagtgttgctctttgtggtacactgtctccttaatcgccaggttcgaatggaatataaaaagtggtttagtgggatgcggaaaggggtagaaactgaaagcactgagatgtctcgctctactacccaaaccaaaacggaagaagtggggaagtcctcagaaatctttcataaaggaggcactgcatcatcatctgcagagtcaaccaagcaaccgcagccacaggttcatctcgtctctgctgcttggctaaagatgaactgacctggcaagtgccatggcaatgacccggaagttaccgctcctttccgtttgtctacagcgcccctgtggtcacacatagattggacaaatgccactatttctagctttcctgtgaaaagtctaggctcattcacctattttggctttttatgttcatagaaagaacaagacatttgggagaattcttagatccagagtccagtagtgtggcacgtgcaatgaagtgtcggaaggatgcattttaaagatggcgggcgggagaagtggattttcttcttgcagctactgccaccttgccagaaactcactaactggcatctggattcagctcatagttccctttctggcctctctgctgtattttatgctcccaaagatcttacattaacactccacattcacataattcaacaattttcatatggatcagtattaaagagggtgttgcattttgcaatacaaaaatgcattatcaggtgctggagaggatgtggagaaataggaacacttttacactgttggtgggactgtaaactagttcaaccatcgtggaagtcagtgtggcgattcctcagggatctagaactagaaataccatttgacacagctatcccattactgggtatatacccaaaggactataaatcatgctgctataaagacacatgcacacgtatgtttattgtggcatta

SEQ ID NO: 1267 - DNA, 954 bp, Homo Sapiens
  NM_001080501
accccggaagtcggctggccatggcggcgccttggaggcgatggcccacggggctgctagccgtgctgcggcccctgctcacctgccggcccctgcaaggcacgacgctgcaacgggatgtgctgctctttgagcatgatcggggccgcttcttcaccatcctcgggctgttctgcgcgggccagggcgtcttctgggcttccatggctgtggcagccgtgtcccggcccccggttccggtgcagcctctggatgcggaggtcccaaatcgtggccccttcgacctgcgctccgcgctctggcgctacggtctggccgtcggctgcggcgccatcggagccctcgtactcggtgctggtcttctcttctctctccggtctgtgcgctcagtggtgcttcgagctggagggcagcaggtgaccctcaccactcatgccccctttggcttgggggcccatttcacagttcctttgaagcaggtatcttgcatggcccaccggggtgaagtccctgccatgctacctctgaaagtcaaaggccgacgcttctatttcctcttggacaaaactggacacttccctaacacaaaactctttgacaatactgtgggtgcctaccggagcttgtgaagaaatgacctcaagtcactcacctctccaagaggaggataaaaactgaaccttggggagccaggtgtgttggttcacacctgttgtaatcccagcactttgggagggtgaggcaggagcactgctcgagcccaggctgggcaacatagcgagaccttgtctctatttacaaaaaaaaaaacaaaaaaaaacgccaatcttagaatggagtaacaaccagggtcacacaaggaggtcaagattcattaacaacaaataaaggagcagtcatccctagggcagctgcctaacagtacctctaagtttcaaaaaaaaaaaaaaaaaa

SEQ ID NO: 1268 - DNA, 1114 bp, Homo Sapiens
  NM_001080510
agttctgcgcgtgtgagtctctttcgccttgctccgggctttcttcgctcgcagcgcggcagggttatcaccagatctgggctttccccttcttgccgtcaggtgctacggccacgtggcccgcggcttcccgctcgcgcagtctggcagcccggagccttccgcggtcccccacccgcccggggcccaacgacgccctactgggcgagcacgatttccgaggacagggggtccgggcccagcgctttcgattctcggaggagccgggtccgggggccgacggggctgtcctggaggtccacgtcccgcaggtcctgcatctccagtatggaatgtatgtttggccctgtgctgtggtcctggcccagtacctttggtttcacagaagatctctgccaggcaaggccatcttagagattggagctggagtgagccttccaggaattttggctgccaaatgtggtgcagaagtaatactgtcagacagctcagaactgcctcactgtctggaagtctgtcggcaaagctgccaaatgaataacctgccacatctgcaggtggtaggactaacatggggtcatatatcttgggatcttctggctctaccaccacaagatattatccttgcatctgatgtgttctttgaaccagaagattttgaagacattttggctacaatatattttttgatgcacaagaatcccaaggtccaattgtggtctacttatcaagttaggagtgctggctggtcacttgaagctttactctacaaatgggatatgaaatgtgtccacattcctcttgagtcttttgatgcagacaaagaagatatagcagaatctacccttccaggaagacatacagttgaaatgctggtcatttcctttgcaaaggacagtctctgaattatacctacaacctgttctgggacagtatcaatactgatgagcaacctggcacacaaactatgagcagaccacttcagcttgagaatgcagtgggtctgaagatggtcaagtctgtttgccttagattttgatgtcacctagacaacacttaaactcatatgaaacaaaaattaaaatacgtattacaagtaaaaaaaaaaaaaaaa

SEQ ID NO: 1269 - DNA, 1638 bp, Homo Sapiens
  NM_001080523
atgggggacagagaggaatgtctctctaccccccaaccccccatgtctgtggtgaagtcgatcgaattagtgctgcccgaggatagaatctacctggctggctccagcataaaagggcaggtgatcttaaccctgaacagcaccctggtggaccccatagtgaaggtggagctcgtgggaaggggttacgtcgaatggagtgaagaagccggggcatcctgtgattatagcagaaatgttatttgcaacaacaaggcagactacgtgcataagacaaagacattcccagtggaggataattggttaagtgcaggcagccacacctttgacttccatttcaacttacctcccaggcttccttctaccttcaccagcaaatttggccatgtcttctatttcgtacaagcttcctgcatgggcagggaacacattttagccaagaagaggatgtacttattggttcaaggaacttccaccttccacaaagaaaccccattccagaaccccttgttcgtggaggctgaggagaaagtctcctacaactgctgccgccagggcactgtctgtttgcaaatccagatggaaaggaacaccttcacgccaggagagaaggtcgtcttcacaacagagatcaacaaccagaccagcaaatgcatcaagacggtcgtattcgccctgtatgcccacatacagtacgagggcttcacgcccagtgcagagcggcggtctcggctggacagcagcgagcttctgaggcaggaggccaacacccccgtgacccgcttcaacaccaccaaggttgtcagcaccttcaacctgccgttgctgctgtccgtgagcagcagcacgcaggacggtgagatcatgcacactcgctacgagctggtcaccaccgtgcacctgccctggtccctgaccagcctcaaggccaaagttcccatcatcatcaccagcgcctcagtggactctgccatctgccagctgtcagaggacggagtgttacccgtgaacccagatcaccagaattaagtgcccgaacttttaaatattaaaagctttattagtctctaccaggaggaagccctctctcttgcacaggtgactctcagaggagtcgaggagtgggcaacaggttgtctgcaacctccccaagctctagcggtttaggtatctgtgtctcccctccctagaactatcactgaatgcctggaatggacaaaggaaaccgggaaggtctcccaggacccaaacccggcataacctgccttttccaccctgagtctgccccagcctactggggtctcacagtgccaagaccaggggtcctacttggggagaattctcccctctgctaatgtctggttgtattggctgtcacaactgcaggggatcgggggagaagagtcttattggcgtggagagggtggaggccagggacgctgttcagcaccctgcagtgtccaggacggcccccacaatcaggaattgtttatcctgaatgtcaacagtaccaagggggctgagcatggtggctcattcctgtaatcccaggactttaggaggccatggctggaggatcacttgagaccaggagtttgagacaagcctgggcaacactgtgagacccccatctctaca

SEQ ID NO: 1270 - DNA, 440 bp, Homo Sapiens
  NM_001080525
atgaaggggatctgctcagacgccatccttgttctagctacctccatgtggatggcctttgcaattgacttcccccttcctatggcctctgaaagaggtcagctagacaaaacaatagttgaatgcctcaagaatgtaaataagtgctggtttttatcctacatcaagcccagtgaacctatttgtggcagtgaccaggttacctacagtagtgactgccatctgtgctccaaaattctatttgaagggcttaacataactaaactgtatgatggacaatgtgaaaactcttgaacgtacgacaaagaattataaaacctactgaatctccagattgccaagtgaaacacaatggttgcctcttcaaatatatcccctttaattactaatggttggatcaaactcgttgatttatgtcttcaataaatgattcttagcag

SEQ ID NO: 1271 - DNA, 6715 bp, Homo Sapiens
  NM_001080527
gggagtcagccagacccccatcctgacaaggcttgtggaactgctgactcaggatgtcggggttcaggctgggtgaccacgtgtggctggagcctccctccacccacaagaccggcgtggccatcgggggcatcatcaaagaggcaaagccaggcaaagtcttggttgaagatgacgagggcaaggaacactggatccgagcagaggactttggtgtcctcagtcccatgcaccccaactcagtccagggtgtggacgacatgatccgcctgggggacctgaacgaggcaggcatggtgcacaacctcctgatccgctaccagcagcacaagatctatacatacacaggctccatcctggtggccgtcaacccgttccaggtgctgccgctctacaccctggagcaggtacagctctactacagccgccatatgggcgagctgcccccgcatgtctttgccatcgccaacaactgctacttcagcatgaagaggaacaagagggaccagtgctgcatcatcagcggcgagtctggggctggcaagacggagaccaccaagctcatcctgcagttcctggccaccatcagtggccagcattcgtggattgagcagcaggtcctggaagccaaccccatcctggaggcctttggaaatgccaagacaatccgcaacgacaactcaagccgctttgggaagtacattgacatctactttaaccccagcggggtgatcgagggcgcgcgcatcgagcaatttctcctggagaagtcccgggtctgccggcaggctcccgaggagcggaactaccatatcttctactgcatgctcatgggggtgagtgctgaggacaagcagctgctgagcctgggcacgccctccgagtaccactacctgaccatggggaactgcacttcctgtgaggggctcaacgacgccaaggactacgcccacatccgctcggccatgaagatcctccagttctccgactccgagagctgggacgtcatcaagctgctggctgccattctccacctggggaatgtggggttcatggcttcggtcttcgagaacctggacgcctcagacgtgatggagacgcccgcctttcccaccgtgatgaagttactggaggtgcagcaccaggagctccgggactgtctgatcaagcacaccatcctcatccgaggggaatttgtcaccaggtccctgaacattgcccaggctgctgaccggagggacgcctttgtcaagggcatctatgggcacctcttcctgtggattgtcaagaagatcaatgccgccatcttcacaccaccagcccaggaccccaaaaatgtgcggagggccatcggcctcctggacatatttggctttgaaaatttcgagaacaatagcttcgagcagctctgcatcaacttcgccaacgagcacctgcagcagttctttgtgcagcacgtgttcaccatggagcaagaggagtaccgctcggagaacatctcctgggactatatccactacaccgacaatcggcccaccctggacctgctggccctcaagcccatgagcatcatctccctcctggacgaagaaagccgcttcccgcaggggacagatctcaccatgctgcaaaagctgaacagcgtccatgccaacaacaaggccttcctacagcccaagaacatccacgatgccagatttggcattgcccattttgccggcgaggtgtactaccaagcagaaggcttcctggagaagaaccgagacgtgctgagcacagatatcctcaccctggtttactcctccaaaaacaagtttctgagggagatattcaacttggagttagcagagaccaagctgggccatgggaccatccgccaggcaaaggcaggaaaccatctcttcaagtctgcagactcaaataaacggccctccaccttaggaagccagttcaaacagtctctggaccagctgatgaaaatcctgaccaactgccagccttacttcatccgctgcatcaaacctaatgagtacaagaagccgctgctgttcgaccgggagctgtgcctgcggcagctgcgatactcgggcatgatggagaccgtgcacatccgcaagtcgggcttccccatccgctacacgttcgaggagttctcgcagaggttcggcgtgttgctgcccaacgccatgcggatgcagctgcaaggcaagctccgccagatgaccctgggcatcactgacgtgtggctgcggacagacaaagactggaaagcggggaagacaaaaattttcctgagggatcatcaggacactctgctggaggtacagagaagccaggtgctagacagagcggcgctcagcatccagaaagtccttcggggctacagatacaggaaggagttcctgaggcagaggcgggcagctgtgaccctgcaggcctggtggagaggctactgcaacaggaggaatttcaagctgatcctcgtgggctttgagcgcctgcaggctattgcccggagccagccgctggcgaggcagtaccaggccatgcggcagaggacagtccagctgcaggccctgtgcaggggatacctggtgcgccagcaagtccaggccaagaggagggcagtggtggtcattcaggcccatgccaggggcatggctgcccggcgcaacttccagcaaaggaaggccaatgcgccgctggtcatcccggccgaggggcagaaaagccaaggcgctctccctgccaagaagcgcagatccatctacgacaccgtcactgacacggagatggtggagaaggtgttcggcttcctccctgccatgattgggggccaggagggccaggcctcgccgcactttgaggatctggaatcgaagacccagaagctgcttgaggttgacctggacacagtccccatggcggaggagcctgaggaggatgtggatggcctggccgagtacaccttccccaagtttgctgtgacttacttccagaaatcagccagccacacacacatccggcggcccctccgatacccgttgctttaccacgaagatgacactgactgcttggccgccctggtcatatggaacgtcatcctgaggttcatgggtgatctcccagagccagtgctgtatgccaggagcagccagcagggcagctcagtgatgcggcagatccatgacacgctgggcagggagcacggtgcccaggttccacagcacagtagatctgcacaggtggccagccagctgaacattggagaggaggcattggagcctgatggccttggtgcagaccggcccatgtccaacctggagaaggtgcacttcatcgtgggctacgccatcctgcggcccagcctcagggatgagatttactgccagatctgcaagcagctctcggagaacttcaaaacaagcagcctggcccggggctggatcctgctcagcctctgcctcggctgcttcccaccctcagagaggttcatgaagtatctactgaacttcatcggccaagggccggcgacctacggccccttctgtgccgagcgcctgagacgcacctatgccaatggggtgcgtgcggagccccccacctggctggagctgcaggctgtcaagtccaagaagcacatccccatccaagtcatcttggccactggagagagcctaaccgtccccgtggactcagcctccacatctcgggaaatgtgcatgcacatcgctcacaagcagggcctcagcgaccacctgggcttctccctccaggtcgccgtgtacgacaagttctggtccctgggcagcgggcgcgaccacatgatggatgccatcgcccggtgtgagcagatggcccaggagaggggcgagagccagcgccagtcaccctggcgcatctacttccggaaggaattcttcaccccctggcacgactcccgggaggaccctgtcagcaccgagcttatttaccgccaagtcctccgaggagtctggtctggcgagtacagcttcgagaaggaggaagagctggttgagctgctggcccggcactgctacgtgcagctcggcgcctcagcagagagcaaggctgtccaggagctgctgcccagctgcatcccccacaagctgtacaggaccaagcccccagacaggtgggcgagcctcgtcactgccgcctgcgccaaggccccatacactcagaagcaagtcacaccactggccgtgcgagagcaggtggtggacgccgcccgcctgcagtggccgctgctcttctcccggctcttcgaagtcatcacactctcaggcccccgcctgcccaagacgcagctgatcttggctgttaactggaaggggctttgcttcctggaccagcaggagaagatgctgctggaactctctttcccagaggtcatgggtctggccaccaacagggaggcccagggcgggcagaggctgctgctctccacgatgcatgaggagtacgagtttgtgtcacccagcagtgtggccatcgctgagctggtggccctgttcctggagggcctgaaggagaggtccattttcgccatggccctgcaggacaggaaggccacagatgacaccaccctcctggccttcaagaagggggacctgttggtcctcacaaagaagcaggggctgctggcctctgagaactggaccctcggccagaacgacaggacaggcaagacggggctggtgcccatggcctgcctctacaccatccccacggtcactaagccctcggcacagctgctgagcttgcttgccatgtcaccagagaagaggaagctggcggctcaggaggggcagttcacagagccacgtcctgaggagccacccaaggaaaagctgcacaccctggaggagttctcctatgagttcttcagggctccagagaaggacatggtgagcatggccgtgctgcccctggcccgtgcccgtggccacctgtgggcctattcctgcgagccgctgcgacagccgctgctcaagcgagtccacgccaacgtcgacctctgggacatcgcctgccagatctttgtcgccatcctccggtacatgggcgactacccttctcggcaggcctggcccaccctggagctcaccgaccagatcttcacactggccctgcagcacccggccctccaggacgaggtctactgccagatcctgaagcagctgacgcacaactccaacaggcacagcgaagagcggggctggcagctgctgtggctgtgcacgggcctcttcccgcccagcaaggggctgctgccccatgcccagaagtttatagacactcggagggggaagctgctggcccccgactgcagccgccgaatccagaaggtcctgaggacggggccccggaagcagcccccgcaccaggtggaggtggaggccgcagagcagaacgtctcccgcatctgccacaagatctacttccccaatgacaccagtgagatgctggaggtggttgccaacacacgggtgcgggatgtgtgtgacagcattgccaccaggctgcagctggcctcctgggagggctgcagcctcttcatcaagatttcagacaaggtcatcagccagaaggagggagacttcttctttgattccttgagggaggtgtctgactgggtgaagaagaacaagccccagaaagaaggggcccccgtgacgctcccctaccaggtgtacttcatgcggaaattgtggctcaacatatctccagggaaggatgtgaatgcagacaccatactccattaccaccaggagctgcccaagtacctgcgcggattccacaagtgttcgcgggaggatgccatccacctggcgggcctcatctacaaggcccagttcaacaacgaccggtcccagctggctagtgtccccaagatcctgagggaactggtgcctgagaacctcacacgcctgatgtcctcggaggagtggaaaaagagcatccttctagcctatgacaagcataaggacaagacagtggaggaggccaaggtggccttcctgaagtggatctgccggtggcccaccttcggatccgccttcttcgaggtgaagcaaacctcggagccttcctacccggacgtcatcctcatcgccatcaaccgacatggggttctgctcatccaccccaagaccaaggacctgctcaccacctatcccttcaccaagatctccagctggagcagcggcagcacctacttccacatggcgctggggagcctgggccgtggcagccgcctgctgtgcgagacctccctgggctataagatggatgacctgctgacctcatatgtgcagcagctcctgagtgccatgaacaagcagcggggctccaaggccccagccctggccagcacctagcagcggatgctggcgtgtctgctcaggcgcccttcccgacctctagcctggcggcaccttcccaggccctctcaacccagggcctgtccttggcgggcagccttccatgctgccccccatacaaagcccactcagccccgcaggcggccccctctgtcctgggcgctgcccagggaggccaaaagacgggcccagaatggggtcgggagtctcggacccccaggctattggtggatgactgactgacaggacacctcccaaccccaccccaccccaccagaatgttcaataaaaactcctggagcaggaga

SEQ ID NO: 1272 - DNA, 7011 bp, Homo Sapiens
  NM_001080530
ggggccactcggagtcgcccgagaagccactggaagggaacacctgcctctcccagatgcacagctgggctccgctgaaggtgctgcacaatgactccgacatcctcttccctgtcagtggcgtgggctcctacagcccagcagatgcccccctcggaagcctggagaacgggacaggaccagaggaccacgttctcccagatcctggacttcggtacagtgtggaagccagctctccaggccacggaagtcctctgagcagcctgttaccttctgcctcagtgccagagtccatgacaattagtgaactgcgccaggccactgtggccatgatgaacaggaaggatgagctggaggaggagaacagatcactgcgaaacctgctcgacggtgagatggagcactcagccgcgctccggcaagaggtggacaccttgaaaaggaaggtggctgaacaggaggagcggcagggcatgaaggtccaggcgctggccagagagaacgaggtgctcaaagtccaactgaagaaatatgtaggagctgtccagatgctgaaaagagaaggtcaaacagctgaagtgccaaatctttggagtgttgatggagaagttacagtagctgaacagaagccgggagaaattgctgaagaactcgcaagctcctacgaaagaaagctcatcgaggtggcagagatgcatggcgagctgattgagttcaacgagcgcctgcacagggccctggtagccaaggaagccctcgtgtcccagatgaggcaggagctcatcgatctccggggaccggtgcctggagatttgagtcaaacgtccgaagaccagagtttgtcggattttgaaatatcaaaccgggcgctgatcaacgtctggatcccctcagtgtttctccggggcaaagcagcaaatgcattccacgtgtatcaggtctacatccggataaaagacgatgaatggaatatttatcgccggtatacagagttcaggagtttgcaccacaagttacaaaacaagtaccctcaagtgagggcctacaacttcccacccaaaaaggccattggaaacaaggatgccaagtttgtggaggaacggagaaagcagctccagaattacctgcgcagcgtcatgaacaaagtcatccagatggtccccgagttcgctgccagccccaagaaggagaccctcatccagctgatgcccttcttcgtcgacatcaccccgcccggagagcctgtgaacagccggcccaaagcagcttcccgcttccccaaactgtcccggggtcagccccgggagacccgcaacgtggagccccagagcggtgacctctgacctcgacaaaaccgcagccacgggccctgtgcgtggcaccagctgcgtccaccccagccactgccgctggcccctcacctcagcgtgacaaccacgtccacctggtgatcctgagagcacacgattcccaacagttacacaacaccccgattaaactaatcagtcttcgagccgcatgataccgtgacccgagagaccaaggcagcacctcgctggagagactgggacacacagtccttctgcttctggggtctaccctgggctgcaagggctgttcctccacctttctgtagttcagggctggcaggagggtgggcaccaggtcaggctgggtgcgccatggttgagaggcaaaggtgatcccctatataggaaggttcatgcagagccagcctctccactctttcccacgtggggactagaatgactattagcctctccttttgctttttaaggttattacctggcctaacctagggatggctggctttgcgggggggggggggggggggggcatggttcctttcactgcattttccaccaacagtcattagacacctggcactgtcacagctcacttttccagagggatattcctgtggctttggcaaggagccattagtgatgtgcaacttgagttcagagaacttcccctacctcccccatggctggcttcaggaaggaccagtgccctccatagcctgaggccacctaggccctcgccaggcttggagtggggggactcagacatctggcccagccatcagcagcaacctagtaacccggcgtcatccagcgtgtccaaagtagcattggccctacagtcatgagagacttgggtcagggaaccactgcagaaggttccagggttttcaaaccaggctccatgactatgaagttggacccagtgtggacacttaacagatcatgtgtctctccactaaaaacattttccatcccgtctgcccccgacattgtccttgataacagaactctgcatcccctaagacagagtcctctgttcctcccatgtcaggtggctctcagagtacagggaccttggcaggtggagaggaggatggggaccagcagctgggcagcccccagggctcctcctccagtgagctcacatcagagcacctcacagagcaatagccgtcctcagatgctcagcaaagttgtggcagtttgcatttctagggtaaactaactaggaaggatgtcgtgaaatggactatgcaagagtaagtttgtgtgtttcgccttaatctgaggcagagacacagcagaacctgaggagaaaagcaggtggaaggtgacggttagatggtaagccatgggcttgtcctggaactgcttcaactcagtggcttaaaatgagaactgcccaggtgagcatggagcatctcctaggctcgaggacatctctggagaatcatctggaaggtttatactgtgccttcccctcgtagcaaaaaggaagattgttcatggcctttaaggaaggctgagatcactcacacacagcgcccccccaccccagagaaaccgagtcagcctacatgacttccaaggggacctggggccagataagccctgccccggtgagaccaaatgagctggagcatgtatggaggtgcggaccctgcagtcagtttgcgagtgtggaggacccgagacatcctgtaaaggcaacttggtctccctcccactcacctgccaacattgctgcaatacacatggtttatctgaaattccaaggccagagtgcacatcagctcacatgactggcaactctaaatagagagccctaatggactgaggcaggaaacgtctaaaagctcaatctgctgtatgtcatgaccccttaggttgggtttatgccacatcggtcattttgaagtaggtgtttgatgccagctcagagactgtctcaggagtgcctccctggcctgggtagctaccctggaggtcatctccctgttctctgttggataaaggaacctcccccatctgtgacattcccttgggcccaggcttatgacctgcaccttttctgacacctgcccccaaagcacaggatgtgaattggtctctctccagataccccacgaggaagcaccttggacattctgcacatgataataatgcaacagtcccccattgctgagagatactaacccgtgagaaacaagtatgctctcagctggtattgaactggtgggagaaactgcctcctacttttataatactgaattattcacaaaaaacctggtctgctctccaaaatgagagcatgttcctgggagccacatggggaccatccccagctgcctgctcctggtacctcccccatgatcatgcacagaccgtagagtcgagtcatctcgcagatccagaccatctcctctcattctcactctaaaaatgctggtggcccgcacatgacagcaactccccgaagccttccctttggaatcccatagaatgttctgcaatgattgggtccatcttgctgctcagaagaatcccgtcctgctctctagtgtggtgggatgaacttcaggcaacaaacaactggcagggttcccagttcctggagttatggagcagaaacacccaggcctagcagaattgtggctgaaacctggtgcccaaattccacaccctggaaatgtgtcaactgcctgtcagcctggattcaattctgagggctaagccacgaccttatccatgagtggcgaagacacccctgaggaaaggattgcttgcacctcacatctgtcttcttctaagattactcggagattttcaaacaacatctgagaacagaagccccctcccctactcagagaggaacgagggtggcccacctctcaagggccttggattcctgggaccaccctttgctgggaggaagaatccacaccgaatccttctgtcttcatggcctgctgtgctgaaacagaacagcaggttccatctttcacatctttttttctcccccagatgaaagacgactcaggaacggtagggctgggcagaggtgtctctccttgagagacaacaaaagcttctaagggagggagcttaaaggctgctagaaacctagcccaaccatccactcctgatctgagacagaaccttctccgccactcttcctgcaatcagtgtgaaattccagcttctttgattcccacttagcagtatgctccaatcacgttgctggcaaggcattttagagtttggagctgaggttcaaagccccctgcatttctctactggcaggccctggtgaaggaagacactttcagggaagaggctcttacagtctatggtggtagccatcttcacatccagtcaccagttgcatctagggagctgctggctataaaagggatcatccagtggagttgtaaacaagggaaccatcttgcaagatctaggaagaggaaggggagggatgtggactgggtctgatcacagcccttggccctgcttcatactttggagcttattaagatcaattttgataaccatgtaatttcttagaaccatggcaggtagtattgtgctttaaaaaccagaggctcctgaaagtcgtttacaccaggtggattgataccatggctgtagctgatgcaactaacaagtactggggccagtgatcacaatccaggttggaaacaggagtgaagcccaccagcctgcctggttgatggacagcaggctctgccttctggaggcggcttatatcccaacagcctgaggcagggctctgtggcccaggccggcagtggctgcctctcttggttctgcatggtacattttgccaaccctgaggaccagttcttggggttccaggcctcggccttcctgctccacgtgctcaagcccccacagggggctgcgacaccatctggctcctcacagggaggtccagccatgttctctgggctcccagtgagccccctcccctccggctacccccagaatccatccttcattcctccaccaagctcctgtgtgagctgcagcacccacacgggggaagccctgcactccagcagcatcttccagccttggcacagaactgatggcaaaggaagggctgggttttcagcttctgggacccgaggaagaccccacctcactcctccttccccagtacatcagactggttaggaggcatcccagaaggggcagcctcatgcccaggtttcagccctaaaggtaatgattgtcttgactctgccttggcatttcgctcggaatcacggcagacttggagtgtttcttcaaggcaggcatctgcttatgagcaaggtcaaagatttttcaaaatattgtgcattaattcattaaagctactgttaaatatttgctgtttttagattggcgtccgtgctaattctgcagttgtagcactgtatattttatctcatttctgtgccaagaaagttcatctttatgtttttctaatacacaatcttgatcttgtttccaaaataaagcttcagctccttggtcaatagaagtaagggtgtagccatccagggtctcccggctctaggcagaccggatcccgcagttcatcccatggttgttgaaatgtacctcgatcagtcatctctggtattcctcactctagccatgagccattgccatcttatgggcccgatttgggtactctgaattatgtcatggagtagacagttacttctaaatcccagcaaccaagttgcgtatccttccttatagctagtttctatagagaagtgaaaaagaaatctggcttccttaataagatagttgagcctatgacattaaggagcagcgctgctggcggaagattctagattcactggtggtttaagaggcccagggatttagttcttactggtgcgtaagtgttttcccatcctaaccggaaaaccactcacccaggcttcccccacttcccctcaaattttctcagctctgccgctggtctccatgaacggcaaggggaaccaccactcattcactgtcagtgtaggtaagacagaggatgcccttgcaaaaattgggactgaggacagtagcacacggaatggtggatcgtacatttgcacccagagctactaaacgctcagtgaccccagagaccattaatttcccggagtgaaggggatgggggtagagctaattggaatttttattatccaggactcatcctaagaagaatgttggcctctcttcatccctggcttagccgtcaggtagaacgcttactcacctgacaccgacttcttagagaagcgagtcttttttgaatggaggagcgatggtaaccccactagggggcgcccatgatcggctcccagtgcacccccttaagggtaagcaggccacatatctagagtctgatagtctgtgtgtacataaggtctagaagtctgtggaaacgccctgaaacctgtagtattatcttaactaccctcttatgttaaggtttacataataggatttttaaacaaatgtgtttaattttttaagatctcttgtattaaaattttcttttggaataagctgtggaaattttgttacaacctggttgagatcaacctctttacaatgacacaaattgtgacattttataaattagatacttcagtggaaaaaaaaa

SEQ ID NO: 1273 - DNA, 8140 bp, Homo Sapiens
  NM_001080534
atggtggctaattttttcaagagcttgattttaccttacattcataagctttgcaaaggaatgtttacaaagaaattgggaaatacaaacaaaaacaaagagtatcgtcagcagaaaaaggatcaagacttccccactgctggccagaccaaatcccccaaattttcttacacttttaaaagcactgtaaagaagattgcaaagtgttcatccactcacaacttatccactgaggaagacgaggccagtaaagagttttccctctcaccaacattcagttaccgagtagctattgccaatggcctacaaaagaatgctaaagtaaccaacagtgataatgaggatctgcttcaagagctctcttcaatcgagagttcctactcagaatcattaaatgaactaaggagtagcacagaaaaccaggcacaatcaacacacacaatgccagttagacgcaacagaaagagttcaagcagccttgcaccctctgagggcagctctgacggggagcgtactctacatggcttaaaactgggagctttacgaaaactgagaaaatggaaaaagagtcaagaatgtgtctcctcagactcagagttaagcaccatgaaaaaatcctggggaataagaagtaagtctttggacagaactgtccgaaacccaaagacaaatgccctggagccagggttcagttcctctggctgcattagccaaacacatgatgtcatggaaatgatctttaaggaacttcagggaataagtcagattgaaacagaactttctgaactacgagggcacgtcaatgctctcaagcactccatcgatgagatctccagcagtgtggaggttgtacaaagtgaaattgagcagttgcgcacagggtttgtccagtctcggagggaaactagagacatccatgattatattaagcacttaggtcatatgggtagcaaggcaagcctgagatttttaaatgtgactgaagaaagatttgaatatgttgaaagcgtggtgtaccaaattctaatagataaaatgggtttttcagatgcaccaaatgctattaaaattgaatttgctcagaggataggacaccagagagactgcccaaatgcaaagcctcgacccatacttgtgtactttgaaacccctcaacaaagggattctgtcttaaaaaagtcatataaactcaaaggaacaggcattggaatctcaacagatattctaactcatgacatcagagaaagaaaagagaaagggataccatcctcccagacatatgagagcatggctataaagttgtctactccagagccaaaaatcaagaagaacaattggcagtcacctgatgacagtgatgaagatcttgaatctgacctcaatagaaacagttacgctgtgctttccaagtcagagcttctaacaaagggaagtacttccaagccaagctcaaaatcacacagtgctagatccaagaataaaactgctaatagcagcagaatttcaaataaatcagattatgataaaatctcctcacagttgccagaatcagatatcttggaaaagcaaaccacaacccattatgcagatgcaacacctctctggcactcacagagtgattttttcactgctaaacttagtcgttctgaatcagatttttccaaattgtgtcagtcttactcagaagatttttcagaaaatcagtttttcactagaactaatggaagctctctcctgtcatcttcggaccgggagctatggcagaggaaacaggaaggaacagcgaccctgtatgacagtcccaaggaccagcatttgaatggaggtgttcagggtatccaagggcagactgaaactgaaaacacagaaactgtggatagtggaatgagtaatggcatggtgtgtgcatctggagaccggagtcattacagtgattctcagctctctttacatgaggatctttctccatggaaggaatggaatcaaggagctgatttaggcttggattcatccacccaggaaggttttgattatgaaacaaacagtctttttgaccaacagcttgatgtttacaataaagacctagaatacttgggaaagtgccacagtgatcttcaagatgactcagagagctacgacttaactcaagatgacaattcttctccatgccctggcttggataatgaaccacaaggccagtgggttggccaatatgattcttatcagggagctaattctaatgagctataccaaaatcaaaaccagttgtccatgatgtatcgaagtcaaagtgaattgcaaagtgatgattcagaggatgccccacccaaatcatggcatagtcgattaagcattgacctttctgataagactttcagcttcccaaaatttggatctacactgcagagggctaaatcagccttggaagtagtatggaacaaaagcacacagagtctgagtgggtatgaggacagtggctcttcattaatggggagatttcggacattatctcaatcaactgcaaatgagtcaagtaccacacttgactctgatgtctacacggagccctattactataaagcagaggatgaggaagattatactgaaccagtggctgacaatgaaacagattatgttgaagtcatggaacaagtccttgctaaactagaaaacaggactagtattactgaaacagatgaacaaatgcaagcatatgatcacctttcatatgaaacaccttatgaaaccccacaagatgagggttatgatggtccagcagatgatatggttagtgaagaggggttagaacccttaaatgaaacatcagctgagatggaaataagagaagatgaaaaccaaaacattcctgaacagccagtggagatcacaaagccaaagagaattcgtccttctttcaaagaagcagctttaagggcctataaaaagcaaatggcagagttggaagagaagatcttggctggagatagcagttctgtggatgaaaaggctcgaatagtaagtggcaatgatttggatgcttccaaattttctgcactccaggtgtgtggtggggctggaggtggactttatggtattgacagcatgccggatcttcgcagaaaaaaaactttgcctattgtccgagatgtggccatgaccctggctgcccggaaatctggactctccctggctatggtgattaggacatccctaaataatgaggaactgaaaatgcacgtcttcaagaagaccttgcaggcactgatctaccctatgtcttctaccatcccacacaattttgaggtctggacggctaccacacccacctactgttatgagtgtgaagggctcctgtggggcattgcaaggcaaggcatgaagtgtctggagtgtggagtgaaatgccacgaaaagtgtcaggacctgctaaacgctgactgcttgcagagagcagcagaaaagagttctaaacatggtgccgaagacaagactcagaccattattacagcaatgaaagaaagaatgaagatcagggagaaaaaccggccagaagtatttgaagtaatccaggaaatgtttcagatttctaaagaagattttgtgcagtttacaaaggcggccaaacagagtgtactggatgggacatctaagtggtctgcaaaaataaccattacagtggtttctgcacagggtctacaggcaaaagataaaacagggtctagtgatccatatgttacagttcaagttggaaagaacaaaagaagaacaaaaaccatttttggaaatttgaatccagtatgggatgagaagttttattttgagtgtcataactccacagatcgaatcaaagtcagagtatgggatgaagatgatgatattaaatccagagtcaagcaacatttcaaaaaggagtcagatgattttctgggacaaacaattgtagaagtgaggaccttgagtggagaaatggatgtctggtacaacttagagaaaaggacagataagtcagctgtatctggggccatacgattgaaaatcaatgtggagataaaaggagaagagaaggttgctccatatcatattcaatatacatgtttacatgagaatctgttccattacttgactgaagtgaaatctaatggtggagtgaaaatcccagaagtcaaaggggatgaagcctggaaggttttctttgatgatgcttcccaagaaatagttgatgaatttgctatgcgttatggaattgaatccatttatcaagctatgacgcacttttcatgtctgtcttctaaatacatgtgccccggtgtccctgccgtcatgagcaccttgctggctaatataaatgctttttatgctcacacaacagtttcaacaaacatacaggtttctgcctcagatcgatttgctgctaccaactttggtagggaaaaattcataaaactactggaccagttacataactctttgaggattgatctgtcaaagtatagggaaaactttcctgcaagcaatactgaaagactgcaagacctgaaatcaactgttgacctgttaacaagtatcaccttttttaggatgaaggttctggagctgcaaagccccccaaaagcgagcatggtggtgaaggactgtgtaagggcttgcctggattctacatacaagtatatttttgacaactgccatgaactctactcccagctaacagacccgagtaagaaacaggatattcctcgtgaagatcagggaccaaccaccaagaatttggatttttggccccaacttattacactgatggttactattattgatgaggataaaactgcctacacacctgtcctgaatcagtttcctcaagagctgaacatgggaaaaataagtgccgaaattatgtggactctttttgctctggatatgaaatatgcattagaagaacatgaaaatcagcggttatgcaagagcaccgattatatgaatttgcatttcaaagttaaatggttttataatgaatatgtgcgtgaacttcctgccttcaaggatgctgttcctgaatactccttgtggtttgaaccttttgtcatgcaatggctagatgaaaacgaagatgtgtcaatggaattccttcatggagcactgggaagagacaaaaaagatggattccagcagacatctgagcatgctctcttttcttgctccgtggttgatgtctttgctcagctgaatcagagctttgaaattattaagaaactggaatgccctaatcctgaagcattatctcacttaatgagaagatttgcaaagactatcaataaagtgctgctccagtatgctgcaattgtatcaagtgatttcagttcacattgtgataaggaaaatgtgccctgtatcttgatgaacaatattcaacaattgcgggtccagctggaaaaaatgtttgaatccatgggagggaaggagctagattctgaagctagtactattctaaaagaacttcaggttaagctcagtggggtcctggatgagctcagcgtcacttatggtgaaagtttccaggttataattgaagagtgtataaaacagatgagtttcgaactaaatcaaatgagagcaaatggaaacaccacatctaataagaacagtgcagcaatggatgcagagattgtgttaagatctcttatggattttttggacaaaacattaagtctctcagcaaaaatctgtgagaaaacagtcctaaagcgagttttaaaagagttatggaagctagttctcaacaaaatagaaaaacaaattgttcttcctcctctgacagatcaaacaggaccccagatgattttcattgcagctaaagatcttggacaattatccaaactgaaggagcacatgattcgagaggatgccaggggtctgacgccaagacaatgcgctataatggaggtagtcctggctaccatcaagcaatactttcatgcaggaggaaatggcctgaaaaagaatttcttggagaaaagcccagatcttcagtctctgagatatgctctcagtctttatacccaaactactgatgccttgataaagaaattcatagatactcaaacctcacagagtcgttcctccaaagatgccgtgggtcagatatctgttcatgtggacatcactgccaccccaggaacgggagatcataaagtcactgtaaaagtgattgctattaatgacctaaactggcagaccacagcaatgttccgcccctttgtggaagtttgtatactgggacccaaccttggagacaagaagagaaaacaaggcacaaaaacaaaaagcaacacatggtcaccaaagtacaatgaaacatttcagttcattctcggaaaggaaaatcgaccaggggcttatgaacttcatctctcagttaaggattactgctttgccagagaagatcgaattatcggaatgacagtcattcagctacagaacatagcagaaaagggaagctatggggcatggtatcctcttctgaaaaatatctctatggatgaaactggtttgactatccttagaatactctctcagaggaccagtgatgatgtggctaaagaatttgtaagacttaaatctgaaacaagatctactgaagagagtgcttgaaacaaacactgcaagctaaatacataactataattgtttgactactgcatgcatgtgcaaatacatgggaatgtttagttcactacatttcaatgtttgccagtactcatgtacgatgtctacaaggtatgtaaaaaacctgctgaacttttataccaattctggtctttgggaaatcagtgttccatgaagtgccaaaattatgatgtaaagtgaaatatcaagaacaccttttaacatgtttattttgtttctttacccatttcacattcattaaacataatttttaaaaactagtcttttgagtttgcccatcagttgtctttgttaaatgagattatattgcccatagatcagaaaacatttattactcaatttccattttatttacttacctcattatagatgtcttacaaatacccttttctaccataactagaaatgcagtcacttctagaaagcatttgtaattttatagtcgcagatattgtgatttttgcatacacattaaaatagaaaaggtgggaaatattttctgctgaccagtttccaacctttctgaaatatcactgtgaagaaatgctgttaaagcaaacttacataaagcaatgctagagtttgttaacaatgtttgatatatattgacaaaactttgttctctaaaactgccaagatcacatcacatttgtaaaaatggtaagttaatgcatttgtcatatagtgttatgtcttggctttaccatatttcattctttaaaaagtcattaatggtttagaaatgggatggaaagtttactgaaaatacctgtaagtaactatattgttaatatcttccctctgacagttatgactctataatcagttcaatgctttatttttaaaaatattcaatgattagtattgaatgcagcattactatatattgtactgatgccaaaagtcatgttttcatccacttagtgaaaaaatagtaaaattaagtcggaagaaattgcttaaaattttgtaatttgtatttataagccccaaatgcatcaaatgcagtaggagaacaatgtaatacagcttggtacctaaaaatatagctaagttggtttttgaatataaaacagtttatgaatatgtgcattttctgtattgttatgatttgactttttagagtctatgccaaaatatatggctgtaaaacagtactttgtaattataacttatggtcataactgttagtggactacttacagaagcagaaacaagagcctgttatgattgtgctttgtgaacaagctgatctaatacgttaagtacagaagtgcttagtatcatgactgtcagaaccattctgcaactgagtatgaaatcacagaccagtgaggtgagctaattcatgttaaactgttaggccactgctttgttaatgactcctctaaatgcatagtgtgatgcgatcctctggcatatgctttaataaatggatgtatattgagcacatgcagca

SEQ ID NO: 1274 - DNA, 1881 bp, Homo Sapiens
  NM_001080540
aatgcgcccgccgtgtccgtggagagaggctgaggcagccaacctccggccccaggcaccggggcgccgggacggcgaaaatgtcgccttccttagtccgggcaactgcccgggctgtgagcaagaggaagctgcagcccacccgggcagccctcaccctgacaccttcagcagtaaacaagataaaacaacttcttaaagataagcctgagcatgtaggtgtaaaagttggtgtccgaaccaggggctgtaatggcctttcttatactctagaatatacaaagacaaaaggagattctgatgaagaagttattcaagatggagtcagagtattcatcgaaaagaaagcacagctaacacttttaggaacagaaatggactatgttgaagacaaattatccagttccaggaaagctcgtggaagctttggggctcactgcagaaatcatgtgactgtcacgtgctggaaaataaagtgatacatcttgaaaatgaagccagtgtgttggattccggaagaaatgatatttgtattctctgtaggggacaaaatgagaagtcatcactctttttggatcatttagatctcttgcatcctttgttttagaaccagtttcattaaagttgccttcctggacacctgtttatccctttcctgaactgtgtgcactccttagatcgctattgaatggcttgagcttccctcagcatttctcccaaccagatcggcgactcctaaaatccgagacaggacgtcctgactgctggtagtaatatggtggtgcattgttttttccacccgaacttaacatagcctttttatacatttttatgaaaaatttcattgtcagctgcctcattgtataccctttaatagtaccaggcaaagattttcttcaactatagtacagattagttctgagtgatggtatcaaaaggtgagaaagacgtcatccacctgttttttaatccatttcttttgccaccctatatgtctgttcagagatgggatctcaagctgactttgattcttttagttgaggagtctcttaaagccatctagcccacctccctcaattccctatgtgaggaaacaaaaccccagggaagccaaagggctcctctccaccctgactctacaggccgggggagagtagggactctacccctctctccccttccttgtaggtgacacatgctctgccctctgaggcagtcagcgaaggcaaatggtctgactgctttatgtggtcaacattttaatagaatttctttataatttgatacaggttatattatttttattttattttgagtgggaagaattttaaaacctttttatgtgaattacctcttgtttctttcacctttgaaacagtggtttgtaggagagatgacattgtagcaacccagaattctgcttttggaatgtggtcctcactgtgcaggagaacatggggatcttttgttaaaattcccagtgtgcatacactttctggttcctcggtccagttgctaaagttcttagtattttagcctaacatatttatcaccaacttttctttaaaagtgttccttttgtcacttagttactgattttcctgggtttgacatattaagtattctatgagatgatatatatgctttttttgaaagctgattctcatgaattcaagtagctgagttcctttatgtttagtttattcactaaagtagctggcacaaaacacaccaaaacctagagcaatagctttatgcaaatgctcatgagtttgtatcaataatatgattgttggatccacttataattcatgcaatactgtatgtatgtagagattgagttgtcaatttaaaaaaatgtgtcctctttgtgattaaaaa

SEQ ID NO: 1275 - DNA, 11425 bp, Homo Sapiens
  NM_001080541
gcgcgcgcgcaggctcttcagctggagcggacacacggtgtgcgaaccgaacagaataacccgcccccagcgggatgtgaaggactccgggtgaggccggccacgccccgcacggatgggaaggccattgtgactatgtggtgattacagttgtcttactactgagtttcctactgaaatcatggaggagaaacagcagattatattggctaatcaagatggtggaacagtggcaggagcagcacctaccttctttgtcatcttaaagcagccaggaaatggcaaaactgatcaaggaattttggttactaatcaggatgcctgtgctttggctagtagtgtgtcatcaccagtaaaatctaaagggaagatttgccttccagctgattgtactgtgggtggaatcactgttaccctcgataacaatagtatgtggaatgagttctatcatcgaagcacagagatgattctgaccaagcaaggaagacgcatgtttccttactgtcgttattggataacaggtttagattcaaatttgaagtatattcttgtcatggatatatctcctgtggataaccatcgttataagtggaatggtcgttggtgggaacctagtgggaaggctgaacctcatgttttggggagggttttcattcatccagaatctccttccacaggtcattattggatgcatcaaccagtatctttctataaactcaaacttaccaacaatacactggaccaagaagggcatatcatcttgcactctatgcatcgttacctgccgaggcttcatttggtgcctgcagaaaaggctgtggaggtgatacaattaaatggccctggtgtccacacttttaccttcccacagactgaattctttgcagtaacagcttatcagaacattcagattactcagctgaaaatagattacaatccatttgccaaaggctttcgggatgatgggctgaataataagccccagagagatggaaaacaaaagaacagctctgaccaagaagggaataatatttccagttcttctggtcatcgggtccgtcttacagaaggtcaggggtcagagatacaaccaggtgatttggatcctttgtcaaggggtcatgaaacatcaggcaagggtttggagaagacttcccttaatataaaacgagactttcttggtttcatggatactgattcagcacttagtgaagttcctcaattgaagcaagagatttctgaatgtcttattgccagcagttttgaagatgactcccgtgtagcctcaccgttagaccagaacggaagcttcaatgttgttattaaagaggaacctctagatgattatgactacgaacttggtgagtgcccagaaggggtcactgtgaaacaggaagagacagatgaagagacggatgtatactcaaacagtgatgatgatcctatactagagaaacagctaaagaggcacaataaagttgacaacccagaagctgaccatctatcttctaaatggcttccaagcagcccatcaggtgttgctaaagctaaaatgttcaaattagacactggaaagatgccagtagtctatctggagccctgtgctgtcaccagaagcacagttaagatttctgaactccccgataacatgctttccacatctcgaaaggataaatcttctatgttggcagaattggaatatttgcctacatacattgaaaattccaatgagactgccttctgcttaggcaaggaatcagaaaatggtcttagaaaacattcaccagatctcagagtggtacaaaaatatcccttactgaaagagcctcagtggaaatatcctgatatatctgacagcattagcacagaaagaatactcgacgattcaaaggattcagttggagactcactttcaggaaaagaggacttgggcagaaagagaacaactatgcttaagattgcaacagccgcaaaggtagtgaatgctaatcagaatgcctctccaaatgtccctggaaaaagaggaaggccacgaaaattgaaactctgtaaggcaggacgaccacctaagaacacaggaaagtctttaatttctacaaagaatacacctgtaagccctgggagtacctttccagatgtgaagcctgatctggaagatgtggatggtgttctctttgtttcctttgaatcaaaggaagctctagacattcatgcagttgatgggacaacagaagaatcttctagtctccaggcatcaaccacaaatgactcaggttacagagcaagaatttcccagttggaaaaggaattgatagaagatttgaagactttgcggcacaagcaggtgatacatcctggtcttcaagaagtgggcttaaaattgaattcagtggatccaacaatgagcattgatcttaaatacttgggagtacagttacctttggctccagctactagctttcctttttggaaccttacaggaaccaaccctgcctctcctgatgcgggatttccctttgtttctaggacagggaaaaccaatgatttcactaagatcaagggatggaggggaaaatttcatagtgcttctgcatctaggaatgaaggtggaaattcagaaagttcactgaaaaatcgttctgctttctgtagtgataagctagatgaatacttggaaaatgaaggcaagctgatggaaacaagcatgggtttttcttctaatgctcccacatctcctgtggtgtaccagcttcccactaagagtaccagttatgtacgaacacttgatagtgtactaaagaagcaatctactatttccccttctacctcttattctttgaaacctcattctgtaccccctgtctctcgaaaggcaaagtctcaaaacagacaggcaactttcagtggccgaactaaatcatcttataaatccattttaccataccctgtttcaccaaagcagaaatactctcatgtgattctaggagataaggttaccaagaattcttcaggcatcatctcagaaaatcaggcgaataactttgttgtgccaactttggatgaaaatatatttccaaagcagattagtttgcggcaggcacagcagcagcagcaacagcaacagggaagtcgccctccaggcttgtctaaatctcaggtgaagctaatggacctggaagactgtgcactttgggaaggaaaaccaaggacatacatcacagaagagcgagcagatgtatccttaacaactctacttacagctcaagcatccctcaaaactaaacctatccacacaatcataaggaaacgagcccctccctgcaacaatgacttctgtcgactgggttgtgtatgttccagtctagctttggagaagcgccaacctgctcactgccgccgaccagactgcatgtttggttgtacttgtttgaaaagaaaagttgtacttgttaaaggaggatccaaaactaagcattttcagaggaaggctgctcatcgagatccagtattttatgatactctgggagaggaggcaagggaggaggaagaaggaatcagggaggaggaggaacaattgaaagagaaaaagaagagaaagaagctagaatacactatatgtgagacagagcctgaacagcctgttcgacattacccattatgggtaaaagtagaaggtgaagtagatccagaaccagtttatatccccacgccttctgtcattgagcctatgaaaccattgttattgcctcagccagaagttttatctcctactgtgaagggcaaactgctcactggaattaaatctccacggtcatatactcccaaacccaatcctgtgattcgggaagaggacaaagatccagtctacttgtactttgaaagtatgatgacttgtgctcgagttcgagtatatgagcgaaaaaaagaggaccagagacaaccatcttcctcctcctccccatctccatcatttcagcagcaaacttcatgtcattctagccctgagaaccataataatgcaaaggaacctgattctgaacagcagcccttaaaacaactcacctgtgacttggaggatgattctgataaattacaagaaaagagctggaagtcttcctgcaatgaaggagaatcctcttctacttcttatatgcatcagaggtcacctggtggtcccaccaaactgattgagatcatctcagactgcaactgggaggaagatcggaacaagattttgagcatcttatcccagcacatcaatagcaacatgccacaatcacttaaggtgggcagcttcatcattgagttggcttctcagcgaaagagccggggtgagaagaaccctcctgtttattcttctcgtgtgaaaatctctatgccatcatgtcaagaccaagatgatatggctgagaaatctggatcagagactcctgatggtccattgtcccctgggaaaatggaggatatctctcctgtgcagacagatgccctggattcagtgagggagagattacatggaggcaaaggtctgcctttttatgcagggctttctcctgcagggaagcttgtggcctataaacgtaaacccagttcaagtacatctgggcttatccaggtagcatccaatgccaaggtggctgcatccaggaaaccacgtaccctgttgccttcaacatccaattccaaaatggcatcctcctctggcactgcaacaaatcgccctgggaagaatctgaaggcgtttgtcccagcaaaacggccaattgaaaatgctgctcaaattccagtggctactccacaggtctctcctaacacagtgaaacgtgctggacctcgattgttgttgattccagtgcagcagggttctcctactcttagacctgtctcaaacacacaacttcagggacatcggatggtcttgcagcctgttaggagtccaagtggaatgaacttattcaggcaccctaatgggcagattgtccagcttctacctttgcatcagcttcgaggctctaatacccagcccaacttacagcctgtcatgtttcggaacccagggtctgtgatgggaatccggttacctgctccttccaaaccctctgagactccgccatcttccacttcgtcctctgctttctctgtcatgaatcctgtaattcaagctgttgggtcttcttcagcagtgaatgttatcactcaggcaccatcattgctttcctctggagctagttttgtgtctcaggctggtacattgaccctgaggatttctcctcctgaaccacaaagctttgcaagtaaaacaggctctgaaaccaaaataacttatagctcaggaggacagcctgttggtacagccagtcttattcctctccagtctggtagttttgccttgttacagctcccaggacaaaagcctgttcctagctccattcttcagcatgttgcttcccttcagatgaagagagaatctcagaatccagaccagaaagatgaaacaaactcaataaaaagagagcaagaaacgaagaaggttctacagtcagaaggagaggctgtagaccctgaggctaatgtaataaaacaaaactcaggagctgctacctcagaagaaactctgaatgattccttggaagataggggtgatcatttggatgaagaatgccttccagaagaaggttgtgcaactgtcaaaccatctgagcattcctgtatcactgggtcacatacagatcaagattataaagatgttaatgaagaatatggggctaggaatcgtaagagttccaaagaaaaagtggctgttctggaagttaggaccatttctgaaaaagccagtaataagacagtccaaaatttaagtaaagtacagcatcaaaaacttggtgatgtgaaggtggaacagcagaaaggatttgacaatccagaagaaaactcaagtgaatttccagtcacctttaaggaagaaagtaaatttgaattgtcaggaagcaaagttatggagcagcaatctaatctacagccagaggccaaagagaaggaatgtggagactctctggagaaagacagggaaagatggagaaaacatctgaagggccccttaaccaggaaatgtgttggagcttcacaggaatgtaagaaagaggcagacgagcagttaattaaagaaacaaagacatgtcaggaaaattcagatgtgtttcagcaagaacaaggcatctctgacttacttggaaaaagtggaattactgaagatgccagagttttgaaaactgaatgtgattcttggagtaggatttctaatccttcagccttctccattgttcctaggagagctgcaaaaagcagcagagggaatggacattttcagggtcacttactgctacctggagaacagatacaaccaaagcaagagaagaagggtgggagaagcagtgctgacttcactgttttggatttggaagaagatgatgaagatgataatgagaaaactgatgattctattgatgaaattgtggatgttgtttctgactaccagagtgaggaggttgatgatgtagaaaagaataactgtgtagaatacattgaggatgatgaggagcacgtggacattgagactgtagaagagctctcagaggaaattaatgttgctcacctgaagaccacagcggcccacacacagtcattcaaacagccgtcctgtactcacatctctgcagatgaaaaagcagctgaaaggagtcgaaaggctccaccaattcctctaaaactgaagcctgattactggagtgacaaactacagaaagaagcagaagcgtttgcttattatcgccggacacacactgccaatgagcggcggcggcgtggtgaaatgagggatctctttgagaaattaaagatcacattgggattacttcattcttccaaggtttccaaaagtctcattcttactcgagccttcagtgaaattcagggactaacagatcaggcagacaaattgataggacagaaaaatctcctgactcgaaaacggaatattctgatacggaaagtatcgtctctttcaggtaagacagaagaagtggtcctgaagaagctagagtatatttatgcaaaacagcaagcactagaggcacaaaaaagaaaaaagaagatgggatcagatgagtttgacatatctcccagaattagcaaacagcaggaaggatcttctgcatcatctgtagatcttggacagatgtttataaataacaggagggggaaacctttgattctttccagaaaaaaagaccaggccacagaaaatacctcacccttgaacactccacacacctctgccaaccttgtgatgactccgcaagggcaattgctcaccctaaaaggtcccctattctcaggaccagtggtagctgtttctcctgatctcttagaatctgatcttaagcctcaagttgccggtagtgctgtggctctaccagaaaatgacgacttatttatgatgccacgaattgttaatgtgacatcattggccacagagggaggtttggtagatatgggtggcagcaaatatcctcatgaagttcctgatagcaagccatctgaccatctgaaagacaccgtcaggaatgaagataattccttagaggataagggtagaatctcttccagaggaaacagagatggcagagtgacgttgggtccaacgcaggtttttctggcaaacaaagattctggttatccacaaatagttgacgtttccaatatgcagaaagcacaagagttcttacctaaaaagatttctggtgatatgagagggattcagtataaatggaaagagagtgaatcaagaggggagagagtgaagtcaaaggattcttcatttcataaattaaagatgaaagatctcaaggactcaagcatagagatggaactgaggaaagtaacatcagctatagaggaagcagctcttgattccagtgaactgctgactaacatggaagatgaggatgatactgatgagacactgacttcactgctcaatgaaattgcctttcttaatcaacaactaaatgatgactctgttggcctggctgaactacccagctctatggatacagagttcccaggggatgctcggcgggcttttattagtaaggttcctcctggaagcagagcaactttccaggttgagcacttgggaactggtttgaaagagttgcctgatgttcaaggggagagtgactctatcagtcccctcctcttgcacttggaagacgatgacttttctgagaatgaaaaacaacttgcagaaccagcctctgagccagatgtccttaagattgttattgactctgaaataaaggattccctcctttccaacaagaaagctattgatggagggaagaatacttctggcctccctgcagagcccgaaagtgtgtcctcaccccccaccctacacatgaagactggcttggagaacagcaacagcacagacactttgtggaggcctatgccaaagttggcccctctaggtttaaaagtagctaatccttccagtgatgcagatggtcagagtctcaaggtgatgccttgtttggcacctatagctgccaaagttgggtcagttggacacaaaatgaacttaacagggaatgaccaggaaggccgggaaagcaaggtgatgcctacattggcacctgttgtggctaaattgggcaactcgggggcctcaccaagttctgcagggaaatgaacttacttgtccttaagcagaagccaggctgtgaggggaaatagatctcacctcctttctctgcaggcatctgtttgtttgtgtcttagaacttggatccttgacttcaatgatgcagtggataatgatgggagaaagggggtagggtgctgaccctggtataagaagtactctgaaattctgatcatgttaaaatgtgttacctcacttgtggtgctgggtcccctcatcctctctaagaagatgtgatccattactgaacatgaggtgcccctcttacccaaggaatttataacatgactctggctccacagtggtttctagttcttcccccacaagcgaaagagctgtttgcaactttggagttgctgtagactgaactgtagcttgtagctgttgaattaagtccaaaatctaaggaatgcgatggacttgtgcaaagggatccagaagagacactttttagttgatgtttcaagaatagggagagagaggatgggtaccatggaataccaaagtgaaggactttgtgtcattcagtaaaattttcttttttcatatcctaagtagctcccattccctcaccttttcaatcagaattaacaaattcaagccttcagtaaagtagggatgcttttaacttttattattaattattttgagatcttaaaaaaatagtagttctcccttattatttttgtgggcattgaaaagctcatttcacagtaccagagatttttactgggagtatatattttggaggtaggcatagagggagccctaccccttccacaaattacgttactcaagagacagctaaaataaaatgcattatctccccagaccagagacagtggccaaaataaaaaatcatggggctggaaatttcccaaatcaaaccagcctcctggtgcttgaaggtttcattcactattacctgcacaggatgtaaagaaaagtcacagtaggcactctttaccagggaaataaggcagtatttgaatcacaagatatattttttatctgcaaccatggatccaatgatctgtagagctttttcactcattaactgtcaggatatgaaggactgacagtctgtaaagatatttatatttttgtatagttgttttcatagatttctcaaaggctgaagttttcaacctagaagatgagatttgtattgagtatagaaatgatgtttcctatctagtttgtaaataatcatggtgcacttgaggggtctcttggaaactcctagggggtcaagaatcactattctgaaactgtatagactgggatttagctgctgcattttgcctttcttaaataattatattttggaatgtaacccctgttctgtcttcattgacaggatttgcttgtgttgttaaaacactaacacaagagcttccagtgcctgggccgtgcctaggtgatgctatttcttctatatctcctgtcttctttatcccaaatcccactcagcatatcttcagacctaggttgtaagaccaactttggattggatctagccagtgaattattatttccatggttggttccctttctgttaactctggtaatcaacagattgaaaacggtggaagaacttctgaaaattgcagtgggagcaaattcttgttggttttgtgctgcttgcctttctagatctgctcatcagcacttaaccttccctcctctaaaggttactaaagaagcctgaagtaggtaaagagtgctcctcagcttcttatccttccactctttacccagcagatttcattcaatgccttagccaaggagtccagcacctgtctcccctgctaataattgtccttagagatgctagtactttaatccaggtatagcagtttcccgttattttcttgcttgtcgttcccctacatttcctcctgatttcccaagactctctttgtggcttttgagggtcagccaaggagcaggcaagtgagtgaacaatcctcaggaaaagaaggaccattttagcttaacacttccttttttttttttttttttttaagaagaatataggtaaacaggtaatgattcttgattggagataccatttgactcttgatgagagttgtacgaagatggaaatgagggatgattccaggcgttttagggggaaggctgcagataccattctaacccccaagatactgtgttctcaagacctcttagaactaggtgttgtcagggataatttgaggagggcttagtcttcagaacaatcctgcagtcttgacagaaatctaaaatctccaaaaactcctaccctttaaccttaccctagggggaactgatctatgaatattacatgtgtgattatgaaaggtgaagttgagtgagaggagttgaggaacgtggaagacagtgagctctcaccctaacactataagaagcatgatctcaatagaccaataattcacctttttatacatctgtaaataaatggaatgtttttaagaatataattatgtcagatttagcattttcttttatatattaaatatatatatctttccttttctgctttcgaaaagtgactatttttttagaaatctaagaacagaagtttggtgattgaaaggtagaatatataaacctgaaataaagcagttaaaacaattaaagcagaaaaaaaaaaaa

SEQ ID NO: 1276 - DNA, 3625 bp, Homo Sapiens
  NM_001080543
cccagcgcaggcttcggctattggtgttggtgccgcggccactggcccagccgatgggtcgggacacacgctcgcgctcgcggtccgcgggtcgccggggccgaaggcggcagagtcagagcgggagccgaagtcggagcaggagccatgggcggcgaaaccgacggcgccgggaggacgagggacggcgcagacggaggcggcggagccgggagcgcaggtcagattcagaggaagagcggtggcagcgctcagggatgcgaagccggagccccccgcggcccaagtggcactcaagagatgggtcctctcagtcggactcaggagaggagcagtcacggggccagtgggctcgccggcgacggcgcgcacgctcgtggtctcctagctcctcagcatccagctccgcgtctccagggcgatcccagagcccccgggcggccgcggctgccctgagccagcagcagagcctgcaggagcggctgcggctgcgggaggagcggaagcagcaggaggagctgatgaaggccttcgagacgcccgaggagaagcgcgcacggcggctggccaagaaggaggccaaggagcgcaagaagcgggagaagatgggctggggtgaggagtacatgggctacaccaacaccgacaaccccttcggagacaacaacctgctgggcaccttcatctggaataaggccctggagaagaaggggatcagccacctggaggagaaggagctgaaggagcggaacaagaggatccaggaggacaaccggctggagctgcagaaggtgaagcagctgcggctggagcgggagcgggagaaggccatgcgcgagcaggagctggagatgctgcagcgcgagaaggaggcagagcacttcaagacatgggaggagcaggaggacaacttccacctccagcaggccaagctgcgttccaagatccgcatccgggacgggcgggccaagcccatcgacctgctggccaagtacatcagcgctgaggatgacgatctggccgtggagatgcatgagccctacacgttcctcaacggcctcaccgtggccgacatggaggacctgctggaggatatccaggtctacatggagctggagcagggcaagaacgccgacttctggcgggacatgaccaccatcaccgaggacgagatctccaagctccgcaagctggaggcctcgggcaaggggccaggtgagcgccgcgagggggtcaacgcctccgtcagctctgatgtgcagtcggtgttcaaggggaagacatacaaccagctgcaggtcatcttccagggcatcgagggcaaaatccgcgctggtggccccaacctggacatgggctactgggagagcctcctgcagcagcttcgtgcccacatggcacgggcccggctgcgtgagcgccaccaggacgtgctgcggcagaagctgtacaaactgaagcaggagcagggcgtggagagcgagccgctgttccccatcctcaagcaggagccccagtcccccagccgcagcctggagcctgaggacgcggcgcccaccccgcccgggccctcctcggagggcggccccgcggaggccgaggtggacggcgcgaccccgacagagggcgacggcgacggggacggtgagggcgagggcgagggcgaggcggtgctcatggaggaggacctgatccagcagagcctggacgactacgacgccggcaggtacagcccgcggctgctcacggcgcacgagctgccactggacgcgcacgtgctggaaccggatgaggacctgcagcgcctgcagctctcgcgccagcagctccaggtcacgggagacgccagcgagagcgccgaggacatcttcttccggcgggccaaggagggcatgggccaggacgaggcgcagttcagcgtggagatgccactcaccggcaaggcctacctgtgggccgacaagtaccggccacgcaagccgcgcttcttcaaccgcgtgcacacgggcttcgagtggaacaagtacaaccagacgcactacgactttgacaacccaccgcccaagatcgtgcagggatacaagttcaacatcttctaccccgacctcatcgacaagcgctccacgcccgagtacttcctggaggcctgcgccgacaacaaggatttcgccatcctgcgcttccacgcggggccgccctacgaggacatcgctttcaagatcgtcaaccgcgagtgggaatactcgcaccgccacggcttccgctgccagtttgccaacggcatcttccagctgtggtttcacttcaagcgctaccgctatcggcggtgacggccctggggaacggcaggcaggtgtcctcgggggcacagtaaaggggcttcggtgaagctggtggtcactccggggccgctgtctgggctgcagggccgcgggttcacgtcccacctcaggccgcatctttctttcgccaggcctcagtttcctcctatataaaaggggggtcaccattgagcctgccatggtgagctgaggagacactgggacaggctggcctagggtcctgatgcaacggagggggcgctaggggcatctttcgagcacgagggtggccagcagccgccagctgacctcaccgtccaggcggacactctccaccgcccctcagccaggctgggtggggcccacagggcctgccccaagtggcggccacacagggtgttgtggagatgggccagaggggcctgggcttggcggtgccaggctcgtgagaagcaggaaactcaaggccagccctgccacatcacggggcacccactgggcgtgaggcagagcccgcggctgtggggcagctccagccctgcccacaggccaccctcgcccgcacaggcagcactgaggccgggaccctgctggcgcccgatccgccactgcagaagagaccctctgtggacacccacactctgcagggactggcccccaactcaccccgtgctggctggtggggtccatttccccgcagcgggtatggaggatgcgtcgaggtccctgtctctgtcaaggtcgtgggaaccaaaagtcactgagccgtcctccccccacctctgagcacagggcctggagggcaggggctccccgaaggctgggggttggagaagggtgaggggcttcccccagggatccccccacctggcctgctcacggggccttggagcatgagaccagtgaccccgagttttgcccatatcaggacagtggctccttctcactcccctttctcaggccaggagggccgagggccacacgggtgccacagcccaggtcggagtggcccagccggcaggcttgttcttcagcatccgacgggaacatctccaacagaagcaaaacggaaagtgcctcccggacccccagagggccacccaacctcaccagtcaccagccccagaccacccacagcccctcccagacaccccgcctcatctggaaatagttccgtttgtttctctaaaaagacttgtaggtgggaaaaaaaatcttttgttctcatggaattggcctattggcaagatcgcatgtttttttaataaacgttgtattttagaataatcttaggtttgcagaaa

SEQ ID NO: 1277 - DNA, 893 bp, Homo Sapiens
  NM_001080544
aagaaataagacacggagacaaagtacagagaaagaacagcgggcccaggagaccggcactcagcatacggaggaccagcactggcaccggcctctgagttccctcagtttattgattaccattttcagtgtctcagcaagaggaatgcggtaggagagcagggtgtcagcaagaaaacctgtgagcctttcctttcgctgctgcggccgcagccatgagcatgctcgggcctcagaagaggctcgcctctagtgtcctccgctgtggcaagaagaaggtctggttagaccccagtgagaccaatgaaatcgccaatgccaactcccgtcagcagatccggaagctcatcaaagacgggctgatcatccgcaagcctgtgacggtccattcccgggctcgatgccggaaaaacaccttggcccgccggaagggcaggcacgtggccataggtgagcagaagggtacagccaatgcccgaatgccagagaaggtcacatggatgaggagaatgacgattttgcgccggctgctcagaagataccgtgaatctaagaagatcgatcgccacacgtatcacagcctgtacctgaaggtgaaggggaatgtgttcaaagacaagcggattctcatggaacacatccacaagctgaaggcagacaaggcccgcaagaagctcctggctgaccaggctgaggcccgcaggtctaagaccaaggaagcaggcaagtgccctgaagagcgcctccaggccaagaaggaggagttcatcaagactttatccaaggaggaagagaccaagaaataaaagctccccctttgtctgtacatactggcctctgtgattacatagatcagccatgaaaataaaacaagccttaaaaaaaaaaaacat

SEQ ID NO: 1278 - DNA, 2104 bp, Homo Sapiens
  NM_001080546
cttcaggcattagattctcataaggagcctgcaacctagatgcttcgcacgtgcagtccacactagggttcgtgctcctgtgagaacctaatgccgctgccactgataggacaggaggcgaagctcaggtggtaaggctggcttgcctgctgctcacctcctcctgtgcggcccagttcctaaaaggccatggaccagtaccagtccatggcccaggggttggggacccctgccctagagcctttggagggagcacagccctgctgacacctttattttggattgctggcctgtgagaaaataaatttctattttgagctgctaattaggaaactaatagataccccatcgcgcttatatctcacttacccatcctgtaacatggctatagtaatacctttctcagaagcttcgctccgggattcaatgagatatgtttgtacggcacttagcacacagtgaatgttcaaaaatagtgatggctgttcctcttctttaaggactgggagttttcatcctcttgaataagaactcgacaacagagtgggaactttctgtcttgtgatccattgcctgtgtgttgcactggagcacagaggacactcgatcgtgcggcgcgcagggcggggggccgccgctgcctccccgcgggatggctggcactgtgctcggagtcggtgcgggcgtgttcatcttagccctgctctgggtggcagtgctgctgctgtgtgtgctgctgtccagagcctccggggcggcgaggttctctgtcatttttttattcttcggtgctgtgatcatcacatcagttctgttgcttttcccgcgagctggtgaattcccagccccagaagtggaagttaagattgtggatgactttttcattggccgctatgtcctgctggctttccttagtgccatcttccttggaggcctcttcttggttttaatccattatgttctggagccgatctatgccaaaccactgcactcctactgaccactcttcaggaaaacgaaaacctgttctctccttcattgtgatgacattgatgagcaggaaggcactattcagagccttgttttgacagccctcatgccttaaggttagaggagtatctgtccatcactaagacaaatctctggagtcctggcttccagaaacaggattgccaaattgtccctgtggggctagattcttaccagcttaagaaggatattgctatcttcttagtacccgtaccttaggatttccaactgttttgaaagggaaatagtaacagtgatctgcttagagtggattttcactcaagtccttagtaagtggattttggggaaaaaagcacctgggcttctggttctttttgataatatataaaattattcattatgaggttgcagttgtttgcaaaggagaggcactcaaatttgaaaggttattttaatgtgataatttggaagacttactcagatgttggtcattgaccactctgtgcatatatttctgcagagctctgtgaaggcaatgagtgtcacttccctctgctctaataaagcaataaataatagctaaagggctgactttcacttcgaactcttggccacggctttttaatcaagttctttaggtttccttgggattagaggaaaggtatggaaatattgttttttgttttttgtcttgccatgtatctgtaggtttttttcttccatgatgtggtgggctgtgtgtgccttatttaattaccatgagtccattttggggtgtcttcacttttcatctttgtagccctttctccaaagctagtgaggaaggtatattctcaacatcagatataactctatacctgtctgatctcccagaccaaatgaaatttgcattaaatggaggggccctggtcaggttccactttggaagtctgatcctgactccctagagccatttgaaaaagaatcttctggcttaaaattaagaaccaagaaaacaagttggaaagagatcactgatggagtatgtgctctatgccaatagcacactaattcctttgaggtttaatttatttaatttttacaacggtctcatttttatcatccccactttaaa

SEQ ID NO: 1279 - DNA, 1426 bp, Homo Sapiens
  NM_001080547
gactatctcccagcggcaggcccttcgataaaatcaggaacttgtgctggccctgcaatgtcaagggagggggctcacccagggctcctgtagctcagggggcaggcctgagccctgcacccgccccacgaccgtccagcccctgacggggcaccccatcctgaggggctctgcattggcccccaccgaggcaggggatctgaccgactcggagcccggctggatgttacaggcgtgcaaaatggaagggtttcccctcgtcccccctcagccatcagaagacctggtgccctatgacacggatctataccaacgccaaacgcacgagtattacccctatctcagcagtgatggggagagccatagcgaccattactgggacttccacccccaccacgtgcacagcgagttcgagagcttcgccgagaacaacttcacggagctccagagcgtgcagcccccgcagctgcagcagctctaccgccacatggagctggagcagatgcacgtcctcgatacccccatggtgccaccccatcccagtcttggccaccaggtctcctacctgccccggatgtgcctccagtacccatccctgtccccagcccagcccagctcagatgaggaggagggcgagcggcagagccccccactggaggtgtctgacggcgaggcggatggcctggagcccgggcctgggctcctgcctggggagacaggcagcaagaagaagatccgcctgtaccagttcctgttggacctgctccgcagcggcgacatgaaggacagcatctggtgggtggacaaggacaagggcaccttccagttctcgtccaagcacaaggaggcgctggcgcaccgctggggcatccagaagggcaaccgcaagaagatgacctaccagaagatggcgcgcgcgctgcgcaactacggcaagacgggcgaggtcaagaaggtgaagaagaagctcacctaccagttcagcggcgaagtgctgggccgcgggggcctggccgagcggcgccacccgccccactgagcccgcagcccccgccgggccccgccaggcctccccgctggccatagcattaagccctcgcccggcccggacacagggaggacgctcccggggcccagaggcaggactgtggcgggccgggcctcgcctcacccgccccctccccccactccaggccccctccacatcccgcttcgcctccctccaggactccaccccggctcccggacgccagctgggcgtcagaccccaccggggcaaccttgcagaggacgacccggggtactgccttgggagtctcaagtccgtatgtaaatcagatctcccctctcacccctcccacccattaacctcctcccaaaaaacaagtaaagttattctcaatccatcaaaaaaaaaaaaaaaaaa

SEQ ID NO: 1280 - DNA, 5701 bp, Homo Sapiens
  NM_001080745
gcagtgccgtagtagcgggccacggagatagacagctttggagctgctgaactccgagcacagggtgaagaccccggcgctaccaaccacagcctggcagcctggtctccgcggcacccactggggctgcatccccctcccccgagagggctgcgcaggcgggaagacgcccagaggccagcttcggtcccccttctgtctctcggttcctctttcctcccaagtaagggaataaaccgcgaagaaggagcgccccgggccaccgcgcaaccaagtgttgcctggtgaggaagagccaggacttctgaatttaccttgaatacagacaggaggatgttgcctaaggaatagcagagatcttgtctcatcttctgagaggtgcctgctgctgctgtatacacttgagtgctcccagaagtctcctgaaaggcttacatcgcaaacctgcaatgagccaggccctgggctgggcctccacttcagcctagtgaacaaaactccatcactgccctttagccactcacataaagtttaaaaatgggtgaagaacggtgggtctccctcactccagaagaatttgaccaactccagaaatattcagaatattcctccaagaagataaaagatgccttgactgaatttaatgagggtgggagcctcaaacaatatgacccacatgagccgattagctatgatgtcttcaagctgttcatgagggcgtacctggaggtggaccttccccagccactgagcactcacctcttcctggccttcagccagaagcccagacacgagacctctgaccacccgacggagggagccagcaacagtgaggccaacagcgcagatactaatatacagaatgcagataatgccaccaaagcagacgaggcctgtgcccctgatactgaatcaaatatggctgagaagcaagcaccagctgaagaccaagtggctgcgacccccctggaaccccccgtccctcggtcttcaagctcggaatccccagtggtatacctgaaggatgttgtgtgctacctgtccctgctggagacggggaggcctcaggataagctggagttcatgtttcgcctctatgattcagatgagaacggtctcctggaccaagcggagatggattgcattgtcaaccaaatgctgcatattgcccagtacctggagtgggatcccacagagctgaggcctatattgaaggagatgctgcaagggatggactacgaccgggacggctttgtgtctctacaggaatgggtccatggagggatgaccaccatcccattgctggtcctcctggggatggatgactctggctccaagggggatgggcggcacgcctggaccatgaagcacttcaagaaaccaacctactgcaacttctgccatatcatgctcatgggcgtccgcaagcaaggcctgtgctgcacttactgtaaatacactgtccacgaacgctgtgtgtccagaaacattcctggttgtgtcaaaacgtactcaaaagccaaaaggagtggtgagtttcaccgcaaatgtgaattatcaacgttgtgtgacggtggggaactcagagaccacatcttactgcccacctccatatgccccatcacccgggacaggccaggtgagaagtctgatggctgcgtgtccgccaagggcgaacttgtcatgcagtataagatcatccccaccccgggtacccaccccctgctggtcttggtgaaccccaagagtggagggagacaaggagaaagaattcttcggaaattccactatctgctcaaccccaaacaagttttcaacctggacaatggggggcctactccagggttgaactttttccgtgatactccagacttccgtgttttggcctgtggtggagatgggacagttggctggattttggattgcattgataaggccaactttgcaaagcatccaccagtggctgtcctgcctcttggaacaggaaatgaccttgcccgttgtctccgctggggaggaggttatgaagggggcagcttgacaaaaatcctgaaagacattgagcagagccccttggtgatgctggaccgctggcatctggaagtcatccccagagaggaagtggaaaacggggaccaggtcccatacagcatcatgaacaactatttctccattggtgtggacgcttccattgcacacagattccatgtgatgagagagaaacatcctgaaaaattcaacagcaggatgaagaacaagctgtggtactttgaatttggcacctcggagacttttgcagcgacctgcaagaaactccacgaccacattgagttggagtgtgatggggttggggtggacctgagcaacatcttcctggaaggcattgccattctcaacattcccagcatgtacggaggcaccaatctctggggagaaaacaagaagaaccgggctgtgatccgggaaagcaggaagggtgtcactgaccccaaagaactgaaattctgcgttcaagacctcagtgaccagctccttgaagtggtggggctagaaggagccatggagatggggcagatctacaccggcctgaagagtgcaggcaggaggctggcccagtgcgcctctgtcaccatcaggacaaacaagctgctgccaatgcaagtggatggagaaccctggatgcagccatgttgcacgattaaaattactcacaagaaccaagcgcccatgatgatggggcctccccagaagagcagcttcttctcgttgagaaggaagagccgttcaaaagactaaacagtgtgccaaacaccagctaaaccaagagagaaagcaagaaactataatgcacactcacacacaatttatgtgcacactcacacatgcacacacacacacacatacacactcttctctaaccagtggaagcaaagccacccttcgggaagaaaacgtcaccttgccatacattctgtttcaacagtgggtacacccctaacagagccagtgccaacaaaacattttgaatggacttagggcccatgaggttgtggctggcttaggcagcaacctccacattcccacaggccttgagcagaattttctgagactgaagggaaatccccctttctttctaccagccctgcaagtttcctcatggacgctcgcgaggagcaggctgcaggtttcctgcctatggtgagatcagatgtggccaagggaaggagctctggttccagagaatttgcacaaagttccctctgtacagagacaaaacggcctccggctctcagagcataatccttggcagggctcagcaggcgcacgttggtttcttggtcgtcctttgagtgacaacttctccgtgaacctgctgaagaggcagaaaggctgtggaaagctgtatttccattcttgggtttctgcgccgtcggtgggcacttgttattttccaggaaccttctcctggtgtctacatgtttgcttagaggcggctccaagagcccccagagctgcctgcatagcacaccttagatgtggtatttattttcttagttctgtgaacacctgggagggagagcggagaaactgggatttatttttcaaattggtgtcataatattgtgtaaaaagggaaggaaaaaaaaaaccacccccagcttctttctttttcaagccaaagcgtgtttcctgtttgagttccaagccctggtggcagactattcctgaaggcagaaaagatgggaaggaaggaactttgctggggaaaccaggagacggttccctcctgcttctttgcactcaccactcccagagtatgacctgaaggaccttctgatggtcttaacgtgtgtgcgcgcgtgtgtgtgtgtgtgtgcgtgtatatatatatatttagcctatatatttatatatatatatatataaatatttatttactgatggacttttcctcattggaaaaaaaaaacataggtagtatgagacagaaagtggtaaggaaaaagaaggttctcactcccccactccaccgtttcattgtcaggacgcatctccctgtggtgatcacaagggttaaggggaatgaaagtagctccctattatgaacgaagagaccgagaactcctattctggatcctcaaaacaagcatgaaagacctgctgggctggatttactctcccatttgtcagataagaaaattgagtctcagaaaagttcagagacttttccatggtgtcttggctaatgcagcttgagagtaggtgccgttacaaagatatttaatggagaaaagaacccacacatctcagagtagggtcatttctggtcactgaaaagtgagtccacttggatccaggttgccagggaggaacaaacgtacagcacatgcgtggatgggatatccccacacaagaaaacgagcgcctcatgctgcttcccagaggttctctctgacctgaatggaaaagaagttggtctgagatcgaaggtactaaacagatcatcagactgaactctccacatgtcacctcatcatggtcatcatagtctcttagtttggaaacaaccttggctgcagggatgacctcagtggagagtcacaagaaggactgaggcgtcttctgcaagatactgccagccaggacagaggggtctcagcagagctcagtgggcttcattcagcaagtgccagcattaccatcctttcccaagggcaaggccatgcagagcttcattgggcctccatccctctctgagatttatcagtggaaacttggacccacttgatatcgttccactgagctgcctctaatcttgcattggacaggagctttggacaaagaagggaatattaagattgtgtgtacaaatggcacttaactgtgaaggaccacctaggagcaagatcttggaccattctgctcaacctaacagtgcagaatgctaagtaaggggaaaaccaggccacctgaagaatatctttaatgatggtattcttggtgatgggaccaacaagctccagaattactacaggtactatcttggaagccacttgtttctgaaactgaggcaggttcaggtttggggtcactgattctaagacatttacagaagttcgtgcatgtgtttcagccatgatccccaagattgaggctattgagacatggcactatcaacaggtgaaattgattctcagagactcacaggtctcatgaaggggcagtgcagaaaatggcccttacctgctgcaccctagtgcacaggacttgcaatgttgcttgagagacatatcccaagtccttcttagaggcatggagtataacaacttcagtggaattgcacttccagtttggtaaccttagtaaatcttgtgttgttgtttaatcgtgccttgcaaatcatcctttaaacactatgactgtggtttcttgtggtggagtccctcatcatagtgaccctcatagcaacctctgaggttagcagagaaggtattattatctcgatctcaatgaggagaacaaggcttaatgaggtttagtgacttctcaaagccacatggttagtcaggggagaacctaatcccttatttcttatcttattctgattctggccatgctacaaacatgttctcacctgccccccatgcttctaccccaacagcaataaaaactgtaaagcaggaaaaaaaaaaaaaaaaaa

SEQ ID NO: 1281 - DNA, 677 bp, Homo Sapiens
  NM_001080822
gtgcagaagcagacccgtgccggccagcgcaccaggttcaaggcatttgttgctatcggggactacaatggccacgtcggtctgggtgttaagtgctccaaggaggtggccaccgccatccgtggggccatcatcctggccaagctctccatcgtccccgtgcgcagaggctactgggggaacaagatcggcaagccccacactgtcccttgcaaggtgacaggccgctgcggctctgtgctggtacgcctcatccctgcacccaggggcactggcatcgtctccgcacctgtgcctaagaagctgctcatgatggctggtatcgatgactgctacacctcagcccggggctgcactgccaccctgggcaacttcgccaaggccacctttgatgccatttctaagacctacagctacctgacccccgacctctggaaggagactgtattcaccaagtctccctatcaggagttcactgaccacctcgtcaagacccacaccagagtctccgtgcagcggactcaggctccagctgtggctacaacatagggtttttatacaagaaaaataaagtgaattaagcgtgtaaaaaaaaaaaaaaaaaaaaaaaaaaaaaaaaaaaaaaaaaaaaaaaaaaaaaaaaaaaaaaaaaaaaaaaaaaaaaaaaaaaaaaaaaa

SEQ ID NO: 1282 - DNA, 537 bp, Homo Sapiens
  NM_001080831
gggggcggaccaaagcgatctcttctgaggatccggcaagatggcagaagtagagcagaagaagaagcggaccttccgcaagttcacctaccgcggcgtggacctcgaccagctgctggacatgtcctacgagcagctgatgcagctgtacagtgcgcgccagcggcggcggctgaaccggggcctgcggcggaagcagcactccctgctgaagcgcctgcgcaaggccaagaaggaggcgccgcccatggagaagccggaagtggtgaagacgcacctgcgggacatgatcatcctacccgagatggtgggcagcatggtgggcgtctacaacggcaagaccttcaaccaggtggagatcaagcccgagatgatcggccactacctgggcgagttctccatcacctacaagcccgtaaagcatggccggcccggcatcggggccacccactcctcccgcttcatccctctcaagtaatggctcagctaataaaggcgcacatgactcccaaaaaaaaaaaaaaaaaaaaaaaaaaa

SEQ ID NO: 1283 - DNA, 724 bp, Homo Sapiens
  NM_001080849
gcttccgcccggcgcccacttccaagatggcggcggggcggggccggggcagggcggacggagccggcgagcgggatgctgcggactgcgctgcgcggcgcgccgaggttgctgagtcgcgtgcagccccgggcgccctgcctgaggcggctgtggggccgcggggcccgtccagaggtcgcggggaggcggcgggcctgggcctggggctggcggcgctcaagctccgagcaggggccggggcccgcggcggctctggggcgcgtggaggcggcgcactaccagctcgtctacacctgcaaggtctgcgggactaggtcctccaagcgcatctccaagctggcctatcaccaaggcgtggtcattgtgacctgccccggctgccagaaccaccatatcatcgctgacaacctgggctggttctcggacctgaatgggaagagaaatatcgaagagatcctgacggccagaggcgagcaggtgcaccgtgtggcgggcgagggggccctggaactggttctggaggctgcaggggcccccacatccactgcagctccggaagcgggtgaggatgagggtccccccagccctggcaagacggagccgagctgactcctgcgctccccggcactgtgggacttcggccttccagaaggaggttttggccctgggcctctctggacgtggcctgttttctatcaataaacagacattacttccagat

SEQ ID NO: 1284 - DNA, 2342 bp, Homo Sapiens
  NM_001080853
aattagctaggcgtggtggcacatgcctgtagtcccagctactcaggaggctgaggtgggaggatcacctgagcctgggaggtcgaggctgcagtgagccgtgattgtaccactgcactccagtctaggcaatggagtaagactgtctcaaaaaactaaagaactttaaaaaaattataacaaaatgatgctgaagaaaacattggaggacctgctgtaacatcatttggcttaaagtcatggtttccaggaacctgttgacaacatgaggacttaatagatatgatcagcaggatcatgaactagaaagcggcttggattctatccttggttttgccattaactgccaaccacatgacttcagataacctcttgccctcactaccttgtggagttactgaaagataaaatcaaagtgctttaaaaagatgaaagcattatacaaatttaagattttagcacagggacaaaaaatacagctaagactatgaggagcttctgaaagcagagattgagagctgtggcaaatatatgagccgtgacgcaatggggagcgtaactagatggcaggtgccctgcctttgcccccaccctctctccccattgtcctactcattcataacccagattccagggctcattcctctggagaatccttaactgtgcctgtgccaagacaggctccacaaggctggtcaggcaggctgcctgggtgcaaacggccaagccatgagggagccaaggaagatgggacacactgcttctgaaaggttactaacacctttttaagagagacctttggactgcttcatgtcctggaagaaggggaaaaaagagaccctttgggcttctggagctagccctgaaccaaaaaactccctaatcaacctgacttaggtaaaacctttactgagctgggaatctggttcagtctgggattgtcagggactatttcagggcaacagaaggggactggcttttcttgtcataggtcacaaaggcagagagaaccacaccagcatcaccaagatggccaggagtggaaaatgcagacattgagcctaaaacaagaagccatttccttgggagcactgtgatgggggccgcgctcactcactatatgcccaaagcctctggcctgggtggctgctgttcagttgagagtgtaaccagctcctgttttccctgccagggcttgagtcctgtgagaaccttgggaagagagaagagataatgggtagttttaggggatagaataccccttcctcctaccaaatgtaagagaaatccacccccgcaacaagatcttctcaaactgttttgtgctctgaagtgtctaaagataggggagcttttcagcctattctagacccagctccttctcagaggaaaagagagggagctggccagggactactcccatgccccctcaagaagagcagagagagtttctaccccatcattccacaaagtcagaacagctagaacggaggctgaagagactgagagcagctgcagaaatccaaaaatattgaccttataagctcaagatgctgtatgctgggtttttacaaggatattcggtatttgatgaaacccagttaggcatgacatattccccttctccccattcctacctctcttttattaaaaattttatagttacagtgtctatgttgcccagcctggtcttgaaccctttggctcaagtgatccacctgccttggcctcccaaagtgctgggattacagatgggagccatcgtgtctggcccattcctgcctcttaaagccctccacccaacaggcagacttgagactcaaaccgtggtcccagctctgcatcaggggtagtttggaattcagattctttcaaactggggtaaaaaccaggcccagagttcagagttcaacaacaagcttccaagatgccgcccaaaggaaaaagtggttctggaaaagcggggaaagggggtgcagcctctgggagtgacagtgctgacaagaaggctcaaggtcccaaaggtggtggcaatgcagtaaaggtcagacacattctatgggaaaaacatggcaaaatcatggaagccatggaaaagttaaagtctgggatgagattcaatgaagtggccacacaatatagtgaagataaagccaggcaagggggcgtcttgggttggatgaccagagggtccatggtgggaccatttcaagaagcagcatttgccttgcctataagtgtgatggataagcctgtgtttacagacccagcagttaagacaaaatttggatatcatattattatggttgaaggaagaaaataaaatcatatgaaagactgaa

SEQ ID NO: 1285 - DNA, 7961 bp, Homo Sapiens
  NM_001080975
ccgggaggaagcggccgcgcggcagctgcggggcgtgggggtggtggtggcggcggcggtggtggcggcggcggcggcggcggcagctgaggccgaggaggcggtggctgtggcggacgcagcagcaccccagctagggacagggctccgccgcgcccccttgctggccccatggaggcggcagcggcggcggcggcggcggcagcggcagcggcagcggcgggcgggggctgtggctccgggccgccgccgctgctgctgagcgagggcgagcagcagtgctactccgagctcttcgcgcgctgtgccggcgccgcgggcgggggccccgggtctgggccccccgaggccgccagagtcgcccccggcacggccactgcggccgccggccccgtggctgacctgtttcgggcatcgcagctgcccgccgagacgctgcaccagatcacagaactgtgtggtgcaaagcgggttggttattttggtccaacacagttttacattgccctgaaattaattgctgcagcacaatctggcctcccggtacggatagagagtattaaatgtgaattgcctctgcctcgctttatgatgtcaaagaatgatggtgagatacgatttgggaacccagctgagctgcatggaactaaggttcagattccatatttaactacagaaaaaaattccttcaaaagaatggacgatgaggataaacaggaaacacagtctcccacgatgtcacccctcgcctcccctccttcttccccgcctcattaccagagggtgcccttgagccatggctacagcaaactgcggagcagcgcagaacagatgcatccagcaccttatgaagctaggcagccccttgtccagcccgagggatcctcatcagggggcccaggaaccaagccccttcggcatcaggcttcccttatccggtccttttcagtggagagggaactacaggataacagcagttaccccgacgaaccctggaggataacagaagaacagcgcgagtactatgtcaatcagttccgatcccttcagccagacccaagctctttcatttcaggttctgtggccaagaacttcttcaccaaatcaaagctttccattccagaactctcctatatatgggagcttagtgatgctgactgtgatggagccctgaccctgcctgagttctgtgctgcgtttcatctcattgtggctcggaagaacggctacccattgcctgagggcctccctccaactctgcagccagaatacctgcaggcagcttttcctaagcccaaatgggactgtcaattatttgattcttattctgagtcactgccggcaaatcaacaacctcgtgacttgaatcggatggagaagacatctgttaaagacatggctgaccttcctgtccctaaccaggatgtaactagtgatgacaaacaagctttgaaaagtactatcaatgaagccttaccaaaggacgtgtctgaggatccagcaactcccaaggattccaacagtctcaaagcaagaccaagatccagatcttactctagcacctccatagaagaggccatgaaaaggggcgaggaccctcccaccccgccacctcggccacagaaaacccattccagagcctcctccttggatctgaataaagtcttccagcccagtgtgccagctaccaagtcaggattgttacccccaccacctgcgctccctccaagaccttgtccatcacagtctgaacaagtgtcggaggccgagttactcccacagctgagcagagccccatcccaggctgcagaaagtagtccagcaaagaaggatgtactgtattctcagccaccatcaaagcccattcgtaggaaattcagaccagaaaaccaagctacagaaaaccaagagccttccactgctgcaagtgggccagcttctgcggcaaccatgaaaccgcatccaacagtccaaaagcagtcttccaaacagaagaaggccattcaaactgctatccgcaaaaataaagaggcaaacgcagtgctggctcggctgaacagtgagctccagcagcagctcaaggaggttcatcaagaacgaattgcattggaaaaccaattggaacaacttcgtccggtcactgtgttgtgacccccccatggttcaagtgacagtgggtgaccttgtctgccaagatctttcttttgaatgttttgaacccaactacttgtcatagatgtttgactgtgtcaaaagctgtgagcagcaaaatataatccatatgaccttttctcttgcacttcacttgtatgttttactgtggtggaaaaaatacttcaactgattatcacacttgaaatgctaattatcagtggaatttgtctcctattcttaagtacttctgcaaggtattagatgctgctccttaccaaaaatcagtcttctagcaaataaaaataacttagagcattatttatttaaagaatttatgttttctataaaaccttataaccaagaaccttcaggatgcttgtaaccaagtactttcaggatgctttttgtatgtatatcacatagagtaggttggtttcctgagtaattgggattccaactagatagtcattggtgtgaccataataaaaacaaaagctaaaataaaagcatcagatttagactggcgctgtgccctctaccactatatgccaaaaattgcttctctagtgccattttgatattatatctagctataaataatacatgactatcgttttctattgaatgtcaaagacttactgggtctttacacctctgtaaagtggaggttttggcaatgagctgtttaacttggccaagctaggctgtcaacccagacaactcagtcctttcatgtaaatttttgggcaagagaagtctgctttgactgccttgcctgaccaaattaaataaatagttgccagatctctacttttatcctgcatgggataatatatctgtaaatgcatgagtttggaaaccacccatcaaatatgaaaggctgatgagactgttaggattgataaacatttgttgtttgaacccagctatccaaactggggaagaaggggaaatggttgttaccaacaatctctagtagttattttaatctttattttaacctggattgcaaatgtatggggtatgaggagataatgaaagaaaagtggtcctcatgctggatatgtgactgttttgttctctgtaaagtgtattcttgggaagtgattggtttatatcagattcagaggagcccaattaactccagtgtaggtaatgtaaaacagtaagctcaaattgcagaagccagtatcctacagaaatttaagtagctactgcttctcctgaaagcccaagttgaaaatgggaccacaggggcacagggctactgaccctcacagggcatgccagcgttaacaccactttgagagaccaatggcaagaaatgctgtctcttgtgcattttactaatttccccattcttagggtagcagggtgggggtgtatagggtctttttgaagcagttttggataggtttgcaatatgtgggattcagcctttgatttcaatagagctgagagcttttagaacaagcaggcatttatttaatgtttccttagtccattggcaagctttatcaatagcttaatggcagaggataaaggctcaaacagatgatgttttttccacagaaaaacaaattgttgaatctattccgtgcatatttaaggattttgaattgattttgaaaatcatgaaacttgaactatttttctattccctttttttcttccccatttgctgccttttttgtttttgtgggggaagggttgggagtaagtttaaactcttccgaagattatgaatgggtcagcacaaatttttaggcaactgctttttccatgttctgagatctacgggctacaacaaattttatcagcagtgttttttgtttttttgagatggagacttgctctgtcgcccaggctggagcgcagtggcgcaatctcggctcactgcaacctccacctcctgggttcaagcaattcttgtgcctcagcctcccgagtagctgggattacaggcacccaccaccacgctcagctaatttttgtatttttagtagagatgggattttgtcatgttggctaggctagtctcgaattcctgacctcaagtgatccacccgccttggcctctcgaagtgctgggattacaggcgtgagccacccgcccggctatcagcactgttctgattgcagacgtttcacagcatgtttggcttttggtaaattcaatccaggaaagactagcatgtgcactttatctcataatcttccagtacatatgctctcagttgggatagcagttcatttccattaggcagacgtataaactaaggaatgttagtctgcagtattcattttaaaaatattgacatgcttttcccctcccctccatgaagtcagtgccagagtgagccagattgggaggttggggttttgtttggttggcttggttttcattaagggaaaaaacttgcattggacaatcaaattcccctgagtttcataatctcatcaatattttaagataggcgagcacacactaataatatctatgcctaccttcttgggtggactcaactgtaaccacagtttattagttgcttagaagtggatttttaaaaaacagttaaatgtgtgtgcataacacacaagtaatgacacactactattattattacctaagtagtgctcatcctctctttctgtgttttcttaggatgtgcactttaatttaggattgtaacgcctaataatatttctgtgagcctttaatgtgatttataagatggccgaattactgaaatcaccattatacctcttccataaaacgactccaaagttagacctgcctgttggggagaattctatagacagaaggtcaatgttgtccccatccataggggttgaattaccttgctgttaagtggtcttcccccattgggatcctacagtcccacagatgaaagcacagtagtagctgacagctggcttatttggtccctcggcatctctcgtatgtggcatattgcttttgccactttcctatccagcagacatcaaagcaaaactaaaaggtagatatctggaatgaatgtatatgttgtaattgaggcagatatttgccttaattggaaggatctaactgctttacaaatattaaacaagtgcttgggcatgattgggagaggaggcagcttagctggaagctgtgcccatcttactgtcactggagaataggatgtcagagctgggcaggactggtacccatcatttgcagtttgcatgtggggaaaccaaagccctaagaaacaacagttcctggcccaaaaaatccatagaaagaggtaactagtggcagatttggggcgccaacctgattttatggattttgagttagattctctaccctctatcaatactaaaaatagattaggagggtttttttttctgtttatcatgttgaatttcattgacttaattagtctttaaatttgaaaacatgttttagggagtttagttctagaaatttctcttagattgaagtgacagaatctgaaagaaaagaatatgattgagctatttgttttcctgaacacctcaccttttatgatgcaataagttactctgagtttcttggcagagtttttgacagctgttgctttcaatggattccattcctgtattccttatgggaggttgtttttaaaatagactactgcgattgaaatgaactcaatatgtagttaagttatagttttcttcaatgtatttttagttacttgggtcacaaatgttcaatttcagcatattttagggtgagtaatcaaaaatgtgaatttgcctttgatttcctaccactgtctgagctatcataaagcattctctttagttgtgatttgattctatagtctgtttctaaatgacatttgtctgtttcttaaatgatctcacagccatggtaataatagatgtgtactcagaagatcaataaggtaatattggaattcatgtgttttttgcaattaaggcaggcatttgccaatgtcttcttttaagcagtagttggaaacatctcaattacagtgtaacaccttagagctaaaaacatttgttcaacacaaactagaatcacaccttctcactagatatcaccaagggaatgtggttttaaaaataaaaagaaaacaatataacgtatcatggcaaccagagcttcccatattattgacaagtagggatcattaggttctggtttgaacattctgaatgtgaacaaaatgaaatagtagttaagaggtgttttcccactgtgtttaaagagaacactagtaattctggtttttctttctaactgctttactgtttcaagggtattcttttaaaactctgatttcaaaggatcagttgaatttatactttagttatgggtgttttgttactttttttttttttgtatcatgactcagtatggttcaatttcctagtaagaagtggggatttgtgtttttggagtcctcagctcacatgtcttgttcctccttcagcacaagctaggggagatcctaccaacactgataggtcagtcattgatggcaatttgaatgtgggtattactctgtgagccaccctgcttcgcttgtttgtaaggagaaatgcatctggttatgtgaatttcccgagagcagcagacatggagggccagactttaaaagcaacgcaagcagattcgaagagctgttgccctcttctaaaaaaggcttttggaggctgtgttacatgcatgccctaaagcagtcagtctgttagtatgagcaagacatctgaagtacacagttgcttttaggcttgtatagttattttctacacatgccaacacacatgatgataaaggaaccttttctaggaggcattgcagggtttcaatacacaggacatgttctagttacagaagccttgctctgctgtcaacaattgggaaatgctcattttttcatgttttgtgaatactctggtcttgctgtaagctaatgtcatggctgtgggatattagagaagtgggtttatgactctgaagaccagcagacaccagactttaaaagtgcttaaattggaatttggaaactacagtaaagaaaccttcagataccagttccatcctgaagccctctgttgaacaacagggccagatcctaaagctctttcagggagctcttctctggggctggaacagttgattatgcaaccccattgtgtggagattggatcaactgagttgtgttatttttgttttaagtcaccttgtgcgagaacctcaaccgcacctatcttgggaaccgggtatacccttttctttagcactgctatcctttttgtcttcagcacaaataagatgttcaagtgagccagaagcaagaagagccattttagtcttcatagctattggctaagagagataatgagctgatggtctattttaaccttgaaagtaaaaatgtatattttttcactacaagtacattgaacagtaaaaagtgtaacagcaaagtatatatttgatgccttctgtcttttcatgataatgtgctaacaagttgtgttaatattttactcagccagagtctcattcatttgctaagcattgggaacattatgtatattgaccttaaacataggtgtcctatatttggattgtgacttgtagactcaagctaaccttactgcctctttttcacacttgttgaaaagtctgtgaagaacatagttaaagatctccaactttggaaaatatacatgatgtgaaactggggtgctatgttaaaaataaatgtatgataactaagtgtgggtaaaaaaaaaaa

SEQ ID NO: 1286 - DNA, 2937 bp, Homo Sapiens
  NM_001080978
atttggttgaaagaaaacccacaatccagtgtcaagaaagaagtcaacttttcttcccctacttccctgcatttctcctctgtgctcactgccacacgcagctcaacctggacggcacagccagaggcgagatgcttctctgctgatctgagtctgcctgcagcatggacctgggtcttccctgaagcatctccagggctggagggacgactgccatgcaccgagggctcatccatccgcagagcagggcagtgggaggagacgccatgacccccatcgtcacagtcctgatctgtctcgggctgagtctgggccccaggacccacgtgcagacagggaccattcccaagcccaccctgtgggctgagccagactctgtgatcacccaggggagtcccgtcaccctcagttgtcaggggagccttgaagcccaggagtaccgtctatatagggagaaaaaatcagcatcttggattacacggatacgaccagagcttgtgaagaacggccagttccacatcccatccatcacctgggaacacacagggcgatatggctgtcagtattacagccgcgctcggtggtctgagctcagtgaccccctggtgctggtgatgacaggagcctacccaaaacccaccctctcagcccagcccagccctgtggtgacctcaggaggaagggtgaccctccagtgtgagtcacaggtggcatttggcggcttcattctgtgtaaggaaggagaagaagaacacccacaatgcctgaactcccagccccatgcccgtgggtcgtcccgcgccatcttctccgtgggccccgtgagcccgaatcgcaggtggtcgcacaggtgctatggttatgacttgaactctccctatgtgtggtcttcacccagtgatctcctggagctcctggtcccaggtgtttctaagaagccatcactctcagtgcagccgggtcctgtcgtggcccctggggaaagcctgaccctccagtgtgtctctgatgtcggctatgacagatttgttctgtacaaggagggggaacgtgaccttcgccagctccctggccggcagccccaggctgggctctcccaggccaacttcaccctgggccctgtgagccgctcctacgggggccagtacagatgctacggtgcacacaacctctcctctgagtgctcggcccccagcgaccccctggacatcctgatcacaggacagatccgtggcacacccttcatctcagtgcagccaggccccacagtggcctcaggagagaacgtgaccctgctgtgtcagtcatggcggcagttccacactttccttctgaccaaggcgggagcagctgatgccccactccgtctaagatcaatacacgaatatcctaagtaccaggctgaattccccatgagtcctgtgacctcagcccacgcggggacctacaggtgctacggctcactcaactccgacccctacctgctgtctcaccccagtgagcccctggagctcgtggtctcaggaccctccatgggttccagccccccacccaccggtcccatctccacacctggccctgaggaccagcccctcacccccactgggtcggatccccaaagtggtctgggaaggcacctgggggttgtgatcggcatcttggtggccgtcgtcctactgctcctcctcctcctcctcctcttcctcatcctccgacatcgacgtcagggcaaacactggacatcgacccagagaaaggctgatttccaacatcctgcaggggctgtggggccagagcccacagacagaggcctgcagtggaggtccagcccagctgccgacgcccaggaagaaaacctctatgctgccgtgaaggacacacagcctgaagatggggtggagatggacactcgggctgctgcatctgaagccccccaggatgtgacctacgcccagctgcacagcttgaccctcagacggaaggcaactgagcctcctccatcccaggaaagggaacctccagctgagcccagcatctacgccaccctggccatccactagcccggagggtacgcagactccacactcagtagaaggagactcaggactgctgaaggcacgggagctgcccccagtggacaccaatgaaccccagtcagcctggacccctaacaaagaccatgaggagatgctgggaactttgggactcacttgattctgcagtcgaaataactaatatccctacattttttaattaaagcaacagacttctcaataatcaatgagttaaccgagaaaactaaaatcagaagtaagaatgtgctttaaactgaatcacaatataaatattacacatcacacaatgaaattgaaaaagtacaaaccacaaatgaaaaaagtagaaacgaaaaaaaaaaactaggaaatgaatgacgttggctttcgtataaggaatttagaaaaagaataaccaattattccaaatgaaggtgtaagaaagggaataagaagaagaagagttgctcatgaggaaaaaccaaaacttgaaaattcaacaaagccaatgaagctcattcttgaaaatattaattacagtcataaatcctaactacattgagcaagagaaagaaagagcaggcacgcatttccatatgggagtgagccagcagacagcccagcagatcctacacacattttcacaaactaaccccagaacaggctgcaaacctataccaatatactagaaaatgcagattaaatggatgaaatattcaaaactggagtttacataatgaacgtaagagtaatcagagaatctgactcattttaaatgtgtgtgtatgtgtgtgtatatatatgtgtgtgtgtgtgtgtgtgtgtgtgtgtgaaaaacattgactgtaataaaaatgttcccatcgtaaaaaaaaaaaaaaaa

SEQ ID NO: 1287 - DNA, 11933 bp, Homo Sapiens
  NM_001081
atgctcagttggttggagtggcctcactcttacctgccaacctgggaggttgatgatgaacatgtctttaccttttctttggagtttgcttaccttattaatatttgctgaagtaaatggcgaagctggagaacttgagctgcagagacaaaaaagaagcatcaatctccaacagcctcgaatggctacagagagaggaaatttggtgtttcttacggggtctgctcaaaacattgagtttagaaccggatccctgggaaaaattaaattaaatgatgaagatctcagtgagtgtttacatcagatccagaaaaacaaagaagatattatagagttaaaagggagtgcaattggtctgcctcaaaatatatctagtcaaatctatcagcttaattccaagctggtggatcttgagagaaaattccaaggcttgcagcagactgttgacaaaaaggtttgcagcagcaatccttgccagaatggtggaacctgcctcaatctgcatgattcctttttttgtatctgtcccccacagtggaagggtcctctctgctcagctgatgttaacgaatgtgagatttactcaggaacacccttgagctgccagaatggaggcacatgtgttaatacaatgggaagttacagttgtcactgcccacctgagacgtacggaccccagtgtgcatccaaatatgacgactgtgaagggggttctgtggcacgctgtgtccatggcatctgtgaggatttaatgcgagagcaagctggagagcccaagtacagctgcgtctgtgatgctgggtggatgttttcacccaacagccctgcctgcacgctggacagagacgagtgcagcttccagcccgggccttgctccacacttgtgcagtgtttcaacactcaaggctctttctactgtggggcctgtccaacaggctggcaaggcaatggatatatttgcgaagatatcaatgaatgtgagataaataacggcggctgttctgtggctccacccgttgagtgtgtgaatacacctgggtcttcccactgccaggcctgtccaccagggtaccagggtgacggaagagtgtgcacactcacagacatctgctcagtcagtaatggaggctgccacccagatgcctcatgctcctcaactctaggttccttacctctctgcacgtgtctcccgggttatactggaaatggttatgggccaaatggatgtgtgcagctcagtaatatttgcctaagtcacccctgtctaaatggacaatgcatcgacactgtctctggttatttttgtaagtgtgactcaggttggacaggtgtcaactgtacagaaaacatcaatgagtgtttgagcaacccctgtttgaatggaggaacttgtgttgatggcgttgattctttcagttgtgaatgcacacgtctctggactggagctctctgtcaggttcctcagcaagtttgtggagagtccctctcaggaataaatggaagcttcagctacaggagcccggatgttggttatgttcatgatgttaactgcttctgggttatcaaaactgaaatgggaaaggtcctgcgtatcactttcacttttttccggttagaatccatggacaactgtccacacgagtttcttcaggtttatgatggagattcctcttctgcttttcaacttggaagattttgtggctccagcctccctcatgaactcctcagcagtgacaatgctctctattttcatctctattctgaacatttaagaaatgggagaggctttacagtaagatgggaaacacagcaaccagagtgtggaggtatcctgactggtccttacggttctattaagtctccggggtatcctggaaactatcccccaggaagagattgtgtctggattgttgtaactagtcctgacctcctggtaacatttacttttgggaccttgagcctcgagcaccatgatgactgcaacaaagattaccttgagattcgagatggtcctttgtatcaggacccccttcttgggaagttctgcaccactttctctgtcccaccgctccagactactggcccctttgccagaattcacttccattcagactcccagattagtgaccaaggcttccatatcacctacttaacatcaccttcggatctgcgttgtggtgggaactacacggacccagagggtgaactcttcttgcctgagttgtctgggcctttcactcacaccaggcaatgcgtctatatgatgaagcagccccagggagaacaaatacaaatcaacttcacccacgtggagctgcaatgccagagtgacagttctcagaattacattgaggttcgagatggtgaaaccttacttggaaaagtctgtggcaacggaaccatctctcacattaaatccattactaatagtgtctggatcaggtttaaaatagatgcttctgttgaaaaagctagtttcagagctgtttatcaagtcgcttgcggggatgaattaactggagaaggggtcattcgctcgcctttttttcctaacgtgtatcctggagaaagaacctgtaggtggaccatccaccagccccaaagccaagtcattctcctcaacttcactgtctttgaaattggaagttctgcccactgtgaaacagattatgttgagattggtagcagttccattttgggttctcctgaaaataaaaagtattgcggtacagacataccttcatttataacatctgtgtacaattttctttatgtcacattcgtgaaaagttcttctactgaaaaccatggtttcatggctaagttcagtgctgaggatttggcatgtggagaaattcttacagaatcaacagggaccattcaaagtcctggccatccaaatgtctacccccacggtatcaactgtacttggcatatattagtccaacctaatcacctgattcatttaatgttcgaaacatttcatctggagtttcattacaattgcacaaacgactacttggaagtttatgacaccgactctgagacatcccttggaagatactgtggaaagtcgatcccgccatctctcacaagcagtggtaactcattgatgctggtgtttgtgactgactccgacctcgcttatgaaggcttcttaataaactatgaagcaatcagtgcagcaacagcatgtttgcaagactacacagatgatttggggacattcacttctccaaacttccccaataattatcccaacaactgggaatgcatttatcggatcacagtgagaactggccaactgattgcagtgcacttcacaaacttctccttggaggaagccattggaaactattatacagattttctggaaatcagagatggaggctatgaaaaatcaccattgctgggaatattctatggctcaaatctacccccaacaatcatctctcatagtaacaaactatggttaaaatttaagagtgaccaaatagacacaaggtctggattctcagcttactgggatgggtcatcaacaggttgcgggggtaatctcaccacttcaagcggcacgttcatatctcccaactacccgatgccctattaccacagctctgaatgctactggtggttgaaatctagccacggcagcgcatttgaactggaattcaaagactttcacttggagcatcatccaaactgcactttagattacctggctgtatatgatggcccaagtagcaactctcatctgctaactcagctttgtggggatgagaaaccccctcttattcgttctagtggagacagcatgtttataaaactgaggacagatgaaggtcagcaaggacgtggcttcaaggctgaataccggcagacatgtgagaatgtggtaatagtcaatcaaacctatggcatcttagagagtatagggtatccgaatccttattctgaaaatcagcattgcaactggaccatccgggcaacaacaggcaacactgtgaactacacatttttagcatttgacttggaacatcacataaactgctccacagattatttagagctctatgatggaccacggcagatgggacgctactgtggagtagacctgccccctccagggagtactacaagctccaagcttcaagtgctgctccttacagatggggttggccgccgtgagaaaggatttcagatgcagtggtttgtttacggttgtggtggagagctgtctggggccacaggctccttcagcagccccgggttccccaacaggtatccaccaaacaaggagtgtatctggtacattaggacggaccccgggagtagcattcagctcaccatccatgacttcgatgtggagtatcattcaaggtgcaactttgatgtcttggagatctatggaggccccgatttccactctcccagaatagcccaactgtgtacccagagatcacctgagaaccccatgcaggtctccagcactggaaatgagctagcaattcgattcaagaccgacttgtccataaatgggagaggcttcaatgcgtcatggcaagcagtcactggaggttgtggtgggattttccaggctcccagtggagagattcattctccaaattaccccagtccttataggagcaacacagactgttcttgggtcattcgggttgacagaaatcatcgtgttctcttgaacttcactgactttgatcttgaaccacaagactcttgtattatggcatacgatggcttaagctccacaatgtcccgccttgccaggacgtgtggaagggagcagctggctaaccccatcgtctcctcaggaaacagcctcttcttgagatttcagtctggcccttccagacagaacagaggcttccgagctcaattcaggcaagcctgcggaggccacatcctcaccagctcatttgatactgtttcctctccacggttccctgccaattatccaaacaatcagaactgcagctggatcattcaagcgcaacctccattaaatcatatcaccctctcttttacccactttgaacttgaaagaagcacaacgtgtgcacgtgactttgtagaaattttggatggcggccacgaagacgcgcccctccgaggccgttactgtggcaccgacatgccccatcctatcacatccttcagcagcgccctgacgctgagattcgtctctgattctagcatcagtgctgggggtttccacaccacggtcaccgcatcagtgtcggcttgtggtggaacgttctacatggctgaaggcatcttcaacagccctggctacccagacatttatccccctaatgtggaatgtgtctggaacatcgtcagttcccctggcaaccggctccagctgtcttttatatctttccagttggaagactctcaggactgcagcagagattttgtggagatccgtgaaggaaatgccacgggtcacttggtgggacgatactgtggaaactccttccctctcaattattcttccatcgttggacataccctgtgggtcagatttatctcagatggttctggcagcggcacgggcttccaggccacatttatgaagatatttggcaatgataatattgtgggaactcatgggaaagtcgcctctcctttctggcctgaaaactacccacataactccaattaccaatggacagtaaatgtgaatgcatctcacgttgtccatggtagaatcttggagatggacatagaagaaatacaaaactgctattatgacaaattaaggatctatgatgggcctagcattcacgcccgcctaattggagcttactgtggtacccagactgaatctttcagctccactggaaattctttgacatttcatttttactccgactcttcaatctcagggaagggattccttctggagtggtttgcagtggatgcacctgatggtgttttacctaccattgctccaggtgcttgtggtggcttcctgaggacgggagatgcacccgtgtttctcttctccccgggctggcctgacagttacagtaatagagtggactgtacgtggctcatccaggctcccgactctaccgtggaactcaacattctttccctggacattgaatctcaccgaacgtgtgcctatgatagccttgtgatacgagatggagataataacttggcccagcagctagcagttctctgtggcagagagatccctgggcccatccggtctactggagagtacatgttcatccgcttcacctcggactccagtgtaaccagggcaggcttcaatgcatcctttcacaagagctgcggtggatatttgcatgcagacagagggatcatcacgtcccccaagtatccagagacttacccatccaacctcaactgttcttggcacgtcctggtccaaagtggcctgaccattgctgtccattttgaacagcctttccagattccaaatggagattcttcttgcaaccagggggattacttggtgctaagaaatggtcctgatatctgttctccacccttgggaccccctggaggaaatggtcatttttgtggcagtcatgcttcatcaactctgttcacctcggataatcaaatgtttgttcagtttatttctgatcacagtaatgaagggcaaggatttaaaatcaaatatgaggcaaagagtttagcctgtgggggcaacgtctacatccatgatgctgattctgctgggtatgtgacctcccccaaccaccctcataattatcccccgcacgctgattgcatttggatcttagcggctccaccggaaacacgcatacagctgcaatttgaagatcgattcgatattgaagtaacacccaactgtacttccaactaccttgagttgcgggatggagtggattcggatgcaccaatactttccaaattttgtgggacatctttgcccagcagtcagtggtcctcaggagaggttatgtatttgagatttcgatctgacaacagccccacacatgtgggattcaaggccaagtattctatagctcagtgtgggggaagagtaccagggcaaagtggtgttgttgaaagcattggacatccaacacttccatacagagacaacttattctgtgagtggcatctccaggggctctctggacactatctcaccatctcttttgaagactttaaccttcagaattcttctggctgtgaaaaagacttcgtggagatctgggacaatcatacctctggaaacatcttgggcagatactgtggaaacaccattcctgacagcatagacacttctagcaatactgctgtggtcaggtttgtcacagacggctctgtgactgcctcaggattcagactgcgatttgaatccagtatggaagagtgtggtggggatcttcagggctctattggaacatttacttctcccaactacccgaacccaaatcctcatggccggatctgcgagtggagaatcactgccccggagggaaggcggatcaccctaatgtttaacaacctgaggctggccacgcatccgtcctgcaacaatgagcatgtgatagtattcaatggcattagaagtaactcaccccagctagagaaactgtgtagtagtgtgaatgtaagcaatgagattaaatcttcaggaaacacaatgaaagtcatttttttcacggatggatccaggccatatggcggcttcactgcttcctatacctccagtgaagatgcagtgtgtggtgggtctcttccaaatactcctgaaggaaactttacttctcctggctatgacggagtcaggaattactcaagaaacctgaactgcgaatggactctcagcaatccaaatcagggaaattcatccatttccattcactttgaagatttttacctagaaagtcaccaagactgtcaatttgatgtcctcgagtttcgagtgggtgatgctgatgggcccctgatgtggagactttgtggtccttcaaagcctacattgccattggttataccttattctcaggtatggattcactttgtcaccaacgaacgtgtagaacacattggattccatgcaaagtattcctttacagattgtggcggaatacagataggtgacagtggagtgatcacaagccccaactatccaaatgcttatgacagcctgacccactgctcttcgctgttggaggccccacaagggcacaccatcactctcacatttagtgactttgatattgaaccccatacaacttgtgcttgggactctgtcactgtcaggaatggtgggtcccctgaatcacccatcataggacaatactgtggaaattcaaaccccaggacaatacagtcaggttccaatcagctggtcgtgacttttaactcagaccattcattgcaaggtggtggattttatgctacgtggaacacacaaactttaggttgtggtggaatatttcattctgataatggtacaatcagatcccctcactggcctcagaattttcccgaaaacagcagatgttcctggacggccattactcacaaaagtaaacacttggagatcagctttgacaacaacttcctaatccccagcggtgatggacaatgtcagaatagcttcgtgaaggtgtgggcaggaactgaggaggtggacaaagccctgctagccactggctgtgggaacgtggctccgggtcccgttatcacaccaagtaacacattcactgccgtcttccagtctcaggaggcaccagctcagggcttctccgcgtcctttgttagccgatgtggaagtaatttcactggcccttcaggttacatcatttctccaaattacccaaaacaatatgacaacaacatgaattgcacctatgtcatagaggctaatcctctgtcagtggtcctcttgacttttgtgtccttccacttagaagctcgttccgctgtgacgggaagctgtgtcaacgatggcgtgcacattatcagaggttacagcgtcatgtccaccccatttgctactgtgtgtggggatgagatgccagctcccctcaccatcgctgggccggttctgcttaacttctactccaacgagcaaatcacagacttcggattcaagttttcctataggataatctcctgtggtggtgtgttcaatttctcttctggaatcatcacaagtcctgcctattcatacgcagactacccaaatgatatgcactgtctgtataccatcaccgttagtgacgacaaggtgatcgagctcaagttcagtgattttgatgtggttccctccacctcctgctcccatgactacctggcaatttacgatggtgccaataccagcgatccccttcttggcaaattctgcggttccaagcgcccaccaaatgtgaagagcagcaataatagtatgctcctggtgttcaagacagattcatttcagacagcaaaaggctggaagatgtctttccggcagacattggggcctcagcaaggatgtggtggttatctgacaggctcgaataatacctttgcctctcctgattctgattcgaatggaatgtatgacaagaatttaaactgtgtatggatcataattgcacctgtaaacaaagtaattcacctcaccttcaatacatttgctctggaggcagcaagtactaggcaaagatgcctttatgattatgtaaagttatatgatggggatagtgaaaatgcgaacttggctggaacgttttgtggttccacagtacctgctccttttatctcttctggtaacttccttacggttcaattcatcagtgacttaacattagagagggaaggatttaatgctacatacaccatcatggacatgccttgtggtggaacatacaatgcaacttggaccccacaaaatatttcatcacccaattcatcagacccagatgtcccattttccatctgtacttgggtcattgattcccctccgcatcagcaggtcaagataactgtgtgggcattacagctgacctcgcaagactgcacgcagaattacttacagcttcaggactcaccgcagggtcacggaaattcaagatttcagttctgtggcagaaatgcttcggctgtgccagtgttttattcttctatgagtactgcaatggtcattttcaaatctggagttgtaaacagaaactctagaatgagtttcacctatcagattgcagattgcaacagagactatcacaaggcatttggcaacctgagaagccctggatggccagataactacgacaatgacaaggattgcaccgttactctcacagccccccagaaccacaccatttccctcttttttcattcacttggcatcgagaactcagttgaatgcagaaacgatttcttggaggtgagaaatggaagtaacagcaattcaccattactgggcaagtactgtggaactctgctgccaaaccctgtcttctctcaaaataatgaactatacctacgatttaagagtgatagtgtaacttctgatcgtggatatgaaatcatctggacttcatcaccctctggatgtggtggaactctttatggagacagaggctcattcaccagccccggctatccaggcacatacccaaacaacacgtactgcgagtgggtccttgttgctcctgctggaaggcttgtcaccatcaacttctacttcatcagcattgacgatccaggagactgtgtccagaactatctcacactctatgatgggcccaacgccagctctccatcctctggaccatactgcggaggcgacaccagcatagctcccttcgtggcttcctcaaatcaggtcttcataaaatttcatgctgattatgcacggcgtccatccgcattccgattaacttgggacagctaagtgggtaacaactcgtgttcactcagcactttccctctgcagcacgctggacagcactctgccatcctgatacatgacccctgctgatgccacagagaataagctgaacttgtatggtttttcaccaaaccatggatagaatcaatatttgtaggccaggcgtggtggctcacccccctgtattctcagcactttgggaggccgaggcaggttgatcacctgaggtcaggagtttgagactagcctggccagcatggtgaaacctcatctctctaacaatataataattagccaggcgtggtggtgggtgcctgtaattccagccactcgagaggctgaggcaggagaattgcttgaacccaggaggcagaggttgcagtgagctaagatcacaccactacactccagcctgggcgagacggcaagactccatctcaaaaaaaaaagaaacaaaaaaaaccagaatcaatatttgtacattttctcgaacatagaatatagcttctttagtcttgagtgtgcatttcattctaatattttgagctgaaatttaaaaaaactttgaaagagttggaaatgattatggcatatgtgacatacatttttaaaagttaataataatagccaggggcagtggctcatacccataatcccagcacgctgggaggccatgatgggaggattgcttgaacctaggagtttgagaccagcctgggcaacaaagtgagacctgatttttacaaaaaatcaaaaaattagccaggcatggtggcatgcacccgtggttccagctacacaggaggttgaagcaggaggatcacttgagcccagtaggttaaggctgcagtgaaaccctgtgaattaaccactgtactccagcctgggtgacagactgagaccctatctcaaaaatgacaacaagaacaacaaaagttaatgataatatagaagcataaatttcctgtgaatgttcaattacacataataaacattattgaattgtacacaa

SEQ ID NO: 1288 - DNA, 1754 bp, Homo Sapiens
  NM_001081559
cccggcatccctcgggcggcggcggcggcggcggcgaggcgaagcgaaggaggagtgtgtgcggcggggccggcggcgggtaaaggcgagaaggctgcaggagaccgagggggagccgggccggtggggccgccgccgccgccatgcaggaaatcatcgccagcgtggaccacatcaagtttgacttggagatcgcggtggagcagcagctgggggcgcagccgctgcccttccccggcatggacaagtcgggcgctgctgtctgtgaattctttttgaaagctgcctgcggcaaagggggcatgtgtccgtttcgccacatcagtggtgagaagacagttgtgtgcaaacactggctgcgtggcctatgcaagaaaggggaccagtgtgagttcctgcatgagtatgacatgaccaagatgcccgagtgctacttctactccaagttcggggagtgcagcaacaaggaatgtcccttcctgcacatcgaccccgagtccaagatcaaggactgtccttggtatgaccgtggcttctgcaagcacggtcccctctgcaggcaccggcacacacggagagtcatctgtgtgaattacctcgtgggattctgcccggaggggccctcgtgtaaattcatgcaccctcgatttgaactgcccatgggaaccaccgagcagcccccactgccgcagcagacacagcctccagcaaagcagagaaccccgcaggtcatcggggtcatgcagagtcaaaacagcagcgcgggcaaccggggaccccggccactggagcaggtcacctgttacaagtgtggcgagaaaggacactacgccaacagatgcaccaaagggcacttggcctttctcagtggacagtgacagcagctggagccagctccgagcagcccgggggccccgctgttgggagtgtgcatttaactgtttcatgcgcttgttggcgcgactgtggctcgagctggcccgcagacacgtgggtttcatcactctgaggggccacgtctgttagtttcctatcattttgccttagtattttttgaaaaagggacatgtgtcctgtgggtccctgcagtcgacatcatgtttggctgggcatcgatgcctcctttctgggactcccggcacaactcccctcatccagggagggaggcagctgctggggaggggcttggctaggtagttctgtgtggcggtggtcattcccctcattaaacaccagttcttggtgacgccaggggctggtaggtcattcaaagctgtggccagctcacgcctgcttcctccctccctgccctgctgaatcctaaagctgtgcctatatctgtgatttgaatgagggagccctttggggcaaattcaggtgcccccattgcctcaggctggccctggtcccaggtggcagcggttgaggaggggtacagggctctcaagcctgaggttttcttctctgggcttaattttctcttggggtacgtgcctgacagtgtttaaggtgtccgttgaactggagttgcagacttttaaatagatgaccccttcagatcatctgtgcctacctcctgcccatcaggcgtctacactgtcactcagacacctgtggcatgtggaggagactgccctgtcctgagcctggaaaatgtgaaactgtctcctgcaacctgctgggcatgtgggcctggctgtgttcaattgcaagaacaatttttatgaaatggattaaagcttgttttttaaaaa

SEQ ID NO: 1289 - DNA, 13416 bp, Homo Sapiens
  NM_001081640
ggggcatttccgggtccgggccgagcgggcgcacgcgcgggagcgggactcggcggcatggcgggctccggagccggtgtgcgttgctccctgctgcggctgcaggagaccttgtccgctgcggaccgctgcggtgctgccctggccggtcatcaactgatccgcggcctggggcaggaatgcgtcctgagcagcagccccgcggtgctggcattacagacatctttagttttttccagagatttcggtttgcttgtatttgtccggaagtcactcaacagtattgaatttcgtgaatgtagagaagaaatcctaaagtttttatgtattttcttagaaaaaatgggccagaagatcgcaccttactctgttgaaattaagaacacttgtaccagtgtttatacaaaagatagagctgctaaatgtaaaattccagccctggaccttcttattaagttacttcagacttttagaagttctagactcatggatgaatttaaaattggagaattatttagtaaattctatggagaacttgcattgaaaaaaaaaataccagatacagttttagaaaaagtatatgagctcctaggattattgggtgaagttcatcctagtgagatgataaataatgcagaaaacctgttccgcgcttttctgggtgaacttaagacccagatgacatcagcagtaagagagcccaaactacctgttctggcaggatgtctgaaggggttgtcctcacttctgtgcaacttcactaagtccatggaagaagatccccagacttcaagggagatttttaattttgtactaaaggcaattcgtcctcagattgatctgaagagatatgctgtgccctcagctggcttgcgcctatttgccctgcatgcatctcagtttagcacctgccttctggacaactacgtgtctctatttgaagtcttgttaaagtggtgtgcccacacaaatgtagaattgaaaaaagctgcactttcagccctggaatcctttctgaaacaggtttctaatatggtggcgaaaaatgcagaaatgcataaaaataaactgcagtactttatggagcagttttatggaatcatcagaaatgtggattcgaacaacaaggagttatctattgctatccgtggatatggactttttgcaggaccgtgcaaggttataaacgcaaaagatgttgacttcatgtacgttgagctcattcagcgctgcaagcagatgttcctcacccagacagacactggtgacgaccgtgtttatcagatgccaagcttcctccagtctgttgcaagcgtcttgctgtaccttgacacagttcctgaggtgtatactccagttctggagcacctcgtggtgatgcagatagacagtttcccacagtacagtccaaaaatgcagctggtgtgttgcagagccatagtgaaggtgttcctagctttggcagcaaaagggccagttctcaggaattgcattagtactgtggtgcatcagggtttaatcagaatatgttctaaaccagtggtccttccaaagggccctgagtctgaatctgaagaccaccgtgcttcaggggaagtcagaactggcaaatggaaggtgcccacatacaaagactacgtggatctcttcagacatctcctgagctctgaccagatgatggattctattttagcagatgaagcatttttctctgtgaattcctccagtgaaagtctgaatcatttactttatgatgaatttgtaaaatccgttttgaagattgttgagaaattggatcttacacttgaaatacagactgttggggaacaagagaatggagatgaggcgcctggtgtttggatgatcccaacttcagatccagcggctaacttgcatccagctaaacctaaagatttttcggctttcattaacctggtggaattttgcagagagattctccctgagaaacaagcagaattttttgaaccatgggtgtactcattttcatatgaattaattttgcaatctacaaggttgcccctcatcagtggtttctacaaattgctttctattacagtaagaaatgccaagaaaataaaatatttcgagggagttagtccaaagagtctgaaacactctcctgaagacccagaaaagtattcttgctttgctttatttgtgaaatttggcaaagaggtggcagttaaaatgaagcagtacaaagatgaacttttggcctcttgtttgacctttcttctgtccttgccacacaacatcattgaactcgatgttagagcctacgttcctgcactgcagatggctttcaaactgggcctgagctatacccccttggcagaagtaggcctgaatgctctagaagaatggtcaatttatattgacagacatgtaatgcagccttattacaaagacattctcccctgcctggatggatacctgaagacttcagccttgtcagatgagaccaagaataactgggaagtgtcagctctttctcgggctgcccagaaaggatttaataaagtggtgttaaagcatctgaagaagacaaagaacctttcatcaaacgaagcaatatccttagaagaaataagaattagagtagtacaaatgcttggatctctaggaggacaaataaacaaaaatcttctgacagtcacgtcctcagatgagatgatgaagagctatgtggcctgggacagagagaagcggctgagctttgcagtgccctttagagagatgaaacctgtcattttcctggatgtgttcctgcctcgagtcacagaattagcgctcacagccagtgacagacaaactaaagttgcagcctgtgaacttttacatagcatggttatgtttatgttgggcaaagccacgcagatgccagaagggggacagggagccccacccatgtaccagctctataagcggacgtttcctgtgctgcttcgacttgcgtgtgatgttgatcaggtgacaaggcaactgtatgagccactagttatgcagctgattcactggttcactaacaacaagaaatttgaaagtcaggatactgttgccttactagaagctatattggatggaattgtggaccctgttgacagtactttaagagatttttgtggtcggtgtattcgagaattccttaaatggtccattaagcaaataacaccacagcagcaggagaagagtccagtaaacaccaaatcgcttttcaagcgactttatagccttgcgcttcaccccaatgctttcaagaggctgggagcatcacttgcctttaataatatctacagggaattcagggaagaagagtctctggtggaacagtttgtgtttgaagccttggtgatatacatggagagtctggccttagcacatgcagatgagaagtccttaggtacaattcaacagtgttgtgatgccattgatcacctatgccgcatcattgaaaagaagcatgtttctttaaataaagcaaagaaacgacgtttgccgcgaggatttccaccttccgcatcattgtgtttattggatctggtcaagtggcttttagctcattgtgggaggccccagacagaatgtcgacacaaatccattgaactcttttataaattcgttcctttattgccaggcaacagatcccctaatttgtggctgaaagatgttctcaaggaagaaggtgtctcttttctcatcaacacctttgaggggggtggctgtggccagccctcgggcatcctggcccagcccaccctcttgtaccttcgggggccattcagcctgcaggccacgctatgctggctggacctgctcctggccgcgttggagtgctacaacacgttcattggcgagagaactgtaggagcgctccaggtcctaggtactgaagcccagtcttcacttttgaaagcagtggctttcttcttagaaagcattgccatgcatgacattatagcagcagaaaagtgctttggcactggggcagcaggtaacagaacaagcccacaagagggagaaaggtacaactacagcaaatgcaccgttgtggtccggattatggagtttaccacgactctgctaaacacctccccggaaggatggaagctcctgaagaaggacttgtgtaatacacacctgatgagagtcctggtgcagacgctgtgtgagcccgcaagcataggtttcaacatcggagacgtccaggttatggctcatcttcctgatgtttgtgtgaatctgatgaaagctctaaagatgtccccatacaaagatatcctagagacccatctgagagagaaaataacagcacagagcattgaggagctttgtgccgtcaacttgtatggccctgacgcgcaagtggacaggagcaggctggctgctgttgtgtctgcctgtaaacagcttcacagagctgggcttctgcataatatattaccgtctcagtccacagatttgcatcattctgttggcacagaacttctttccctggtttataaaggcattgcccctggagatgagagacagtgtctgccttctctagacctcagttgtaagcagctggccagcggacttctggagttagcctttgcttttggaggactgtgtgagcgccttgtgagtcttctcctgaacccagcggtgctgtccacggcgtccttgggcagctcacagggcagcgtcatccacttctcccatggggagtatttctatagcttgttctcagaaacgatcaacacggaattattgaaaaatctggatcttgctgtattggagctcatgcagtcttcagtggataataccaaaatggtgagtgccgttttgaacggcatgttagaccagagcttcagggagcgagcaaaccagaaacaccaaggactgaaacttgcgactacaattctgcaacactggaagaagtgtgattcatggtgggccaaagattcccctctcgaaactaaaatggcagtgctggccttactggcaaaaattttacagattgattcatctgtatcttttaatacaagtcatggttcattccctgaagtctttacaacatatattagtctacttgctgacacaaagctggatctacatttaaagggccaagctgtcactcttcttccattcttcaccagcctcactggaggcagtctggaggaacttagacgtgttctggagcagctcatcgttgctcacttccccatgcagtccagggaatttcctccaggaactccgcggttcaataattatgtggactgcatgaaaaagtttctagatgcattggaattatctcaaagccctatgttgttggaattgatgacagaagttctttgtcgggaacagcagcatgtcatggaagaattatttcaatccagtttcaggaggattgccagaaggggttcatgtgtcacacaagtaggccttctggaaagcgtgtatgaaatgttcaggaaggatgacccccgcctaagtttcacacgccagtcctttgtggaccgctccctcctcactctgctgtggcactgtagcctggatgctttgagagaattcttcagcacaattgtggtggatgccattgatgtgttgaagtccaggtttacaaagctaaatgaatctacctttgatactcaaatcaccaagaagatgggctactataagattctagacgtgatgtattctcgccttcccaaagatgatgttcatgctaaggaatcaaaaattaatcaagttttccatggctcgtgtattacagaaggaaatgaacttacaaagacattgattaaattgtgctacgatgcatttacagagaacatggcaggagagaatcagctgctggagaggagaagactttaccattgtgcagcatacaactgcgccatatctgtcatctgctgtgtcttcaatgagttaaaattttaccaaggttttctgtttagtgaaaaaccagaaaagaacttgcttatttttgaaaatctgatcgacctgaagcgccgctataattttcctgtagaagttgaggttcctatggaaagaaagaaaaagtacattgaaattaggaaagaagccagagaagcagcaaatggggattcagatggtccttcctatatgtcttccctgtcatatttggcagacagtaccctgagtgaggaaatgagtcaatttgatttctcaaccggagttcagagctattcatacagctcccaagaccctagacctgccactggtcgttttcggagacgggagcagcgggaccccacggtgcatgatgatgtgctggagctggagatggacgagctcaatcggcatgagtgcatggcgcccctgacggccctggtcaagcacatgcacagaagcctgggcccgcctcaaggagaagaggattcagtgccaagagatcttccttcttggatgaaattcctccatggcaaactgggaaatccaatagtaccattaaatatccgtctcttcttagccaagcttgttattaatacagaagaggtctttcgcccttacgcgaagcactggcttagccccttgctgcagctggctgcttctgaaaacaatggaggagaaggaattcactacatggtggttgagatagtggccactattctttcatggacaggcttggccactccaacaggggtccctaaagatgaagtgttagcaaatcgattgcttaatttcctaatgaaacatgtctttcatccaaaaagagctgtgtttagacacaaccttgaaattataaagacccttgtcgagtgctggaaggattgtttatccatcccttataggttaatatttgaaaagttttccggtaaagatcctaattctaaagacaactcagtagggattcaattgctaggcatcgtgatggccaatgacctgcctccctatgacccacagtgtggcatccagagtagcgaatacttccaggctttggtgaataatatgtcctttgtaagatataaagaagtgtatgccgctgcagcagaagttctaggacttatacttcgatatgttatggagagaaaaaacatactggaggagtctctgtgtgaactggttgcgaaacaattgaagcaacatcagaatactatggaggacaagtttattgtgtgcttgaacaaagtgaccaagagcttccctcctcttgcagacaggttcatgaatgctgtgttctttctgctgccaaaatttcatggagtgttgaaaacactctgtctggaggtggtactttgtcgtgtggagggaatgacagagctgtacttccagttaaagagcaaggacttcgttcaagtcatgagacatagagatgatgaaagacaaaaagtatgtttggacataatttataagatgatgccaaagttaaaaccagtagaactccgagaacttctgaaccccgttgtggaattcgtttcccatccttctacaacatgtagggaacaaatgtataatattctcatgtggattcatgataattacagagatccagaaagtgagacagataatgactcccaggaaatatttaagttggcaaaagatgtgctgattcaaggattgatcgatgagaaccctggacttcaattaattattcgaaatttctggagccatgaaactaggttaccttcaaataccttggaccggttgctggcactaaattccttatattctcctaagatagaagtgcactttttaagtttagcaacaaattttctgctcgaaatgaccagcatgagcccagattatccaaaccccatgttcgagcatcctctgtcagaatgcgaatttcaggaatataccattgattctgattggcgtttccgaagtactgttctcactccgatgtttgtggagacccaggcctcccagggcactctccagacccgtacccaggaagggtccctctcagctcgctggccagtggcagggcagataagggccacccagcagcagcatgacttcacactgacacagactgcagatggaagaagctcatttgattggctgaccgggagcagcactgacccgctggtcgaccacaccagtccctcatctgactccttgctgtttgcccacaagaggagtgaaaggttacagagagcacccttgaagtcagtggggcctgattttgggaaaaaaaggctgggccttccaggggacgaggtggataacaaagtgaaaggtgcggccggccggacggacctactacgactgcgcagacggtttatgagggaccaggagaagctcagtttgatgtatgccagaaaaggcgttgctgagcaaaaacgagagaaggaaatcaagagtgagttaaaaatgaagcaggatgcccaggtcgttctgtacagaagctaccggcacggagaccttcctgacattcagatcaagcacagcagcctcatcaccccgttacaggccgtggcccagagggacccaataattgcaaaacagctctttagcagcttgttttctggaattttgaaagagatggataaatttaagacactgtctgaaaaaaacaacatcactcaaaagttgcttcaagacttcaatcgttttcttaataccaccttctctttctttccaccctttgtctcttgtattcaggacattagctgtcagcacgcagccctgctgagcctcgacccagcggctgttagcgctggttgcctggccagcctacagcagcccgtgggcatccgcctgctagaggaggctctgctccgcctgctgcctgctgagctgcctgccaagcgagtccgtgggaaggcccgcctccctcctgatgtcctcagatgggtggagcttgctaagctgtatagatcaattggagaatacgacgtcctccgtgggatttttaccagtgagataggaacaaagcaaatcactcagagtgcattattagcagaagccagaagtgattattctgaagctgctaagcagtatgatgaggctctcaataaacaagactgggtagatggtgagcccacagaagccgagaaggatttttgggaacttgcatcccttgactgttacaaccaccttgctgagtggaaatcacttgaatactgttctacagccagtatagacagtgagaaccccccagacctaaataaaatctggagtgaaccattttatcaggaaacatatctaccttacatgatccgcagcaagctgaagctgctgctccagggagaggctgaccagtccctgctgacatttattgacaaagctatgcacggggagctccagaaggcgattctagagcttcattacagtcaagagctgagtctgctttacctcctgcaagatgatgttgacagagccaaatattacattcaaaatggcattcagagttttatgcagaattattctagtattgatgtcctcttacaccaaagtagactcaccaaattgcagtctgtacaggctttaacagaaattcaggagttcatcagctttataagcaaacaaggcaatttatcatctcaagttccccttaagagacttctgaacacctggacaaacagatatccagatgctaaaatggacccaatgaacatctgggatgacatcatcacaaatcgatgtttctttctcagcaaaatagaggagaagcttacccctcttccagaagataatagtatgaatgtggatcaagatggagaccccagtgacaggatggaagtgcaagagcaggaagaagatatcagctccctgatcaggagttgcaagttttccatgaaaatgaagatgatagacagtgcccggaagcagaacaatttctcacttgctatgaaactactgaaggagctgcataaagagtcaaaaaccagagacgattggctggtgagctgggtgcagagctactgccgcctgagccactgccggagccggtcccagggctgctctgagcaggtgctcactgtgctgaaaacagtctctttgttggatgagaacaacgtgtcaagctacttaagcaaaaatattctggctttccgtgaccagaacattctcttgggtacaacttacaggatcatagcgaatgctctcagcagtgagccagcctgccttgctgaaatcgaggaggacaaggctagaagaatcttagagctttctggatccagttcagaggattcagagaaggtgatcgcgggtctgtaccagagagcattccagcacctctctgaggctgtgcaggcggctgaggaggaggcccagcctccctcctggagctgtgggcctgcagctggggtgattgatgcttacatgacgctggcagatttctgtgaccaacagctgcgcaaggaggaagagaatgcatcagttattgattctgcagaactgcaggcgtatccagcacttgtggtggagaaaatgttgaaagctttaaaattaaattccaatgaagccagattgaagtttcctagattacttcagattatagaacggtatccagaggagactttgagcctcatgacaaaagagatctcttccgttccctgctggcagttcatcagctggatcagccacatggtggccttactggacaaagaccaagccgttgctgttcagcactctgtggaagaaatcactgataactacccgcaggctattgtttatcccttcatcataagcagcgaaagctattccttcaaggatacttctactggtcataagaataaggagtttgtggcaaggattaaaagtaagttggatcaaggaggagtgattcaagattttattaatgccttagatcagctctctaatcctgaactgctctttaaggattggagcaatgatgtaagagctgaactagcaaaaacccctgtaaataaaaaaaacattgaaaaaatgtatgaaagaatgtatgcagccttgggtgacccaaaggctccaggcctgggggcctttagaaggaagtttattcagacttttggaaaagaatttgataaacattttgggaaaggaggttctaaactactgagaatgaagctcagtgacttcaacgacattaccaacatgctacttttaaaaatgaacaaagactcaaagccccctgggaatctgaaagaatgttcaccctggatgagcgacttcaaagtggagttcctgagaaatgagctggagattcccggtcagtatgacggtaggggaaagccattgccagagtaccacgtgcgaatcgccgggtttgatgagcgggtgacagtcatggcgtctctgcgaaggcccaagcgcatcatcatccgtggccatgacgagagggaacaccctttcctggtgaagggtggcgaggacctgcggcaggaccagcgcgtggagcagctcttccaggtcatgaatgggatcctggcccaagactccgcctgcagccagagggccctgcagctgaggacctatagcgttgtgcccatgacctccagtgatcccagggcaccgccgtgtgaatataaagattggctgacaaaaatgtcaggaaaacatgatgttggagcttacatgctaatgtataagggcgctaatcgtactgaaacagtcacgtcttttagaaaacgagaaagtaaagtgcctgctgatctcttaaagcgggccttcgtgaggatgagtacaagccctgaggctttcctggcgctccgctcccacttcgccagctctcacgctctgatatgcatcagccactggatcctcgggattggagacagacatctgaacaactttatggtggccatggagactggcggcgtgatcgggatcgactttgggcatgcgtttggatccgctacacagtttctgccagtccctgagttgatgccttttcggctaactcgccagtttatcaatctgatgttaccaatgaaagaaacgggccttatgtacagcatcatggtacacgcactccgggccttccgctcagaccctggcctgctcaccaacaccatggatgtgtttgtcaaggagccctcctttgattggaaaaattttgaacagaaaatgctgaaaaaaggagggtcatggattcaagaaataaatgttgctgaaaaaaattggtacccccgacagaaaatatgttacgctaagagaaagttagcaggtgccaatccagcagtcattacttgtgatgagctactcctgggtcatgagaaggcccctgccttcagagactatgtggctgtggcacgaggaagcaaagatcacaacattcgtgcccaagaaccagagagtgggctttcagaagagactcaagtgaagtgcctgatggaccaggcaacagaccccaacatccttggcagaacctgggaaggatgggagccctggatgtgaggtctgtgggagtctgcagatagaaagcattacattgtttaaagaatctactatactttggttggcagcattccatgagctgattttcctgaaacactaaagagaaatgtcttttgtgctacagtttcgtagcatgagtttaaatcaagattatgatgagtaaatgtgtatgggttaaatcaaagataaggttatagtaacatcaaagattaggtgaggtttatagaaagatagatatccaggcttaccaaagtattaagtcaagaatataatatgtgatcagctttcaaagcatttacaagtgctgcaagttagtgaaacagctgtctccgtaaatggaggaaatgtggggaagccttggaatgcccttctggttctggcacattggaaagcacactcagaaggcttcatcaccaagattttgggagagtaaagctaagtatagttgatgtaacattgtagaagcagcataggaacaataagaacaataggtaaagctataattatggcttatatttagaaatgactgcatttgatattttaggatatttttctaggttttttcctttcattttattctcttctagttttgacattttatgatagatttgctctctagaaggaaacgtctttatttaggagggcaaaaattttggtcatagcattcacttttgctattccaatctacaactggaagatacataaaagtgctttgcattgaatttgggataacttcaaaaatcccatggttgttgttagggatagtactaagcatttcagttccaggagaataaaagaaattcctatttgaaatgaattcctcatttggaggaaaaaaagcatgcattctagcacaacaagatgaaattatggaatacaaaagtggctccttcccatgtgcagtccctgtccccccccgccagtcctccacacccaaactgtttctgattggcttttagctttttgttgtttttttttttccttctaacacttgtatttggaggctcttctgtgattttgagaagtatactcttgagtgtttaataaagtttttttccaaaagta

SEQ ID NO: 1290 - DNA, 1185 bp, Homo Sapiens
  NM_001081976
ggtagagaccaccagttggaccaatggaagggtctccagcaggacccattgagcagaaggaggccaggtgggaaagctcctgggaagagcagccagactggacactgggctgcttgagtcctgagtcacaattcagaattcctgggctccctgggtgcattctatcattccagttgaaagtttgcttccttccagtcatgtggctcttcattctactctccttggctctcatttcagatgccatggtcatggatgaaaaggtcaagagaagctttgtgctggacacggcttctgccatctgcaactacaatgcccactacaagaatcaccccaaatactggtgccgaggctatttccgtgactactgcaacatcatcgccttctcccctaacagcaccaatcatgtggccctgagggacacagggaaccagctcattgtcactatgtcctgcctgaccaaagaggacacgggctggtactggtgtggcatccagcgggactttgccagggatgacatggattttacagagctgattgtaactgacgacaaaggaaccctggccaatgacttttggtctgggaaagacctatcaggcaacaaaaccagaagctgcaaggctcccaaagttgtccgcaaggctgaccgctccaggacgtccattctcatcatttgcatactgatcacgggtttgggaatcatctctgtaatcagtcatttgaccaaaaggaggagaagtcaaaggaatagaagggtaggcaacactttgaagcccttctcgcgtgtcctgactccaaaggaaatggctcctactgaacagatgtgactgaagatttttttaatttagttcataaagtgatgctacaacagaataatcaccatgacaactggcccacacctcagagactgattctgatctcccaggaattctgaaggaccctctatccttgacaacaatcatttgcagccaggtagcaacggcggtagtcagaggagctatgatagaccacacccaagcaaggctgccctcaaataacatctcaagatcttagttcttatgcattccatcagtcagaagtgaagaagaggtggagaatctggattggggaccaggaaatcacttgtattttgttagccaataaattcctagccagtgttgaatgaaaaaaaaaaaaaaaaaaaaaaaa

SEQ ID NO: 1291 - DNA, 2040 bp, Homo Sapiens
  NM_001082538
atccgccccctgcctcatccaggcttcgccccagtcagtctccggcagcttctcgcggcttcgcaagccccttcccgtgatgccccgcgcctggctgtcgcggttgccgggcaacgcgctgtccatgtcgcgggcctcgctgggactccctgggagatgaggccgcgaggtctcccgccgctcctggtggtgctcctgggctgctgggcctccgtgagcgcccagaccgatgccaccccggcggtgacgacagagggcctcaactccaccgaggcagccctggccaccttcggaactttcccgtcgaccaggccccccgggactcccagggctccagggccctcctccggccccaggcctaccccagtcacggacgttgctgttctctgtgtctgtgacttatccccagcacagtgtgacatcaactgctgctgtgatcccgactgcagctccgtggatttcagtgtcttttctgcctgctcagttccagttgtcacgggcgacagccagttttgtagtcaaaaagcagtcatctattcattgaattttacagcaaacccacctcaaagagtatttgaacttgttgaccagattaatccatctattttctgcattcatattacaaactataaacctgcattatcctttattaatccagaagtacctgatgaaaacaattttgatacattgatgaaaacatctgatggttttacattgaatgctgaatcatatgtttccttcacaaccaaactggatattcctactgctgctaaatatgagtatggggttcctctgcagacttcagattcgtttctgagatttccttcgtccctgacatcatctctgtgcactgataataaccctgcagcgtttctggtgaaccaggctgttaagtgcaccagaaaaataaatttagaacagtgtgaagaaattgaagccctcagcatggctttttacagcagcccggaaattctgagggtacctgattcaagaaaaaaggtccctatcactgttcagtccatcgtcattcagtctctaaataaaacgctcacccgacgggaggacactgatgtgctgcagccgactctcgtcaacgctggacactttagcctttgcgtgaatgttgttcttgaggtaaagtacagcctcacatacacagatgcaggtgaagtcaccaaagctgatctctcattcgttctggggacagttagcagcgtagtggtcccactgcagcaaaagtttgaaattcattttcttcaggaaaatacccagccagtccctctcagtggaaaccctggttatgtcgtggggctcccattagctgctggattccagcctcataaggggtctgggattattcagaccacaaatagatatggacagcttactattcttcatagcacaactgagcaagactgcttagcactggagggggtccggaccccagtattatttggttacactatgcaatctggctgtaaactaagactgactggagctctcccgtgtcagctcgtagcacagaaggtgaagagcctgctgtggggccagggcttcccagattacgtggccccttttggaaattcccaggcccaggacatgctggactgggtgcccatccacttcatcacccagtcattcaacaggaagcattttgttttgcaggattcctgccagctcccaggggctttggttatagaagtgaagtggactaaatacggatccctgctgaatccacaggccaaaatagtcaatgtaactgcaaatctaatttcatcctcctttcctgaggccaactcaggaaatgaaaggacgattcttatttccactgcggttacttttgtggatgtgtctgcacctgcagaggcaggcttcagagctccaccagccatcaatgccaggctgccctttaacttcttcttcccgtttgtttgacaatgctcagatgcatcagttccttaatatacacgtgaaatttgaaaactgtacattcggtgagattaaattttatatacaactagcaaaaaaaaaaaaaaaaaa

SEQ ID NO: 1292 - DNA, 5825 bp, Homo Sapiens
  NM_001082968
agagacgcggcaagggggcggggccaaaggccctaagctcggcgttccagagagtggggagggggcaagtgtcagtcaggacgggagtccggcgggttacagcggaggcctaggtggcagacagggggcccgggccgctgcgtgttgtccacccaagatggagttcctcctggggaacccgttcagcacaccagtggggcagtgcctcgaaaaggcaacagatggctccctgcaaagtgaggattggacgttgaatatggagatctgtgacatcatcaatgagacggaggaagggccaaaggatgccattcgagccctgaagaagcggctcaacgggaaccggaactacagagaggtgatgctggcattaacagtgctggagacatgtgtgaagaactgtggccaccgcttccacatccttgtggccaaccgagatttcatcgacagtgttctggtcaaaattatatctcccaagaacaaccctcccaccattgtacaggacaaagtgcttgctctgatccaggcatgggctgatgcctttcgaagcagtcctgatctcaccggcgttgtgcacatatatgaggagctgaagaggaaaggggttgaatttcccatggcagacttggacgctctgtctcccatacacacaccacagcggagtgtccctgaagtggatccagctgcgaccatgcccaggtcccaatcacagcagaggacaagtgctggttcctattcctcgccgcctcctgctccctactccgcaccgcaggccccagctctgagtgtgactggccccatcacagccaattcagaacagattgccaggctgcggagtgaactggacgtcgttcgaggaaacacaaaagtcatgtctgagatgttaacagaaatggtccctggacaggaggattcatctgatctggagttgctgcaggagctcaacaggacctgtcgggccatgcagcagcgcatcgtggagctcatctcccgcgtgtccaatgaggaggtcaccgaggagctgctgcatgtgaacgatgacctcaacaacgtcttccttcgatacgagaggttcgaacgatacaggtctggccgatccgttcaaaatgccagtaatggagtactgaatgaagtaaccgaagacaacttaatagacctggggccagggtctccagccgtggtgagcccaatggtggggaacacagcgcccccatcttccctctcctcccagcttgcaggcttagacttggggacagagagcgtcagtggcaccctcagttcactccagcaatgtaatccccgtgacggctttgacatgtttgcccagacgagaggaaactccttggctgagcagcgcaagacggtaacctatgaggatcctcaggctgtcggaggacttgcttctgcactagacaatcgaaaacagagttcagaagggatccccgttgcgcagccatctgtcatggacgacattgaggtgtggctcaggaccgacctgaagggtgatgatctggaggagggtgtcacaagtgaagagtttgataaattccttgaagaaagagccaaagctgctgaaatggttcccgacctcccctcgccccccatggaggctcctgccccagcctcaaacccttctggccggaagaagccagagcggtcagaggatgccctcttcgccctgtgagcagctctgtggtttgcctccccagatggcgggtccccgctcgcaccccgtggacaccgggcactggccactcctacatccccagctccacacggcctgcacacctgtgtttccatggaaatgccaccgtgtctgctcccaggcctcccactagtcaggaccagcttcagccacttcttttctctgagtggtgggacaactgcagccagagactctctcccctcccaccatgggcccctctgcccatgtttcctcccaggaagagcgggcagagtggcccagccccaggcagtgcttcctgagcagaccacccggactgtctttcctccacccgcccatggagaaagagcacgcccggccccgccctgtgctcacctctgcctggctcagcgaccttctcaggcattctgccctcctgggcccctctctccctgaaggggctttgtggcatctctggaagagcagggtgtgctgcactcatgggcctggtctcactccttggacttgtcaccttgtgacatttggcttatcagcatttgagaaggctctgctgggtctccatggtgggggtctctcaccttcttgaccctctctccatcattcagctgccagcccaggcttcacacccaagctggctcagcagccgagcctggcaccgagggtccctgcaggctccctgggcagggagagggccaaggacaattgggagggcagcaggcagcccgcagatggtggccatgtggcacgctgctgagacgacactaccaataaaccaaactgccacgcacacactgcaggctcacacccgcacacctggtcctggcttgtggagggacttgcactggaggtattgctctggcttgcctggggaagtgtcacagatgtgcacatgggccacactcagtgctgtggcctggcctgccgtagcctcacacatctgcctcaagagccagcagcaaacagctttgtggcatccttggaggttcccagtgactgagaggcctgggcagcactaaggcccctgctctgctccctggcataggccttggcctccttgcacagactctcctgacagtctggcctcctcccacctcagaggtcctctggccaccaatttatactctctccccaagctgatcctgaaggcaggcagagcagctaggggctggtaacatgtattcccatcccgtgtcctcactggtgtgtctcctggccatgggcaagggactcgggtcatcccaggccctggtccagccagacacctggccccacacctcccaccaggctgctgttgctcagaaggagaatactgcagctgtatgcatccccgtgtgtcttgggcccagctcgctgggtcagtctgctcctgtcccctccagcatgcactgcctaggtcagcacaggttcctgatccatggtgtagttagcccttcccacctggcaggacggcccagaccaccagccaagcagggaaagggggctgggcttgacgggagaagagaccagcgacatggtcgttggggagcattcaggatggcgacttcagctgggggtcatgctgagcaccaacaggaactattccagtgaagagcaagtgctgcccgacccaggaccctgtgccaggctagcagccctccagctccctccagagaggaaacctctgtctggctgagggtgggactagctgggatgtctcactccagttgctcaggttcacccaggaagctcctccgtggagtggccagcctgattctagccctgtcctctctggcagcacatgccacacctgcctgggccttctgctccctgatgcttgatgagcccctgcctcctcaatgtttctcaaagacagacccccctgaggccagcttgaatgtgaagactgctgaagttagctggcttcacttgagctgcagaaaaggtggctgggatggcccaggtgcacccagaggccccagccctttggctgcctttgggttgtgacttgggttgtctctgaggccctgccagagctgggcctgcgggtggtgggcggtccgacctcgggcagtcagtgctccgcagcctcagcactgcatcccagacccagtgtcctcagagggaagagccagcctccctgcctcatggaaccaggagtcccaaaaagtcaggagcctggaggctctgaaaggagcagggattccatagtgcgtgaagctgaaataggcgccctcctggggagcccccagcaaaactgtttttcatacccactcccagaactgccccgctccagctccagcgccagcgccagctggttgccaggcatcattggagaggcctggctgccccaggggcagcagggagtggtggacctgtatgggctggcaggaggccattggccatgctgacaagtgtcacctgccttcctagcctggagccacccctcaggtggcctgcttgcacctcctatccggaggtagcctgccccacctgtaggcagagggggctcttgcttgaggcctgcacaggaagcaagtatagccccggtgccccagagtgggttccacttagccctggcgagatggcctgtcctgagatctctgctcccagaccccaccatctggggagcacagtccttaggctgcctggtccaggaagggggtgcggctctgtcaggaaacctggactctcaaggcccaccagcctctccgtgagtgttagaaatcacagatacagtatatacttaattacactaaattattgctgggattccttataagcactaattatacctgattataggttaaaatatttattttgtcaaaatattttcttgggaatgtgtttaaccctttctgcgttcattgttgctgagatgtgaaaactaaccattccctcctgcctacctttttggccactgggcggcagagaatggcgctatgtgcagttgggcccctggcaccatgggcctttggcctgcctgctgcagagtagccctgcctgggcagtctccaggcactgagcaggccatctgtggccaggctgagagaatgactggctcgcttaccagcgtgcatgggacaaggagctttggagcctcaaggggttgttgctggcctgggctagagggaaaggtgaccatccgtctgtcctcctgtctttctattagcgcctccatgtgagtgatggtgccttggttcactagccttcccccaccaccccaccatgccacctggtggtcttggggcctgtgctgtcactccagcccctggggaggagaggacccagcccggagagttggggcaagggctccacatggcccaagggcaacagatgctcgcagggcagctgctgccgatgctcacgctcctgcccccctccttcccgctgccacaccccaccctgggcccccgcagacacgcatctctaactcagttgggcccagccttctggatggcttggggtaggccatgggcccacctggggccaggccagcccctggggcagctctggaagagcagtgtggaggagcacttgcttgcagcctggcttcagcctctggcactgctggagtggtccctgggagcttctgcactgtcggctttggggacgtctcacccacttgggttacagtaggccttccccacccagagagaagtgtttccaccccagagacattgtctgtcagcccctgaagtgctcgcctcccccagtgcccgtcaccagcccttcctatctgtggggtccaagtcaggcttcccctgcggccaccagccatagggagcagccatcagcccccgagtcagaactgcttctgtctgtccatacctccaggctctcccggagagggggacggatatttatttcctaaagtttgcacttaattgtgaggattctcaggattgttgggggctactgaaaagaggaatgtgttgaatgtcgcgtttgctgtccactcgtcctagaagtttagtgtttttgtcactgtcatgtgtttctgtgggcagagctggttctggagggtgggtcagtgcacccgaggctcagagcatccatccaccccactggccctccttccagataccctctctctaattgggttcttgcatgtaaaatactccacaataaataaataattgaacaaattaaaaaaaaaaaaaaaaaa

SEQ ID NO: 1293 - DNA, 7005 bp, Homo Sapiens
  NM_001083
ggcctggcgctccggccgctttgtcgaaagccggcccgactggagcaggacgaagggggagggtctcgaggccgagtcctgttcttctgagggacggaccccagctggggtggaaaagcagtaccagagagcctccgaggcgcgcggtgccaaccatggagcgggccggccccagcttcgggcagcagcgacagcagcagcagccccagcagcagaagcagcagcagagggatcaggactcggtcgaagcatggctggacgatcactgggactttaccttctcatactttgttagaaaagccaccagagaaatggtcaatgcatggtttgctgagagagttcacaccatccctgtgtgcaaggaaggtatcagaggccacaccgaatcttgctcttgtcccttgcagcagagtcctcgtgcagataacagtgcccctggaacaccaaccaggaaaatctctgcctctgaatttgaccggcctcttagacccattgttgtcaaggattctgagggaactgtgagcttcctctctgactcagaaaagaaggaacagatgcctctaacccctccaaggtttgatcatgatgaaggggaccagtgctcaagactcttggaattagtgaaggatatttctagtcatttggatgtcacagccttatgtcacaaaattttcttgcatatccatggactgatatctgctgaccgctattccctgttccttgtctgtgaagacagctccaatgacaagtttcttatcagccgcctctttgatgttgctgaaggttcaacactggaagaagtttcaaataactgtatccgcttagaatggaacaaaggcattgtgggacatgtggcagcgcttggtgagcccttgaacatcaaagatgcatatgaggatcctcggttcaatgcagaagttgaccaaattacaggctacaagacacaaagcattctttgtatgccaattaagaatcatagggaagaggttgttggtgtagcccaggccatcaacaagaaatcaggaaacggtgggacatttactgaaaaagatgaaaaggactttgctgcttatttggcattttgtggtattgttcttcataatgctcagctctatgagacttcactgctggagaacaagagaaatcaggtgctgcttgaccttgctagtttaatttttgaagaacaacaatcattagaagtaattttgaagaaaatagctgccactattatctctttcatgcaagtgcagaaatgcaccattttcatagtggatgaagattgctccgattctttttctagtgtgtttcacatggagtgtgaggaattagaaaaatcatctgatacattaacaagggaacatgatgcaaacaaaatcaattacatgtatgctcagtatgtcaaaaatactatggaaccacttaatatcccagatgtcagtaaggataaaagatttccctggacaactgaaaatacaggaaatgtaaaccagcagtgcattagaagtttgctttgtacacctataaaaaatggaaagaagaataaagttataggggtttgccaacttgttaataagatggaggagaatactggcaaggttaagcctttcaaccgaaatgacgaacagtttctggaagcttttgtcatcttttgtggcttggggatccagaacacgcagatgtatgaagcagtggagagagccatggccaagcaaatggtcacattggaggttctgtcgtatcatgcttcagcagcagaggaagaaacaagagagctacagtcgttagcggctgctgtggtgccatctgcccagacccttaaaattactgactttagcttcagtgactttgagctgtctgatctggaaacagcactgtgtacaattcggatgtttactgacctcaaccttgtgcagaacttccagatgaaacatgaggttctttgcagatggattttaagtgttaagaagaattatcggaagaatgttgcctatcataattggagacatgcctttaatacagctcagtgcatgtttgctgctctaaaagcaggcaaaattcagaacaagctgactgacctggagatacttgcattgctgattgctgcactaagccacgatttggatcaccgtggtgtgaataactcttacatacagcgaagtgaacatccacttgcccagctttactgccattcaatcatggaacaccatcattttgaccagtgcctgatgattcttaatagtccaggcaatcagattctcagtggcctctccattgaagaatataagaccacgttgaaaataatcaagcaagctattttagctacagacctagcactgtacattaagaggcgaggagaattttttgaacttataagaaaaaatcaattcaatttggaagatcctcatcaaaaggagttgtttttggcaatgctgatgacagcttgtgatctttctgcaattacaaaaccctggcctattcaacaacggatagcagaacttgtagcaactgaattttttgatcaaggagacagagagagaaaagaactcaacatagaacccactgatctaatgaacagggagaagaaaaacaaaatcccaagtatgcaagttgggttcatagatgccatctgcttgcaactgtatgaggccctgacccacgtgtcagaggactgtttccctttgctagatggctgcagaaagaacaggcagaaatggcaggcccttgcagaacagcaggagaagatgctgattaatggggaaagcggccaggccaagcggaactgagtggcctatttcatgcagagttgaagtttacagagatggtgtgttctgcaatatgcctagtttcttacacactgtctgtatagtgtctgtatttggtatatactttgccactgctgtatttttatttttgcacaacttttgagagtatagcatgaatgtttttagaggactattacatattttttgtatatttgttttatgctactgaactgaaaggatcaacaacatccactgttagcacattgataaaagcattgtttgtgatatttcgtgtactgcaaagtgtatgcagtattcttgcactgaggtttttttgcttggggattattttaaataattggtttttgtgttttctgaattaccattttttcaagaatgtttggaatctttcctttttcaaaagtaggttaggagcaaattatcatacattctgtgacatttaaagcctttataggatagtgaaaaatgctggctgagtggattttaagagaaataattgtatttgttaacagtgtctttttttaaaaagttaaggcactctgaaacaaatggaaagtcctatgaaactgtattgtaaagaaaacattatttaattgatatgctgttttgtgagagaacaggcaagacagaactttgtcacttcagtgcagtacatttttctgaaagctacccataaaatcactttcatctcacctacctgatgcaaagcaggtgaaaccttaggagatgatccagtcactgacttgattgagggataagtgtgatttagaaatggaatggccttggatgtctatcagtgaagaaaaatgttctgttagaagatctctctaagagtttttttccttctgagcttccttttcaaaataaaagtgacaattgtagcattgacttgaagtgagacatggttatagataagagagtacaaaatgactctttttcctgtcaattgaaatttaaagaaaagttttaattatataaatagcaaagggctattgccaatactagggtcaaaaatgaatttgagggaacagtgggtaagaaactttatgcctgaataacatttagcagtattgtgattgaaaaattgccatattttgatgtataggacaagtcaactgagatccagagaatcctggatgtgaatgctaaacactggcccttaactcacattcaatgtattttcttcccataacatttagtatagttaatattttcttagaatttgagcccatttaagtggattaatattctacatgtgtgcccctaaagacacatttactcaatattggagaagtagataatgaattaagcaactggtctaggaaaggaaaatttgtttcaaatatgcaggaatgtttggatttggggagagtagaaggagagatttgcttgatttgttaacttctacctccaacccacaaaaaagatatttgatctgagtttctatcactaatttggatagaaaatttctaagggacatggtaatccagcattctcaaggacctttcgccaaaatgtgttttccatctatgtcccgattcccctaaattttgcctaaaattcagtatgttccttaagtttttaaaattctgagtgtgtacaaatatcttgacataatgcagttttatttttatcattctggtaaaaaaacaaaaaatagaagcaaaacacattgtattgccattattttgtatttggtaaaggttaatctaggaagttaccaactgtttaatgctatatgtattgtatacttgtattttcaggatattttattttttttgccatacagataaaatttgtaaggttgcccctttgtggcactggtgtgtaaaatacacagactatcactaaaataatagttatatatacatacaggtgtatacttatgcatgcatacataaatccttagtatagaaaaattgcataaagaatagcaatctttaataaacctttttattacattgtgatttagcagttatgctaaaatatgtacttatgctttagtagtttgtttggtcccctctagtatgtgtcactgagaaattttttaaagacatggtagatcgtgtttagaggctttgtatgtgtgtcattttaataagcaagaagatatatttagattagaaatggtttggtctgcctttgaatattgtttattttactttactagttgagacattaaaggaagctgggcaatgcctattttatttctttgttggatattttagttcatacaaagcagagtacttctttagggctggttaattggttcaaataatttttaatttcctttctagtatcttctcaagttggaaaaatatacatacagtcctccttcaccttactctgtatttatattacccataactagcaagaagttcttgttctagattttttgtttgtttagttataacagagtaacataccatttaattacaatttttagccagaaaagtccccactattttactaacttgttaaaagatatctatataattgcctggccttatatttttcagtagattagaccgtgccaatcacaatcctgggtggatttgtgtaagtcacttaacctctgtgtgcctaaacaagttgtgcttttttaaaaggagttatgtttgggcaaagcctttgtcttcaagcagaatgtcacagaaggcagctactttataagccccaatgggccatggagaccactgtcagaaatgggatattagtctagagagaaggtgatctattcccacatgtcatttctaatgttgagtttccatgactgaacaaagagaatatatttattcagcttcacttgcagatcactagtgaatgtgagatttagagctcattgagtatattgcttcaaggtacaaacccaggatgatgatgttgtcaccactgtctcttaattttgaataatagtttcctttaataggagtattagagataagaaagtatatgaaaatatactggaaatattggattcttggagaaaactgttcagtcacagatatattcttgcctagcagtgaagtgcctttattttcagcatagcaaataaatattagacctgttccaatttgatctacaatttttttctgtgtttttcaccagattgtactcctaaaacttaacaggccatcacaagcaattgtcttttgtttacaagattgatttaatatgagaggatacaaaatgtcatcgttatcctctcttatgaacaactgtagtcaaaataaggtggcacaatttaattgttttgtatcagaaatacactgacccaccttttattgagtcctgccacatgttaggtaccgtgctctgctgtggagacagagcagtgaccccaaggagctcacggtccctgaaggaggtgctagagaagagacttagcttctgatactgccaatttaatgtgagaacatggggtatactgcatcatttccattttcatcaataacatatgttttatgcaccttctttacctgaaacttactaagaatctaccagtaaacaaacatcctgtctttttgcaagtatgaatcacttaacctgctgatagttgaagaacactttaggagttttgtattcttgtatatagtttattttttccatgtgctagccaggtaaagattacacagttcttctggactgttaaattgtgcatggttttggaccccttctgctctactacagagagtgaagaagaaagtattaaagctcactttaccattccatatacttactaaaagcctgtgtaaacatgtcttaatgaatgttgttgaaagcaatgtaaatagttgaaaatataaatttatattacagtttaagaaaaccttatgaggcatcactagccactgttaatatctatttgtattcttataccttttcaatatatttgaacaaatatagtttctggcactatttttatactaggaaaaggagttactatgtatattatgcttagcttttaaggcattttaaataaccatgaatgttgatttcattactttcctttcctccatcacgagagtcatttcagatgactctttcatgacaaaatcactttaaaggaacacttacctccgattcctgtataaagtcatgagatggtcaaggtggttttccattgtgcaaattcttcacctgtcagtggtttcctcattttgccatgctttgtaaaaataaaaagaatgatcaagtaggtatgaaaaaaaaaaaaaaaaaa

SEQ ID NO: 1294 - DNA, 6046 bp, Homo Sapiens
  NM_001083112
gggtggcggggggttgcaagtgggaagcctgctgttcagctgccggggctctccgcctccccccacctgtatgaggctgggtctggggaacctgtgctcagcattccaccccctggagcttgggcttggtcttccctgcgggtccctgcgctgacattcaggcggggagccaggaggcctggcgcgcctccagagcccgccgggggagccgggcgagggttctgggctctgacggcggggtcgcagggtcgcccgcctcctggacacgtctgtaggcctagggaagcctgccggccgggaggtacagagtaggagaagccagatcccagggcggacaacgagaagtcgtcaggctaagaaatggcatttcaaaaggcagtgaaagggacgattcttgttggaggaggtgctcttgcaactgttttaggactttctcagtttgctcattacagaaggaaacaaatgaacctggcctatgttaaagcagcagactgcatttcagaaccagttaacagggagcctccttccagagaagctcagctactgactttgcaaaacacatctgaatttgatatccttgttattggaggaggagcaacaggaagtggctgtgcgctagatgctgtcaccagaggactaaaaacagcccttgtagaaagagatgatttctcatcagggaccagcagcagaagcactaaattgatccatggtggtgtgagatatctgcagaaggccatcatgaagttggatattgagcagtataggatggtaaaagaagcccttcatgagcgtgccaacctgctagaaattgctccccatttatcagctccattgcctataatgcttccagtttacaagtggtggcagttaccttactactgggtaggaatcaagctgtatgatttggttgcaggaagcaattgcctaaaaagcagttatgtcctcagcaaatcaagagcccttgaacatttcccaatgctccagaaggacaaactggtaggagcaattgtctactatgacggacaacataacgatgcacggatgaaccttgccattgctctgactgctgccaggtatggggctgccacagccaattacatggaggtagtgagcttgctcaagaagacagacccccagacagggaaagtgcgtgtgagcggcgcacggtgcaaggatgtcctcacagggcaggaatttgacgtgagagccaaatgtgttatcaatgccacgggacctttcacggactctgtgcgcaaaatggatgataaagacgcagcagctatctgccagccaagtgctggtgtccatattgtgatgcctggttattacagcccagagagcatgggacttcttgacccagcgaccagtgatgggcgagttattttcttcttaccctggcaaaagatgacgatcgctggcactactgatactccaactgatgttacacaccatccaattccttcagaagaagatatcaacttcattttgaatgaagtgcgtaattacctgagttgtgatgttgaagtgagaagaggggatgtcctggcagcatggagtggaatccgtcctcttgttacagaccccaaatctgcagatactcagtctatctcccgaaatcatgttgttgatatcagtgagagtggccttattactatagcaggtggaaagtggacaacttatcggtctatggcagaagataccataaatgctgctgtcaaaactcataatttaaaagcaggaccaagtagaacagttgggcttttccttcaagggggtaaagattggagccccacactctacattaggcttgtgcaggattatggacttgaaagcgaggtggcacagcatcttgccgccacctatggtgataaggcctttgaggtggccaaaatggcaagtgtgactggcaaaaggtggcctattgttggagtacgtcttgtgtcagaatttccatatattgaagcagaggtgaaatatgggattaaggagtatgcctgcactgctgtggatatgatttcacgtcgtactcgcctggcctttctaaatgtccaggcagcagaggaagccctacccaggattgttgaactgatgggcagggaactgaattgggatgattataagaagcaggaacaacttgaaacagccaggaagtttctatattatgaaatgggctataaatctcgatcagaacagttaacagatcgctctgaaattagcctactgccttcagacattgacaggtataagaagagatttcataagtttgatgcagaccagaaaggctttattaccattgttgatgttcagcgtgtattagagagtatcaatgtccaaatggatgaaaatacactccatgaaattctaaatgaagttgatttgaataaaaatggacaggttgaactcaatgaatttttgcagctgatgagtgctattcaaaaaggaagggtatctggaagccggcttgctatactaatgaaaactgcagaagagaacctcgacagaagagttccaattccagtggaccgtagttgtggaggattgtgagtctgggcagtaaatccacagccaacaaacatagaaacgacaaatcaccatgtaacaaccagagatgactgaaaccactctgaaataatgaatgtggatagctgccttttttaacactagaaaacattccaaaactttaaggtgttggtgtatttgccagctttatttgctgtactttatttgtatttgccattcagtctagcttttaagtatatttttttctttttctcattttcaatgcacattagttttgcatctgttttgtgacctgttagatgtgacacattctctttttgtttattcccttattctaaatgagttctaaaaacataatattttggcaaaaattgaaaaaagctggagacattttgtgacatgcatacagatagcatgtgttattaaaaagagttgcctattgaaatgatcgtgtttctggagaaattaagcttatagacagcatgtgttattaaaaagagttacctattgaaatgatagtgtttctggagatttctcagccccatcttcctccagcttgtctaccttcctcatgcaaacaatattccacatttttatatctagagcatgactggctaactggagagggaaggaaaagtttagatctggttactggagcaagtctcaaagagaaactctgaaagcttccagaatcacaggtataagataaggatagcattgacatttgctgggagttacagtgatagtttcatctcagcagttcatttttttcttcagtcactgctggttttctttgactattatagttgccaggaagatccttgctcttcttactttaaaaccagcatttaagtggcaatttggatgtaataggatgagaccaaatttatctaattattacagtagtaatacatttaagagttaaaaatgtgtttttatatatccacatatgataacaaaagattcaattcccaagcctaaattttgaagcatgtggtattgtcaaatctagcttaccatcttttttgggggtacttgcaaccatagtaaaggaagatggaatagactttagttaactttaattataattatatgttaaataaggcacataaccagtttccaaggtcatcatggttgcttaaagtctttccccttctgtactccatggaaatattctcagtaaaccaaaaacaaaaatggaaaaataatcaccaacccccatcccgacacacacacagagtccaaagcaaaagtcagtgtgtattgaatttaacaagtaatgcagtttgggatgcttttgctacattttggtggcattttaactagttatctgaatatttattaatcgtacttcctcttgtaaagttaactacttacttttttgttgttgtttttttaacatcaggttctgtatctaataggagatgtaacactttatttcatggcaggtttttattgcagagacttgaagtcttagttttttaaactggcacataaaacactttttgctgttatttttatttatgtcaatactgcagagtatctttatgccttattcaagtggattctgagcctgtatgtcacaatgtaaacactggaggttcactcacctacgcactcacccaccacctctgaaagaaacagaaactgcagagaaagacagcatcttagctcattttgtttttaaatgaggttttagacgcttgccacttcctaagggaaatcctaaaacagagcaagtgatgctcccaggtatcactgtgaacttttttctttcaaagtgtgaatttttacactggctttttcatttttttaaagtaattgaagcttgtggctttacaacttagtgttttttgctatccagataacaagtttcattgtttagaacccagtgacacttaataggtagataaattgtcctttaaaatatcccagatgatatacacaatatggtacatttgtgctctctctctctgtttttctctctttctctttctagttagatcaagataacgatgacttgtaccctccctgattctgttacagtagggcccgggcagatctgtgtttgttaaacaggccttgtttgtgcatgctttgctatgaatgaagttcctttaaggacaaagaaaagcacacttttcttcttttgagcatatctgcttttactttaaatctgctaatttctaaaatgtagagtccttcaccaatcccagagactcaatttggaaatgaactgatttcaagccgttactgtgaataaagcaccccagcattttgtataagctcttaattaaacctgtacagcttctttacctgatttaagaaagggagacaagcaataggggggaataagcttcttcaaaattcattccaagcacaaaagaaattttttccctttgcatataaacttgacatcagttgattctgttggggtcggggtgggtatgcagggattgccttttattatcaagtgatttatttcaagagcctttgaggggattcaggtgaaggaacccccatctgtgctggagagttggatactcctttaaatagcccccaccacagtcataacaataatgataatgctggattatttgttaagccaaggttgtctgcctcatatccatcatgctgtttgcaatattcttgctttcaatcaatttatactgagtgtaactttaggatttctgctattaaatgcatgctctctatcctgcttcagtttctggctttgctttgtctgtttcaaaatatgtagcttcctcttttgtacaacaaaaaactcattctcacttttactaaatatactgtaggagtcatcattgatgttatttttctcttatgtatctgtaaagatttttggcatatgaatgtaatattaaagtcaatgatgctataacttgcgatgtttgcatcatgtcaacctttttgaaggagtgaaaaagccctactatgtttttaaatagcaagtgtaagctcagtgctagagtggatatacacaccgcatgttttcatatgtggcacttttatgtatcatgttgggttattgttctagactggactgttaaatactatgtttgaggctgggttgtcatttttataactgtcttggtgttttatggccattatttattacttttgatacacagaatgagctgcatgcatttatagagcaataagaggatgtatttaatgtgccttgtttttaactgaataagaactggaagcatgaatcaataaaactgattaaaatggtctatttgctagcattttgatgttacttgcagtcagataactttgattactgttgaagtttaaaaaaagtttgaaaatatttttacaaactgtgtttttgatgacacaaaagtgaaatatctacagagatagatgtaattttataagactgccagaattatttgtattaatttgttgctgtagcctttagggcatgacttctgtatttgtgcaatcctattctacaattacattcatcctattacaactcaaaaaaaaaaaaaaaaaa

SEQ ID NO: 1295 - DNA, 2458 bp, Homo Sapiens
  NM_001083537
gcttcctccaggtctcccggcaacggctgcggcctcgcccacgttatggcgcccgaggagaacgcggggaccgaactcttgctgcagggttttgagcgccgcttcctggcggtgcgcacactgcgctccttcccctggcagagcttagaggcaaagttaagagactcatcagattctgagctgctgcgggatattttgcagaagactgtgaggcatcctgtgtgtgtgaagcacccgccgtcagtcaagtatgcctggtgctttctctcagaactcatcaaaaagtcctcaggaggctcagtcacactctccaagagcacagccatcatctcccacggtaccacaggcctggtcacatgggatgccgccctctaccttgcagaatgggccatcgagaacccggcagccttcattaacaggactgtcctagagcttggcagtggtgccggcctcacaggccttgccatctgcaagatgtgccgcccccgggcatacatcttcagcgaccctcacagccgggtcctcgagcagctccgagggaatgtccttctcaatggcctctcattagaggcagacatcactggcaacttagacagccccagggtgacagtggcccagctggactgggacgtagcaatggtccatcagctctctgccttccagccagatgttgtcattgcagcagacgtgctgtattgcccagaagccatcgtgtcgctggtcggggtcctgcagaggctggctgcctgccgggagcacaagcgggctcctgaggtctacgtggcctttaccgtccgcaacccagagacgtgccagctgttcaccaccgagctaggccgggatgggatcagatgggaagcggaagctcatcatgaccagaaactgtttccctatggagagcacttggagatggcaatgctgaacctcacactgtaggactcacacatgactccaaagggattgtgagaatcaagtcactctcgtgggaagaatttttatatgggaaagtggataaaactttcattggactggaatgtttggagattattaaactccaaatcaggaatcaaaactgccctctaataagacattagctgtctaggcgtgtgggtgccccctttctgccagcagttctggttctcaagaaaatcatcataaatcagacatgaaaattctagctccaaaaatagcattttctttctgcaaataaaaacgtgtgtatcaaggatgacgttcccccaacgtggacacactcggttcctcagaaagccaagcccgctgcagctgccacatccctggacacactcggttcctcacaaagccaagcccgctgcagctgccacatccctggacacactcggttcctcacaaagccaagcccgctgcagctgccacatccctggacacactcggttcctcacaaagccaagcccgctgcagctgccacatcccagggcttatggtgcagcaggcgcttttttcaagacaggaatgaaagtgttaggaacacggcagaaaggtgacacctggagaccaaatgcaggatgaggagtactgcagaggtcacagggaagtcacagaacagtaatacgctagcaggggcatggggcatgaagaacagaagacaggaagcatttcagagactccaaagaagaaatcagggccaaccacagcttcccgggtcattcaccaggtgacaccactgccgtcatttcagcttctggccactgggaggcgctgctcgaaaggctttgccctgagactccaagaagctgcgggaaggacagcaggggccctggggttttagcctctggcccaggagttatgtgtccataaccaaagggagcacagtctgcacccagctctcatcccatcagagctgctgagactcttgcaggttcttccagaactggcttagcttgcctgcaggatcagaaaagtttgagaaaagcatctgcaaaatgctaaagagcagagcttaactcattgcctgtccccaccccatcccaggtcaccacttggatgaccccaggtccccgacccaacaacaacccctcccaagtccctaactccctcacttggacttgagacccttcacaacccccctcacttggacttgagacccttcacaacccagcagcgctccacttccaacttgacatcatgctttctggaaacttccccgtatgtcccactttcccacacttggtgccctggagcaccttccggcctctacatgctgtacgttcccctgtgagcaccctcctctcggcctctggccaacacagtcccacccatctgtgggtaacaagggggtgtgggtgttcttttcagccttgctaaactgtctgaatcaaggatcacaaactacagcctgcaggccaaatccagcccacagcctgtgtttgtaaataaagctttgttggaacaaagccacaaaaaaaaaaaaaaaaaaaaa

SEQ ID NO: 1296 - DNA, 5322 bp, Homo Sapiens
  NM_001083585
gcgcactgcttatttcccgctgtcaggatgaggaggcggaggtcggcggtcgggtccgtctctgcccgcggctgtggcggcgccggcggatccagccttagcggtttctctctgggcggcggcggcggcggctcggttgacgcctcctccgccagctgagcccgcgggagcccaggacgccgcttccccgcccatccccgctccccgaggccggccgcctggtcatggcgcagccgggcccggcttcccagcctgacgtttctcttcagcaacgggtagcagaattggaaaaaattaatgcagaatttttacgtgcacaacagcagcttgaacaagaatttaatcaaaagagagcaaaatttaaggagttatatttggctaaagaggaggatctgaagaggcaaaatgcagtattacaagctgcacaagatgatttgggacaccttcgaacccagctgtgggaagctcaagcagagatggagaatattaaggcgattgccacagtctctgagaacaccaagcaagaagctatagatgaagtgaaaagacagtggagagaagaagttgcttcacttcaggctgttatgaaagaaacagttcgtgactatgagcaccagttccaccttaggctggagcaggagcgaacacagtgggcacagtatagagaatccgcagagagggaaatagctgatttaagaagaaggctgtctgaaggtcaagaggaggaaaatttagaaaatgaaatgaaaaaggcccaagaggatgctgagaaacttcggtccgttgtgatgccaatggaaaaggaaattgcagctttgaaggataaactgacagaggctgaagacaaaattaaagagctggaggcctcaaaggttaaagaactgaatcattatctggaagctgagaaatcttgtaggactgatctagagatgtatgtagctgttttgaatactcagaaatctgttctacaggaagatgctgagaaactgcggaaagaattgcatgaagtttgccatctcttggagcaagagcgacaacaacacaaccagttaaaacatacgtggcagaaggccaatgaccagtttctggaatctcagcgtttactgatgagagacatgcagcgaatggagattgtgctaacttcagaacagctccgacaagttgaagaactgaagaagaaagatcaggaggatgatgaacaacaaagactcaataagagaaaggatcacaaaaaagcagatgttgaggaagaaataaaaataccagtagtgtgtgctttaactcaagaagaatcttcagcccagttatcaaatgaagaggagcatttagacagcacccgtggctcagttcattccttagatgcaggcttgctgttgccatctggagatcctttcagtaaatcggacaatgacatgtttaaagatggactcaggagagcacagtctacagacagcttgggaacctcgggctcattgcaatccaaagctttaggctataactacaaagcaaaatctgctggaaacctggacgagtcagattttggaccactggtaggagcagattcagtgtctgagaactttgatactgcatcccttgggtcactccagatgccaagtgggtttatgttaaccaaagatcaggaaagagcaatcaaggcgatgacaccagaacaagaagagacagcgtccctcctctccagcgttacccagggcatggagagtgcctatgtgtcccctagtggttatcgtttagttagtgaaacagaatggaatctcttgcagaaagaggtacataatgctggaaataaacttggtagacgttgtgatatgtgttccaattacgaaaaacagttacaaggaattcagattcaggaggctgaaacgagagaccaggtgaaaaaactacagctgatgctaaggcaagctaatgaccagttagagaagacaatgaaagataagcaggagctggaagacttcataaagcaaagcagcgaagattcgagtcaccagatctctgcactcgtcctaagagcccaggcctccgagatcttacttgaagagttacagcaggggctttcccaggcaaagagggatgttcaggaacagatggcggtgctgatgcagtcacgggaacaggtttcagaagagctggtgaggttacagaaagataatgacagtctccagggaaagcacagcctgcatgtgtcattacagcaagcagaagacttcatcctcccagacactacagaggcactgcgggagttggtattaaaataccgtgaggacatcattaatgtgcggacagcagcagaccacgtagaagaaaagctgaaggctgagatacttttcctaaaagagcagatccaagcagaacagtgtttaaaagaaaatcttgaagaaactctgcaactagaaatagaaaactgcaaggaggaaatagcttctatttctagcctaaaagctgaattagaaagaataaaagtggaaaaaggacaggctaccgttgaacaactaatgtttgaagagaagaataaagctcagagattacagacagaattagatgtcagtgagcaagtccagagggattttgtaaagctttcacagacccttcaggtgcagttagagcggatccggcaagctgactccttggagagaatccgggcaattctgaatgatactaaactgacagacattaaccagcttcctgagacatgacaccctcatggcaggattctagcctgcactttgggtttttaactcatctttagagcaacagtaattattatttaactcttaactgaagaaagagaagtcacaacaaaaggaagactggagaaatgcttacttctagagggagaagactgtgcggcacaggaaacagcaaacagtggggtgatctgcagcccagagaccttcaaatgcgaacactataaactccaggcttgattccaacaggcgtgggatcagatttggtgatggaaaaagcgctgtttccttgcctgctttctccaagacagattttcggaacacatttccctaccctaaagcgacatcccagtagtgtttggaattttctgttcatagatattggaagagagaatttgctttatctgttgtctagagctcatcagtaacagtattcagttagcagacagaagtgtagtatgctgtatgaatattttatattaaaatatgaaggtttgagagcaggccattggctactgactgtattttgttttccttttaccattttatcttatcttgctttggaggaccttaaatgctactgaaacttacctgagaaccataggactgtggcaaacaaaaccaattcatgaagtgaattaatgatgaggatctgaaaacttggctggggctatatatactggaagttgaaggttaaaggaaaagcacaagaaactttggaagcactttttctgcatacttagatgatcttcatgggcccacagggtaccaggataaagccgaactggtaccatctactcttttgaagtgttttagtctagttattggatcagtgaaaaacattagtatacgtttttaaataggctaatttttcaacttggatcattaggcttacgtactacttgtttcaaatgtgtcaaatacaaaaatggtaactaggttgacagatactttgtatttttcttttgaattcagacctggaatgtaagtaagtgacaatgcttatggaaagccagttagttagaattggaaatctgtcttgtcattttacaagcattagattcctttcctgtgtgaagaaagcctcagtgaaacaggtctttgccataactttatgaagtgctacagaaagcacaaagaattgattcatgttcatcaatacctgctgagagtactgtcccaggaatatccagtggatggattcatcatccaggaggttcaaaagtaagatggttttcaaatcatttttgagactggttgcataacagcagggtacctgaaagagccttctgggagttagtgaactaggtagattgttttgttcacataacgccaccatcaacttaaagtgaattgtctttgttataaatgaggtcactatggacttaccctaaagatcttctgtacttctctcttccataggacaaatgataagtactacatacctcatctcttgggttattattgtagtcttgcattcatggttatgaatttaaaaataaataccaattatggaaatagtactaaaggcttgccgcacatgaaacattattttaattggtttaaagtccctttataaagagtgctacatggtttagataaaggaaacatataactattgagttacaggggattttattaattataaaatgcaatcaatttaaattacgtaggtttaagactagtcccttggataagccccaagcgaatttgtcttcagattattaaaattagtgctgtaaatcagggtgggcaattcacagcctttctgaactgactgaactagagcttgcagtgaagtgttctgctgagactgagcaccttacagatatttttctccagaagatggtgctgggtaataaaatcatcacaattagggaatggttagtggtctctactgtggcaaatgccaactgttggaattcactttattgtagaaaaacccaaactgagactcttaagttttgtttagcaatgtgtttctggtatgaaacaaactactgtgtcactgtccaggtaggaaacaattctttcaactgggttttcagcataaatgggaactgatgtagaaggcaggatttagcccttctaggcaaaagaaaagctcagttgggtttcacgagtgttcctgtgcttatattcagtctgtgcctacatgttctcatgcatgtctaacctgatttacctcttacctgtaacctaccttatcatgtggcttttaattgacagtcactcagccatttctaagcagatatagtagtacctttcagaactcacattggcaagtgtaaaaagatgacttaaggtgaagtgaggacaaaatcacattctgcatactaacctatttttttctccctttaaggtgctaaacttgcacctcatgtccactcagtaacaagtattgggacgtagagcacagcctcactcagctctgaaaggtaatacagcttgtgaggaagtgagccagcagtggcctttgcaattgtggatcttgagctctgctctcagcagatttcaggtgtaaccatttgttaactgtactgaaggtgtgtcctcaagaagaaagtgttcaaattaaaaaagctgctgccaagtacaaaaaaaaaaaaaaaaaaaa

SEQ ID NO: 1297 - DNA, 2692 bp, Homo Sapiens
  NM_001083601
aagcaaccatttccgcttccgctggcggggtctcctccgtgagctccgggcctgtttgcctgctgaagtagagtcttagggtgaccccagggggacgtaatgtttccgagaagaaggacagaaagaagactgggagacaccggaactcgaaagaaaatcggtaacaaaatcatacagaaaggctgtacctggaggaaggaagtgcggagccagcctgagttgggagaagagctccagagagtgtgaatgacagaggtggtgccatccagcgcgctcagcgaggtcagcctgcgcctcctctgccacgatgacatagacactgtgaagcacctgtgtggcgactggttccccatcgagtacccagactcatggtatcgtgatatcacatccaacaagaagttcttttcccttgctgcaacctacagaggtgccattgtgggaatgatagtagctgaaattaagaacaggaccaaaatacataaagaggatggagatattctagcatccaacttctctgttgacacacaagtcgcgtacatcctaagtctgggcgtcgtgaaagagttcaggaagcacggcataggttccctcttacttgaaagtttaaaggatcacatatcaaccaccgcccaggaccactgcaaagccatttacctgcatgtcctcaccaccaacaacacagcaataaacttctatgaaaacagagacttcaagcagcaccactatctcccctattactactccattcgaggggtcctcaaagatggcttcacctatgtcctctacatcaacggcggccaccctccctggacgattttggactacatccagcacctgggctctgcactagccagcctgagcccctgctccattccgcacagagtctaccgccaggcccacagcctgctctgcagcttcctgccatggtcgggcatctcttccaagagtggcatcgagtacagccggaccatgtgatgtcggctgggcagccgccaccaggccccacccttcggccgcccgcagagcccgccttcctgtccatctgaccccttctgttttctgcaaggagctgccagccatctaactgggctcgtcggcctgccccagctgcaggcccggtgctacacgggctcgggaacagaacatcgtgggcatgcgcagagcatgcccatccgtggcaggctcttcagctcccctccctgcttctggaaacctctgcctgctgccctggccctgcccccctgcgcatgcaccgtccccagggctgacccagtgtggctgcattcactgggaggggcctgccctcactgggcctctcccactccgctgcctgttcttgcagctccttcctggaaagctggaggggactttctcctgcaagggaggaacgcaagtattatggacacacttgaccgtaaaggcacaggagcctcggaacaagggggcgcaataaagggaatggcccgtccccttccagaaccagcccaaagaagcctggggggtgaggagtggcccccactcctccatgaggggctgatgaggggtgggcagcctgggggaggctttcctcgcaagcacagagctctgaggctcagccccctggcacaggcggtcacgcatcaggacggttcctactcctcagcaccttccgtgcagttaccagtgccctgggaggtcacactgcccgtcggaccttggcatgctccattcagctgacctgctgaggacaggcatcgccgagactccttgggtcctccccgccctccctcatgctgccacaagctgctgctccaaggcctggccacatgcagacaggaggaagctgagctcgacattaggcctcaaggctgccatctgtcttgtagggcctggccttgtgggcagggggcagtcctgtgccttgtgggccctcagcctctgagggcagagatgctgtcagtgccgcaggtgcatcacatacttctagcatcctctccaccctgcattccaaatgctgcttgctgcctgccctgccctccgatgcaggggtggggtggggggcggagtcccgcccagcatagctgcagtgtcacaaagccatggcagagggtcctagcggcgccaccctgccccagcctgaggaggagggagagggaggaacaaccctgggcagacggggcctcagggacctgtgtccttccgcctccagagctgcccagccacgggctctcagggtgctggggcagccccaggtcccctcttgaactcagctggggccaggggccctcagaatgaaggcaggcaccaggcaggagcagcatccccctccttgacggtgctggcaggagggccgcgccatgctgactgcttgaacctctgctgacctgacagtgctggcgggagggccgcaccatgctgactgcctgaatctctgctgaggctgcctgcctgccgggcccagctcagcgccctctccactgcgaatcagtggcgatcatgtgatttctatttctgccccacagggtaagggacgagtcttctggaaggctctgccatggacatttgtcctcgggctcagaggccccaccctgccccacacctgcccctgatcactgcagtgtccagcccagtgttgaacagattgtagcgttctgtctcattacgagcaaataaatagactttcattggagttcgtcacaaaaaaaaaaaaaaa

SEQ ID NO: 1298 - DNA, 7658 bp, Homo Sapiens
  NM_001083605
actcacacctctccaggaaaagcagcagacaaatggggattgaaaaattcaaaccctccctctggtcctgggaggaaagggctgtctgaggggaaggctactggccggaaagcgccgctgtggctgagagcgaagtttcagagactcttatttaaactgggttgttacattcaaaaaaactgcggcaagttcttggttgtgggcctcctcatatttggggccttcgcggtgggattaaaagcagcgaacctcgagaccaacgtggaggagctgtgggtggaagttggaggacgagtaagtcgtgaattaaattatactcgccagaagattggagaagaggctatgtttaatcctcaactcatgatacagacccctaaagaagaaggtgctaatgtcctgaccacagaagcgctcctacaacacctggactcggcactccaggccagccgtgtccatgtatacatgtacaacaggcagtggaaattggaacatttgtgttacaaatcaggagagcttatcacagaaacaggttacatggatcagataatagaatatctttacccttgtttgattattacacctttggactgcttctgggaaggggcgaaattacagtctgggacagcatacctcctaggtaaacctcctttgcggtggacaaacttcgaccctttggaattcctggaagagttaaagaaaataaactatcaagtggacagctgggaggaaatgctgaataaggctgaggttggtcatggttacatggaccgcccctgcctcaatccggccgatccagactgccccgccacagcccccaacaaaaattcaaccaaacctcttgatatggcccttgttttgaatggtggatgtcatggcttatccagaaagtatatgcactggcaggaggagttgattgtgggtggcacagtcaagaacagcactggaaaactcgtcagcgcccatgccctgcagaccatgttccagttaatgactcccaagcaaatgtacgagcacttcaaggggtacgagtatgtctcacacatcaactggaacgaggacaaagcggcagccatcctggaggcctggcagaggacatatgtggaggtggttcatcagagtgtcgcacagaactccactcaaaaggtgctttccttcaccaccacgaccctggacgacatcctgaaatccttctctgacgtcagtgtcatccgcgtggccagcggctacttactcatgctcgcctatgcctgtctaaccatgctgcgctgggactgctccaagtcccagggtgccgtggggctggctggcgtcctgctggttgcactgtcagtggctgcaggactgggcctgtgctcattgatcggaatttcctttaacgctgcaacaactcaggttttgccatttctcgctcttggtgttggtgtggatgatgtttttcttctggcccacgccttcagtgaaacaggacagaataaaagaatcccttttgaggacaggaccggggagtgcctgaagcgcacaggagccagcgtggccctcacgtccatcagcaatgtcacagccttcttcatggccgcgttaatcccaattcccgctctgcgggcgttctccctccaggcagcggtagtagtggtgttcaattttgccatggttctgctcatttttcctgcaattctcagcatggatttatatcgacgcgaggacaggagactggatattttctgctgttttacaagcccctgcgtcagcagagtgattcaggttgaacctcaggcctacaccgacacacacgacaatacccgctacagccccccacctccctacagcagccacagctttgcccatgaaacgcagattaccatgcagtccactgtccagctccgcacggagtacgacccccacacgcacgtgtactacaccaccgctgagccgcgctccgagatctctgtgcagcccgtcaccgtgacacaggacaccctcagctgccagagcccagagagcaccagctccacaagggacctgctctcccagttctccgactccagcctccactgcctcgagcccccctgtacgaagtggacactctcatcttttgctgagaagcactatgctcctttcctcttgaaaccaaaagccaaggtagtggtgatcttcctttttctgggcttgctgggggtcagcctttatggcaccacccgagtgagagacgggctggaccttacggacattgtacctcgggaaaccagagaatatgactttattgctgcacaattcaaatacttttctttctacaacatgtatatagtcacccagaaagcagactacccgaatatccagcacttactttacgacctacacaggagtttcagtaacgtgaagtatgtcatgttggaagaaaacaaacagcttcccaaaatgtggctgcactacttcagagactggcttcagggacttcaggatgcatttgacagtgactgggaaaccgggaaaatcatgccaaacaattacaagaatggatcagacgatggagtccttgcctacaaactcctggtgcaaaccggcagccgcgataagcccatcgacatcagccagttgactaaacagcgtctggtggatgcagatggcatcattaatcccagcgctttctacatctacctgacggcttgggtcagcaacgaccccgtcgcgtatgctgcctcccaggccaacatccggccacaccgaccagaatgggtccacgacaaagccgactacatgcctgaaacaaggctgagaatcccggcagcagagcccatcgagtatgcccagttccctttctacctcaacggcttgcgggacacctcagactttgtggaggcaattgaaaaagtaaggaccatctgcagcaactatacgagcctggggctgtccagttaccccaacggctaccccttcctcttctgggagcagtacatcggcctccgccactggctgctgctgttcatcagcgtggtgttggcctgcacattcctcgtgtgcgctgtcttccttctgaacccctggacggccgggatcattgtgatggtcctggcgctgatgacggtcgagctgttcggcatgatgggcctcatcggaatcaagctcagtgccgtgcccgtggtcatcctgatcgcttctgttggcataggagtggagttcaccgttcacgttgctttggcctttctgacggccatcggcgacaagaaccgcagggctgtgcttgccctggagcacatgtttgcacccgtcctggatggcgccgtgtccactctgctgggagtgctgatgctggcgggatctgagttcgacttcattgtcaggtatttctttgctgtgctggcgatcctcaccatcctcggcgttctcaatgggctggttttgcttcccgtgcttttgtctttctttggaccatatcctgaggtgtctccagccaacggcttgaaccgcctgcccacaccctcccctgagccaccccccagcgtggtccgcttcgccatgccgcccggccacacgcacagcgggtctgattcctccgactcggagtatagttcccagacgacagtgtcaggcctcagcgaggagcttcggcactacgaggcccagcagggcgcgggaggccctgcccaccaagtgatcgtggaagccacagaaaaccccgtcttcgcccactccactgtggtccatcccgaatccaggcatcacccaccctcgaacccgagacagcagccccacctggactcagggtccctgcctcccggacggcaaggccagcagccccgcagggacccccccagagaaggcttgtggccacccccctacagaccgcgcagagacgcttttgaaatttctactgaagggcattctggccctagcaatagggcccgctggggccctcgcggggcccgttctcacaaccctcggaacccagcgtccactgccatgggcagctccgtgcccggctactgccagcccatcaccactgtgacggcttctgcctccgtgactgtcgccgtgcacccgccgcctgtccctgggcctgggcggaacccccgagggggactctgcccaggctaccctgagactgaccacggcctgtttgaggacccccacgtgcctttccacgtccggtgtgagaggagggattcgaaggtggaagtcattgagctgcaggacgtggaatgcgaggagaggccccggggaagcagctccaactgagggtgattaaaatctgaagcaaagaggccaaagattggaaaccccccacccccacctctttccagaactgcttgaagagaactggttggagttatggaaaagatgccctgtgccaggacagcagttcattgttactgtaaccgattgtattattttgttaaatatttctataaatatttaagagatgtacacatgtgtaatataggaaggaaggatgtaaagtggtatgatctggggcttctccactcctgccccagagtgtggaggccacagtggggcctctccgtatttgtgcattgggctccgtgccacaaccaagcttcattagtcttaaatttcagcatatgttgctgctgcttaaatattgtataatttacttgtataattctatgcaaatattgcttatgtaataggattattttgtaaaggtttctgtttaaaatattttaaatttgcatatcacaaccctgtggtagtatgaaatgttactgttaactttcaaacacgctatgcgtgataatttttttgtttaatgagcagatatgaagaaagcacgttaatcctggtggcttctctaggtgtcgttgtgtgcggtcctcttgtttggctgtgcgtgtgaacacgtgtgtgagttcaccatgtactgtactgtgattttttttttgtcttgttttgtttctctacactgtctgtaacctgtagtaggctctgacctagtcaggctggaagcgtcaggatatcttttcttcgtgctggtgagggctggccctaaacatccacctaatcctttcaaatcagcccggcaaaagctagactctcctcgtgtctacggcatctcttatgatcattggctgccatccaggaccccaatttgtgcttcagggggataatctccttctctcggatcattgtgatggatgctggaacctcagggtatggagctcacatcagttcatcatggtgggtgttagagaattcggtgacatgcctagtgctgagccttggctgggccatgagagtctgtatactctaaaaagcatgcagcatggtgcccctcttctgaccaacacacacacgacccctcccccaacacccccaaattcaagagtggatgtggccctgtcacaggtagaaaaacctatttagttaattctttcttggcccacagtctcccagaaatgatgttttgagtccctatagtttaaactccctctcttaaatggagcagctggttgaggctttctagatctgtttgcatcttctttaaaactaagtggtgagcatgcattgtggtgtagaggcaggcattatgtaggataagagctccggggggattcttcatgcaccagtgtttagggtacgtgcttcctaagtaaatccaaacattgtctccatcctccccgtcattagtgctctttcaatgtgatgtgggaaagcaggaggatggacacaccccactgaaagatgtaggcaggggcaggtctctcaaccaggcatatttttaaaagttgcttctgtactggttctcttcttttgctctgaggtgtgggctccctcatctcgtaaccagagaccagcacatgtcagggaagcacccagtgtcggctccccatccaaatccacaccagcaccttgttacagacaagaagtcagaggaaagggcggggtccctgcagggctgaagcctaagctactgtgaggcgctcacgagtggcagctcctgttactcccttttaaattacctgggaaatcttaacagaaaggtaatgggcccccagaaatacccacagcatagtgacctcagaccctgatactcaccacaaaacttttaagatgctgattgggagccgcttgtggctgctgggtgtgtgtgtgtgtgtgtgcgtgcgtgcgtgtgtgtgtgtctctgctggggaccctggccacccccctgctgctgtcttggtgcctgtcacccacatggtctgccatcctaacacccagctctgctcagaaaacgtcctgcgtggaggagggatgatgcagaattctgaagtcgacttccctctggctcctggcgtgccctcgctcccttcctgagcccagctcgtgttgcgccggaggctgcgcggcccctgatttctgcatggtgtagaactttctccaatagtcacattggcaaagggagaactggggtgggcggggggtggggctggcagggaattagaatttctctctctcttttaatagttttattttgtctgtcctgtttgttcatttggatgttttaatttttaaaaaaaaaaaaactttgctgatatttataattttgtatcataagaatgttttcctctacagtatttgtcatgccagtttataacaaaaaaaaatgcagggattttatttctattggaaacattacagctatgttttacttttggacagaatttttatttgtatagagtgcttactaatgttaaatagttcagagtatataacatttacattaaggactcatggtaggttttagggtaaggagtttaaaggaaataaatattcaaactgggtctcattgccaattttggtggaaatgagtttgtgtcatttcaattacaaagataaaagtatgccatataatttatttatatgaagatttatttttgtagtgtacatagtagtcatcaagtcttttgacagaagtatatttttaaagaatttatatgtgatgaatccataatgtctggaactttgctgagacatgagtgggcacagttttcattgtaaattacagcaaggaaagaaaatgtttaacagtgttaagagagtcagagcagagtggatattcatgcgattatgaagtgtttattagttaccattggcgacctagcatgcttctcatttcaaaccttggaaggtgaaaatgtacaaactctctaaataattaatgttcaaacactgatagaaattctaacatgaataaaaaataatataacttgttggttatatctttgtttgtagaatgctttttttctttaaaatacttgggagagacagttagtgttggagccatcagaaactgttgtttcatcttgctgaccttgtgacactcttcttttttgctctatctgatggagagagttttaggttttcctcctttttgttttgtataaatagtgggtataagcatagctctgttacatggatgtattacaaagtgggggctgagcttttagtgtgatcatcacccaaatagtgtacattgtacccattaattaatttcttatcacctgaccctatttttgttttctcataccaagaaacttcctaagttaaccatcaaaattagtccttctgtcatctctcttagcatacttatttcccttatgtgatgcctaataatgagggaacataaataaagccaaattcaaagataaaaaaaaaaaaaa

SEQ ID NO: 1299 - DNA, 6661 bp, Homo Sapiens
  NM_001083617
gtttcccggcatgcgccgcggaggaagagacggagtcgacaataacaaaccaagccgcggcggtgtccgcggccctgccgagccctcggcgttgcctcagaatcccccagtcgcctgggcccctcggctctgacaggccgcggccttctgtcccccggccccagacccagagccgaggggcctgctcgcgtccttgtccgcccggacccctccctgcctcctagagttcggggccgcggcgggcgggcgcccgggacgccggcggttgtgtcggcttagcggtgccgaatgggcggttggtaaccgctgccgaggactaggcggcggcggaagatggtgccgggggtcgctggctctgctgctgccgccggcgaaggaggaggcgttgccggttttctgagtttaaccagtaatgccattcagttgccaatctcaagcaaagcaaacataagccagttttaatctactttttaagaaaagtggtagtccttttcacagtgcctgacgtaactgtatcagagggtgaggtataagctcacagaattcagataaatcatcatgaagttatatgtatttctggttaacactggaactactctaacatttgacactgaacttacagtgcaaactgtggcagaccttaagcatgccattcaaagcaaatacaagattgctattcaacaccaggtgctggtggtcaatggaggagaatgcatggctgcagatcgaagagtgtgtacctacagtgctgggacggatacaaatccaatttttctttttaacaaagaaatgatcttatgtgatcgtccacctgctattcctaaaactaccttttcgacagaaaatgacatggaaataaaagttgaagaatctcttatgatgcctgcagtttttcatactgttgcttcaaggacacagcttgcattggaaatgtatgaagttgccaagaaactttgttctttttgtgaaggtcttgtacatgatgaacatcttcaacaccaaggctgggctgcaatcatggccaacctggaggactgttcaaattcataccaaaagctacttttcaagtttgaaagtatttattcaaattatctgcagtccatagaagacatcaagttaaaacttactcatttaggaactgcagtttcagtaatggccaagattccactgttggagtgcctaaccagacatagttacagagaatgtttgggaagactggattctttacctgaacatgaagactcagaaaaagctgagatgaaaagatccactgaactggtgctctctcctgatatgcctagaacaactaacgaatctttgttaacctcatttcccaagtcagtggaacatgtgtccccagataccgcagatgctgaaagtggcaaagaaattagggaatcttgtcaaagtactgttcatcagcaagatgaaactacgattgacactaaagatggtgatctgcccttttttaatgtctctttgttagactggataaatgttcaagatagacctaatgatgtggaatctttggtcaggaagtgctttgattctatgagcaggcttgatccaaggattattcgaccatttatagcagaatgccgtcaaactattgccaaacttgataatcagaatatgaaagccattaaaggacttgaagatcggctctacgccctggaccagatgattgctagctgtggccgactggtgaatgaacagaaagagcttgctcagggatttttagctaatcagaagagagctgaaaacttaaaggatgcatctgtattacctgatttatgcctgagtcacgcaaatcagttgatgattatgttgcaaaatcatagaaaactgttagatattaagcagaagtgtaccactgccaaacaagaactagcaaataacctacatgtcagactgaagtggtgttgctttgtaatgcttcatgctgatcaagatggagagaagttacaagctttgctccgcctcgtaatagagctgttagaaagagtcaaaattgttgaagctcttagtacagttcctcagatgtactgcttagctgttgttgaggttgtaagaagaaaaatgttcataaaacactacagggagtgggctggtgctttagtcaaagatggaaagagattatatgaagcagaaaaatcaaaaagggaatcctttgggaaattatttaggaagtcttttttaagaaatcgtctgtttaggggactggactcctggcccccttccttttgtactcaaaagcctcgaaagtttgactgtgaacttccagatatttcattaaaagatttacagtttctgcaatcattttgtccttcggaagttcagccattcctcagggttcccttactttgtgactttgaacctctacaccagcatgtacttgctctacataatttggtaaaagcagcacaaagtttggatgaaatgtcacagaccattacagatctactgagtgaacaaaaggcatctgtgagtcagacatccccacagtctgcttcttcaccaaggatggaaagtacagcaggaattacaactactacctcaccgagaactcctccaccactgactgttcaggatcccttatgtcctgcagtttgtcccttagaagaattatctccagatagtattgatgcacatacgtttgattttgaaactattccccatccaaacatagaacagactattcaccaagtttctttagacttggattcattagcagaaagtcctgaatcagattttatgtctgctgtgaatgagtttgtaatagaagaaaatttgtcgtctcctaatcctataagtgatccacaaagcccagaaatgatggtggaatcactttattcatcagttatcaatgcgatagacagtagacgaatgcaggatacaaatgtatgtggtaaggaggattttggagatcatacttctctgaatgtccagttggaaagatgtagagttgttgcccaagactctcacttcagtatacaaaccattaaggaagacctttgccactttagaacatttgtacaaaaagaacagtgtgacttctcaaattcattaaaatgtacagcagtagaaataagaaacattattgaaaaagtaaaatgttctctggaaataacactaaaagaaaaacatcaaaaagaactactgtctttaaaaaatgaatatgaaggtaaacttgacggactaataaaggaaactgaagagaatgaaaacaaaattaaaaaattgaagggagagttagtatgccttgaggaggttttacaaaataaagataatgaatttgctttggttaaacatgaaaaagaagctgtaatctgcctgcagaatgaaaaggatcagaagttgttagagatggaaaatataatgcactctcaaaattgtgaaattaaagaactgaagcagtcacgagaaatagtgttagaagacttaaaaaagctccatgttgaaaatgatgagaagttacagttattgagggcagaacttcagtccttggagcaaagtcatctaaaggaattagaggacacacttcaggttaggcacatacaagagtttgagaaggttatgacagaccacagagtttctttggaggaattaaaaaaggaaaaccaacaaataattaatcaaatacaagaatctcatgctgaaattatccaggaaaaagaaaaacagttacaggaattaaaactcaaggtttctgatttgtcagacacgagatgcaagttagaggttgaacttgcgttgaaggaagcagaaactgatgaaataaaaattttgctggaagaaagcagagcccagcagaaggagaccttgaaatctcttcttgaacaagagacagaaaatttgagaacagaaattagtaaactcaaccaaaagattcaggataataatgaaaattatcaggtgggcttagcagagctaagaactttaatgacaattgaaaaagatcagtgtatttccgagttaattagtagacatgaagaagaatctaatatacttaaagctgaattaaacaaagtaacatctttgcataaccaagcatttgaaatagaaaaaaacctaaaagaacaaataattgaactgcagagtaaattggattcagaattgagtgctcttgaaagacaaaaagatgaaaaaattacccaacaagaagagaaatacgaagctattatccagaaccttgagaaagacagacaaaaattggtcagcagccaggagcaagacagagaacagttaattcagaagcttaattgtgaaaaagatgaagctattcagactgccctaaaagaatttaaattggagagagaagttgttgagaaagagttattagaaaaagttaaacatcttgagaatcaaatagcaaaaagtcctgccattgactctaccagaggagattcttcaagcttagttgctgaacttcaagaaaagcttcaggaagaaaaagctaagtttctagaacaacttgaagagcaagaaaaaagaaagaatgaagaaatgcaaaatgttcgaacatctttgattgcggaacaacagaccaattttaacactgttttaacaagagagaaaatgagaaaagaaaacataataaatgatcttagtgataagttgaaaagtacaatgcagcaacaagaacgggataaagatttgatagagtcactttctgaagatcgagctcgtttgcttgaggaaaagaaaaagcttgaagaagaagtcagtaagttgcgtagtagcagttttgttccttcaccatatgtagctacagccccagaactttatggagcttgtgcacctgaactcccaggtgaatcagatagatccgctgtggaaacagcagatgaaggaagagtggattcagcaatggagacaagcatgatgtctgtacaagaaaatattcatatgttgtctgaagaaaaacagcggataatgctgttagaacgaacattgcaattgaaagaagaagaaaataaacggttaaatcaaagactgatgtctcagagcatgtcttcagtatcttcaaggcattctgaaaagatagctattagagattttcaggtgggagatttggtactcatcatcctagacgaacgccatgacaattatgtgttatttactgttagtcctactttatattttctacattcagagtctctacctgccctggatctcaaaccagcttcaggtgcatctagaagaccctgggtacttggaaaagtaatggaaaaagaatactgtcaagccaaaaaggcacaaaacagatttaaagttcctttggggacaaagttttacagagtgaaagccgtatcatggaataagaaagtataacttatggacaaaattaatacattctatgacatttttttctgatttgtcctgcagtgctcattcatcactccaaaaacagcaggccatctttttatgcaaaagtcagcgtgacaatatacttcactggtgtacatcgtttactttttaactggcttcattttaggaataataaattcatcagaatccttggctgaattaaaatggtttttgttttttggtttttttttttacccagacaactctagaaatgcggaccaaactacttcattttctcaaagggcataccttgtgcattgtggcttatgatgagccatattaattgcctgttaaatatacactagcttgaacttagatgttaaatgttattattaccagcatttgtccttttgtgaaatcagtatcagaatacttgcactctttaacacattctttataaaatgtataaattattcagaactatttaaaataaagaggagtgttattgcatgctgataatcattttgagtttgcctcagtagatactaaagcaaattgtttcagtttttttaaatgccctttgatgtttcaaaaaaaaaaaggaactgtaatttgattgactgattttaagatcagccataagtaatcagcaatcttcaaaagcactttcagtggattggtcatctgggttctaaagggaagagtctgtgctactaaccatttcaaatgcagactcaaaccttcccaacatctttatgactctagaataatcatattgatgaaatcgtaattcatggttgagtttcagaacaaaagatattcattgcacattaaccatttagaggtcatttaaataacaaaatattgtattgtaaaagaactgtacaattttaaaacaataaagatttgaacctgtaaatgtgtgtgccttttaaagaaggatacatttttaatatatttgagtgattgctgggaagtgtgaaaatattgttatgtatcatatcaaagagaaacatgtttattacaaaaatgttctttaactatatactatgtaacagggtaaacagtgttatgtagaatagaattgtgtaaactagatctttagagaagttgccattgagcaaagttatttaaatgagttagttgagttggatgagaattgtttgaggtttgttgctagagaacaataataaaataattctttttcagaaaatatttaatttcttcataaaaataagttaaatatttttttaaatatgtatatctaatagtacaaaatggaataaacatcatagtgtatagaaaactgaatttgacaagttaatgaataaatgaacaaatgatttcaaaa

SEQ ID NO: 1300 - DNA, 8992 bp, Homo Sapiens
  NM_001083621
gatacccattgcgcgccggcctcaagatggccgccttctggcgtctccggcgctgttgaatggcgaaagctttattgttcccttcgggcaggagtgttcgtgtcctctatggcgctgtcaataaagaacggcagtttgaatcggtgctgaacagcaaaagtttactgacccctgccctaaacacaaggagattggatcagtgttgtcattcagctattcctctcgtcggttcttctggagtgggaaaagagttaaaactgcgcgatgcaccgagagcactttagttgacagaacactctggcttcccttctggtcttactgactattcagagtttctcctgctttgaatagcgttggtaccatgcagccagtgctgcaatgaaccaggtgctttatttatattcatacaagtgttgttctactttatgacgacgctttataaggcctgtcctcccaaagccaactctaaggagaggagaggaagagcagttcttggggcagagttgacgcaatggagctccccaactacagccggcagctgctgcagcagctgtacactctgtgcaaggagcagcagttctgtgattgcaccatctccattggtaccatttacttcagggctcacaagcttgtcctggctgctgccagcctcctgttcaaaaccctgctggataacacagataccatctccatcgatgcatctgtggtgagccccgaggagtttgcgctcttgttggaaatgatgtacacgggcaaactacctgtgggcaagcacaacttctccaaaatcatctccttagcagacagtctacagatgtttgatgtagctgttagctgcaaaaatcttctgaccagccttgtaaactgctcggttcagggtcaggtggtaagggatgtctctgcgccatcctcagagacattcagaaaggaaccagagaagcctcaagtagaaatcctttcatctgaaggtgctggagagcctcattcttccccagagcttgctgccactccagggggccctgtgaaagctgagactgaggaagcagcccattcagtttcacaagagatgagtgtgaattctcccacagcccaggagagccagaggaatgcagaaaccccagcggagactcctactacagctgaagcttgttccccctcccctgctgtgcaaacctttagtgaggcaaagaagacaagcacagaaccaggatgtgaaaggaaacactaccagctgaattttcttctagaaaatgaaggtgtcttctcagatgcactcatggttacccaggatgttttaaaaaaactagaaatgtgttcagaaattaaaggtccacagaaggagatgatagtgaaatgtttcgagggtgaaggaggacattcagcattccagagaatcctgggtaaagtaagagaggaaagcctggatgttcaaactgttgtgtccctgttgaggctgtaccaatattctaatcctgcagtaaaaacagcactattagacaggaagccagaagatgtagacacagtgcagccaaaagggagcacagaggagggaaagaccttgtctgttctgttactagaacacaaagaggacctgatacagtgtgtaacacagctgagacctattatggagtccctggaaacagccaaggaggaattcctgactggcactgaaaaaagggtgattctgaattgctgtgagggcagaacacccaaggagacaatagaaaatttgttgcacagaatgactgaagagaagacgctgactgctgagggtttggtaaaactcctccaggctgtgaagacgactttcccaaacctgggccttctgctagagaagttgcagaaatcagccactttgccaagcaccacagtccaaccaagccctgatgattatgggactgagctattgagacgctatcatgaaaacctctctgagattttcacagacaaccagattttattaaagatgatctcacacatgacaagtttagcccctggagaaagagaggtcatggagaagcttgtgaaacgtgactctggttcaggtggtttcaattctctgatatcagcagttctagaaaagcagactctctctgccacagccatttggcaactgctgctggtggttcaggagacaaagacctgtccattggacctgctcatggaggaaatacgaagggagcctggtgccgatgctttcttccgggcagtgaccaccccagaacatgccactttagaaacaatcctgaggcataaccagttgatcttggaggccatccaacagaagattgagtacaagctctttacctcggaggaggagcacctggcagagactgtgaaagagattctgagcattccctctgagacagccagccctgaagcttccctgagagcagtgctgagcagagccatggaaaaatcagtcccggccattgaaatatgccacctcctgtgcagtgtccacaaatcttttccaggcctgcagcctgtcatgcaggagttggcatacattggtgtccttactaaggaagatggagagaaggaaacgtggaaggtgagtaataaatttcaccttgaagccaacaacaaagaagatgaaaaggcagccaaagaagacagccagcctggggaacagaatgatcaaggagagactggttccttgccaggacagcaagagaaagaggcttcagcctccccagaccctgccaagaagagcttcatctgtaaggcctgcgacaaaagcttccatttctactgccgcctaaaggtgcacatgaagcgctgccgggtggctaagagcaaacaggtgcagtgtaaggagtgcagtgagaccaaggattcaaagaaagagctggacaaacatcagctggaggcccatggtgcaggtggagagcccgatgcccccaagaagaagaagaagaggcttccagtgacatgtgacctctgtggcagagaatttgcccatgcctcaggcatgcagtaccataagctgacagagcacttcgatgagaagcctttctcctgtgaagagtgtggggcgaagtttgcagccaattccaccctgaagaaccaccttcgccttcacaccggggaccgcccgttcatgtgcaagcactgcctcatgaccttcacccaggcctccgccctggcctatcacaccaagaagaagcactcagaagggaaaatgtatgcatgccagtactgtgatgctgtgtttgcccagtctattgagctgtcccgccacgtgaggacccacaccggggacaagccctatgtctgcagagactgtggcaagggcttccggcaagccaatggcctctccatccatctgcacacctttcacaacatagaagatccttatgactgcaagaagtgcaggatgagtttccccactcttcaggatcaccggaagcacatccatgaggtgcactccaaagagtaccacccctgccccacgtgtgggaagatcttcagtgccccgtccatgctggagcggcacgtggtgacccacgttggagggaagcccttcagctgcgggatctgcaacaaggcctaccagcaattgtctggtttgtggtaccacaatcgaacccaccaccctgacgtatttgctgctcagaaccaccgatcttccaagttctcatcactccagtgcagctcctgtgacaaaaccttccccaacaccattgagcacaagaagcacatcaaagcagaacatgcagatatgaagttccatgaatgtgaccagtgtaaggagctcttccccacgccagccttgctgcaggttcatgtcaagtgccagcattcagggtcccagccattccggtgcttgtactgtgctgctactttccgttttcctggagcattgcagcaccatgtcaccacggagcacttcaagcagtcagagaccaccttcccctgtgagctctgtggggaactcttcacctcccaggcccagcttgacagtcacctggaatctgagcacccaaaggtgatgagcacggaaacccaggccgcagcctcacagatggcgcaggtgatccaaaccccagagccggtggccccgacagagcaggtgatcactttggaggagacccagcttgccgggtcgcaggtgtttgtgacgttgccagattctcaggcatctcaggccagctctgagctcgtggcggtgactgtggaggacttgctggatggcacagtgacgctgatctgtggtgaggccaaatgagcagcctttcatccggcagagccttcctgcgtttgcagcagagaggaggccccacagcttgccctttgccctccatccctggctgtcctgagtggtgagcatcttagcttagcaccaaccaacacagtctcacctagaaaacagatggaagcttcgttgttctcatagaaccaacagcatctgagccctcaacaccaacagcaccatcctctgtagcagacaggcctccctccccacaggcccgctgctgcggcctctatgacactgtccatccccaagtgacatgtggcttcagaagtagagtctgaaagagcagtgggatgggagctggtgaccagggtaccccaggaggcatgatgtgccgacagcgctcagtgggcagaatggcagttagatatgggacttggcccacagtgggggctgcaaatgctgccactgcctctggccatttaaagtgagaggggcaccaacagacaattcggggaccttaggccccttcctgaggcacacttggccccttcctcggtcctatcatcctaccctctgctggggttccccctccacccagtggccacgcccagcaccctattgatggctataggacaggtagccctcatttccatgcctgataaccccttgtcagttgtcagctcttcccaaaacaaagctctggagtttctgctggaagtgtttaatgtgaggcatcagctgctagacagtgtctgcctttccaggacattcttcttggtattccttacctgaagcctggttcccacagctcttccgtgtcatcttcatccccttcctttaatcaaaggctgaaatctctgcctgacctggcagcctggctccctctgggtcatatggtgcagactgtgaccagcaccaggcaggcagtcctgtctgcgtgtggaggagcagccgtgactgcccgtggctctgctgccgcccactccctgccttgtgagtggcctgctgcctcacctcccgcaggccgccacacttattgcaggtcagtgatcctttggagtttgaatttcacaaagctttttttatcttcagttcctaaaatataatctgataattaatggtttgtggaatccattatgaagtgcaattagatagatgtaggttcctgccgtttggagagaatgactagcatttatcttcttttccttccatgccaaaggttggagtctgctggtgcggtgtttacacaccaggcagggctgtctgccaccttgtgtggcttgaccccctgtggaggggagtgcctggttggatcccacactggcagagatggggccaccccttccttccaggcacatctcacattgccatgtacagaggcaggagtcacgtttggtcaccatggaagcttttattgctcccacatggtcaggtctcaccctgcttgaagcgcagaaggcacagccttactgaccagcacgcccactgactggcatctgccggctttgtgcaggcagccccgacggtttccacagcgagcgccagctccggccagcctgggacagctcatcccagccgactacacctgcttctggtcctgtccacattttgatacgcagatcacttgagcttgtcaattagggttctgccattctgaaataaatgaagtttctaaagcagagtcggcctcagaagccaaaaactgaccagaagatggtgctcaaacctttaagacttcatctccatgtgaagggctcactgtttctaccaaggctgtgcctgtattaaggcttttccgtcctgggaactgtcagtctgggagagctcttgatctgcaggtggcaaaatggcactgaatatccccttggcagcagagaaaacccactgaaagatcgtagagtggcacatgcttacagggcattggtgccaagtccagtggatgagaatccagcccctcacaagctgtgggatggggcttgggagttgcagtgaatgtcattaaaatttcttccaaaacaaaactagaaataattgctgagggcttatagggaagtgatttaaaaagaaaaaacaaacaacaacaaaaaaaactcttcggaataaagagggctgtaaattttgaattccagtgtcagatcctttcaagcactgagaaattctttctcaggtttctttttttgggggagacagggtcttgctctgtcacccagactggaacacagtggcacgatcttggctcactgcaacctctgcgggctcacgcaatcctcctgccacagcttcccaagtagctgggaccacaggcgtgagccaccactgctggccagtttttgtatttttttttttttttgtagagacagggtctcgccatgttgcccaggctggtttaaaactcctgagctcaagcagttctcccacctgggcctcccaaagtgctaggattacagacatgagccactacgcctggccaggtttctgttggagacccagattgtgacaagacatttgttttcttcggaatcaccagatttgcagcttactgtgccgagagtggactggctgccggggcccatcagatgccctctggcccatggcacactcagcagaaggcacaaacccagtgctggttctcatcaagaaagaggggaaggcccttcccgagtttactgtctgctctgagtgggctccgcactggctgactgattttatagtcttgctctctagagaagcccaggcatggatcttataggaaaactttctgactctgcttggccattttatccttttctcctacttctgcccaagagacctgaattgctgccatagaggacagtgtttgtgtggtctcctgagtccacatcgctcgcttccatggggtcccggtgttgtttttgcctcgttccccataggctgctgcccttatggcctctggactgaactctggggcctttggggtggtgtgaaggagtctgtgggcttcttggaacacatggatctgttcggtgggtccccagacctctgctcccagagctcatggcccaggtggtgaggagggaaaggcagtcagattccaggctggagtgtgattctgtgggaatactggggtcagttatggaacaggacttgcccatcataggtaagtgagacagcaaatagatgattcaagagcaaggattactgcgggaaggtgagactcctactgtccacgcgcatgagcagaacctggaaccagaggggcagggaccaggggtctttactcatttattttatgggtaaagagacatgaagagacagcctctctcttctgtctcagaagctctgtgtttgggaaactttgagcccagtgagtagcagggtctgcagtgtgagtaccaggtttccctggcaatccaggtctcctctgaggaagcattctgacttcccactgaccacggaaggcatgtcagcttcatgcctcgggctagagttctgataatcggggctgaggggtgaaaagaaatccagtcagacagacagtggggagacaggtccctgccctttatttgcgggatcaatcagggactcccagaaaggaaggagaatggtgagaagggccctaagagttcgtctctcacctgggggctggtgacgtggtcaccacaagctgaagacaggctaatggggtggcgggtgtgtgtttaaacctcacgtgcctggaagctgcacattgaccaaaggagggagggaagtgctaaccatgtatagagtgggcaggcggttccagggagacaagcagcatgttattaaattgggcctaggcagttggacgataatggagaaaaagcagggatgctataatgagtcctccccaagggtgagttcagcaccccagccctgttctgcttgtatcccagtgatacttgggaggtaggaagaaaatgggagtaagagaacaatttggggctgaagggagtgtcagaggcacgttgatccttgttttgttgtcatggaaacttcggggctggtgggacttaggccaaaagctcagaggcacagccaaaatttagaagcttgctactcctacgactcggcctataaggaagagagaagctgtctgtactttggggactacattgctgaaggaaaaaaatcactccctggctaattaagattgcttccaaattgggggaatgtgtgtcatttcctttaccaaggccagtcatccctgcttccacccatggtcaggacagtcagccactacgtgatgctgtataaattggattacaaaccatattcttgttcagcttgcactaatctatataaataaaatatgtactttgaaaaaaattaggctacatgagtttcaaatggactgtgatgttatagacctgctttctctttggttctgggccagtgtcagacggggacaggggtgataggcctggtgtcctaggggccatttgtgtaccttgaggccgtgttaacatggcctgggggaaagaaagctctcctgtcacttggagtctcattcctaaaccctccttcccagggagcaagtgtggggcagggtttcagagcacaggctttggtgtccagcctgggtacatccagctgtcccgctgtctaactgacattgtgtgagatgcttactctctctgagctccctcctcctggctcccaactttattataaaatggggaaaatgattgtgcttgccctacagaattgtagtatgaattaaaagtctggatttaatgtatttaatatagaaaattttagcttttattaataaaagtttttggcatacaagtc

SEQ ID NO: 1301 - DNA, 3224 bp, Homo Sapiens
  NM_001083907
ctggccaacaagggctgcagaggatgcacacatcaggaagagggtgggggactacttgcttgctggttttgcttgcatctgatgagtagaaattcagcctattctttgttttggaaatacaaaagatataataatgatatatgaagaagatgctgaggaatgggctctgtacttgacagaagtatttttacatgttgtgaaaagggaagccatcctgttatatcgcttggagaatttctcttttcggcatttggagttgctgaacttaacgtcttacaaatgtaaacttttgatattatcaaatagcctgcttagagacctaactccaaagaaatgtcagtttctggaaaagatacttcattcaccaaaaagtgtagttactttgctttgtggagtgaagagttcagatcagctctatgaattactaaatatctctcaaagcagatgggagatctcaactgaacaggaacctgaagactacatctctgtaatccagagtatcatattcaaagattctgaagactactttgaggtcaacattccaacagacctacgagcaaaacattctggggaaataagtgagagaaaggaaattgaagaactatcagaagcttcaagaaacaccataccactagcagtggtgcttcccactgaaattccatgtgagaatcctggtgaaatattcataattttgagagatgaagtaattggtgatactgtagaggttgaatttacatcaagtaataagcgcattagaacacggccagccctttggaataagaaagtctggtgcatgaaagctttagagtttcctgctggttcagtccatgtcaatgtctactgtgatggaatcgttaaagctacaaccaaaattaagtactacccaacagcaaaggcaaaggaatgcctattcagaatggcagattcaggagagagtttgtgccagaatagcattgaagaacttgatggtgtccttacatccatattcaaacatgagataccatattatgagttccagtctcttcaaactgaaatttgttctcaaaacaaatatactcatttcaaagaacttccaactcttctccactgtgcagcaaaatttggcttaaagaacctggctattcatttgcttcaatgttcaggagcaacctgggcatctaagatgaaaaatatggagggttcagaccccgcacatattgctgaaaggcatggtcacaaagaactcaagaaaatcttcgaagacttttcaatccaagaaattgacataaataatgagcaagaaaatgattatgaagaggatattgcctcattttccacatatattccttccacacagaacccagcatttcatcatgaaagcaggaagacatacgggcagagtgcagatggagctgaggcaaatgaaatggaaggggaaggaaaacagaatggatcaggcatggagaccaaacacagcccactagaggttggcagtgagagttctgaagaccagtatgatgacttgtatgtgttcattcctggtgctgatccagaaaataattcacaagagccactcatgagcagcagacctcctctccccccgccgcgacctgtagctaatgccttccaactggaaagacctcacttcaccttaccagggacaatggtggaaggccaaatggaaagaagtcaaaactggggtcatcctggtgttagacaagaaacaggagatgaacccaaaggagaaaaagagaagaaagaagaggaaaaagagcaggaggaggaagaagacccatatacttttgctgagattgatgacagtgaatatgacatgatattggccaatctgagtataaagaaaaaaactgggagtcggtctttcattataaatagacctcctgcccccacaccccgacccacaagtatacctccaaaagaggaaactacaccttacatagctcaagtgtttcaacaaaagacagccagaagacaatctgatgatgacaagttccgtggtcttcctaagaaacaagacagagctcggatagagagtccagccttttctactctcaggggctgtctaactgatggtcaggaagaactcatcctcctgcaggagaaagtaaagaatgggaaaatgtctatggatgaagctctggagaaatttaaacactggcagatgggaaaaagtggcctggaaatgattcagcaggagaaattacgacaactacgagactgcattattgggaaaaggccagaagaagaaaatgtctataataaactcaccattgtgcaccatccaggtggtaaggaaactgcccacaatgaaaataagttttataatgtacacttcagcaataagcttcctgctcgaccccaagttgaaaaggaatttggtttctgttgcaagaaagatcattaaagaaggttattataatgaaactcacgaatctacggacattttgctttcagggtgaagcaagcttgaatttggattgcctgctctctttaaagcgaattcatactatgacagcagaaacaaaacttcagatttcagaatttgttattggcaaaatttattctcattatacctgcttcatatgggtatattactattaaaacagaataccatagagtaattgcattatttgaaaattctctcattttacaatgcacttcaccaatgaaacagctaatttccattttgaaaattaaaagaaaacagcacagagaagttaaatgcggtgtagcaaagttatggggtctgcttgagggcactaacctcaacagattattcctcctctccttagaataaccatgaaaatacaaatttacttagcacatttttgctttttaagtagctggttcattttctgaatttctcacattcagagttccagtcattattgttacatcatgtttgcagaaaccttgtcttatttagtgtctatttgcatataaccctgaaaacattattatttgaaaacttttctatatctcaaattaatatacattttcataacctacctttgtattaagacttgcaattttatcaatctattatttcttagaaacaatttactagcttagaatagaaagcaatgttatcgtcatataattttcatgtacaaatgccacaaataaattgaatgtttaaagctatgtctgagtttttaaagtaaatttataagaattagccaataaaattgcttctcggccttttggctaagatcaaaaaaaaaaaa

SEQ ID NO: 1302 - DNA, 1927 bp, Homo Sapiens
  NM_001083946
gtcggggcgtgtcttctcccggaaatggtctaagccccagctcctggcggagcgagctagcctgcgaatttcagcatgagtgtactgctgaggtcaggtttggggccgttgtgtgccgtggcgcgcgcagccattccttttatttggagagggaaatacttcagctccgggaatgagcctgcagaaaacccggtgacgccgatgctgcggcatcttatgtacaaaataaagtctactggtcccatcactgtggccgagtacatgaaggaggtgttgactaatccagccaagctactaggtatatggttcattagtgaatggatggccactggaaaaagcacagctttccagctggtggaactgggcccaggtaggggaaccctcgtgggagatattttgagggtgttcactcaacttggatctgtgctgaaaaattgtgacatttcagtacatctggtagagaaaacaccacagggatggcgagaagtatttgttgacattgatccacaggtttctgataaactgaggtttgttttggcaccttctgccaccccagcagaagccttcatacaacatgacgaaacaagggatcatgttgaagtgtgtcctgatgctggtgttatcatcgaggaactttctcaacgcattgcattaactggaggtgctgcactggttgctgattatggtcatgatggaacaaagacagataccttcagagggttttgcgaccacaagcttcatgatgtcttaattgccccaggaacagcagatctaacagctgatgtggacttcagttatttgcgaagaatggcacagggaaaagtagcctctctgggcccaataaaacaacacacatttttaaaaaatatgggtattgatgtccggctgaaggttcttttagataaatcaaatgagccatcagtgaggcagcagttacttcaaggatatgatatgttaatgaatccaaagaagatgggagagagatttaacttttttgccttgctacctcatcagagacttcaaggtggaagatatcagaggaatgcacgtcagtcaaaaccctttgcatccgttgtagctgggtttagtgaacttgcttggcagtgatatttcagcttggacattttacccttcagtcggcccaagaaatcaaaataaaggaaacacatttcatatactgcaggtaacaaaagtcaaagtattttatcttttcacagcaagaacagtccatgttgtatataatacaaccaacattatagaacttttagggttgtgactggctttggtgcaaatgtgtgctcaagctaataagttattgtgaaactgagtttcctttaacttacaaagctagttgccatatttctattttattttaaaaagtaaacatgcggctgggcgtggtggctcatgcctgtaatcccagcactttgggaggctgaggtgggcatatcacctgaggtcagcagttaaagaccagcctgaccaaaatggagaaaccccatctctactaaaaatacaaaactagccgggtatggtggtacatgcctgtaatcccagctactcaggaggctgagacaggagaatcacttgaacctgggaggtggaggttgcggtgagctgagatcgtgccactgcactccagcctgggcaacaagagcaaaaatccctctcaaaaaaaaaagtaaacatgggcactgattgttttaataaaaatgggaaacagactaaatggctattcacaggaaactgataagatatatgttatttttttaaatgagctagggcaatatgttttgacagaaaactctctaagatttagtaagtgaaaaaaagtaggatgcaagagtttttatagttgattccatttttgttgaaggagaaaaactaaataaatacgagtaatttcatagaaacgaaaaaaaaaaaa

SEQ ID NO: 1303 - DNA, 2995 bp, Homo Sapiens
  NM_001084
taggcttcctccctccctgtcgccgccagcctctcgctctccccgtcttccgcccgcactctctgggcagggctgcggccaggacccgcccccgcgtcccgcccgaccctccgccaggggtcacttcccctgtccaggtttcagcttccacatgtgtcaagcggctggctcagcccagagtccctgtctcccgcccgccggcccgagccgccgcccctcccccgcctcccgtgcgcccgggacaatcctcgccttgtctgtggcgccggcatctggagctttctgtagcctccggatacgcctttttttcagggcgtagccccagccaagctgctccccgcggcggccgcacagcagcccgagcgccccctttccagagctcccctccggagctgggatccaggcgcgtagcggagatcccaggatcctgggtgctgtctgggcccgctccccaccatgacctcctcggggcctggaccccggttcctgctgctgctgccgctgctgctgccccctgcggcctcagcctccgaccggccccggggccgagacccggtcaacccagagaagctgctggtgatcactgtggccacagctgaaaccgaggggtacctgcgtttcctgcgctctgcggagttcttcaactacactgtgcggaccctgggcctgggagaggagtggcgagggggtgatgtggctcgaacagttggtggaggacagaaggtccggtggttaaagaaggaaatggagaaatacgctgaccgggaggatatgatcatcatgtttgtggatagctacgacgtgattctggccggcagccccacagagctgctgaagaagttcgtccagagtggcagccgcctgctcttctctgcagagagcttctgctggcccgagtgggggctggcggagcagtaccctgaggtgggcacggggaagcgcttcctcaattctggtggattcatcggttttgccaccaccatccaccaaatcgtgcgccagtggaagtacaaggatgatgacgacgaccagctgttctacacacggctctacctggacccaggactgagggagaaactcagccttaatctggatcataagtctcggatctttcagaacctcaacggggctttagatgaagtggttttaaagtttgatcggaaccgtgtgcgtatccggaacgtggcctacgacacgctccccattgtggtccatggaaacggtcccactaagctgcagctcaactacctgggaaactacgtccccaatggctggactcctgagggaggctgtggcttctgcaaccaggaccggaggacactcccgggggggcagcctcccccccgggtgtttctggccgtgtttgtggaacagcctactccgtttctgccccgcttcctgcagcggctgctactcctggactatccccccgacagggtcacccttttcctgcacaacaacgaggtcttccatgaaccccacatcgctgactcctggccgcagctccaggaccacttctcagctgtgaagctcgtggggccggaggaggctctgagcccaggcgaggccagggacatggccatggacctgtgtcggcaggaccccgagtgtgagttctacttcagcctggacgccgacgctgtcctcaccaacctgcagaccctgcgtatcctcattgaggagaacaggaaggtgatcgcccccatgctgtcccgccacggcaagctgtggtccaacttctggggcgccctgagccccgatgagtactacgcccgctccgaggactacgtggagctggtgcagcggaagcgagtgggtgtgtggaatgtaccatacatctcccaggcctatgtgatccggggtgataccctgcggatggagctgccccagagggatgtgttctcgggcagtgacacagacccggacatggccttctgtaagagctttcgagacaagggcatcttcctccatctgagcaatcagcatgaatttggccggctcctggccacttccagatacgacacggagcacctgcaccccgacctctggcagatcttcgacaaccccgtcgactggaaggagcagtacatccacgagaactacagccgggccctggaaggggaaggaatcgtggagcagccatgcccggacgtgtactggttcccactgctgtcagaacaaatgtgtgatgagctggtggcagagatggagcactacggccagtggtcaggcggccggcatgaggattcaaggctggctggaggctacgagaatgtgcccaccgtggacatccacatgaagcaggtggggtacgaggaccagtggctgcagctgctgcggacgtatgtgggccccatgaccgagagcctgtttcccggttaccacaccaaggcgcgggcggtgatgaactttgtggttcgctaccggccagacgagcagccgtctctgcggccacaccacgactcatccaccttcaccctcaacgttgccctcaaccacaagggcctggactatgagggaggtggctgccgcttcctgcgctacgactgtgtgatctcctccccgaggaagggctgggcactcctgcaccccggccgcctcacccactaccacgaggggctgccaacgacctggggcacacgctacatcatggtgtcctttgtcgacccctgacactcaaccactctgccaaacctgccctgccattgtgcctttttagggggcctggcccccgtcctgggagttgggggatgggtctctctgtctccccacttcctgagttcatgttccgcgtgcctgaactgaatatgtcaccttgctcccaagacacggccctctcaggaagctcccggagtccccgcctctctcctccgcccacaggggttcgtgggcacagggcttctggggactccccgcgtgataaattattaatgttccgcagtctcactctgaataaaggacagtttgtaagtcttgaaaaaaaaaaaaaaaaaaa

SEQ ID NO: 1304 - DNA, 1488 bp, Homo Sapiens
  NM_001085423
accactgtggttctactatgccttctgaccccgtcttggacttcaactgggagaatgtggagccatttgaacaggctcctcttctggagcatattttcttctgtcacttgtagaaaagctgtattggattgtgaggcaatgaaaacaaatgaattcccttctccatgtttggactcaaagactaaggtggttatgaagggtcaaaatgtatctatgttttgttcccataagaacaaatcactgcagatcacctattcattgtttcgacgtaagacacacctgggaacccaggatggaaaaggtgaacctgcgatttttaacctaagcatcacagaagcccatgaatcaggcccctacaaatgcaaagcccaagttaccagctgttcaaaatacagtcgtgacttcagcttcacgattgtcgacccggtgacttccccagtgctgaacattatggtcattcaaacagaaacagaccgacatataacattacattgcctctcagtcaatggctcgctgcccatcaattacactttctttgaaaaccatgttgccatatcaccagctatttccaagtatgacagggagcctgctgaatttaacttaaccaagaagaatcctggagaagaggaagagtataggtgtgaagctaaaaacagattgcctaactatgcaacatacagtcaccctgtcaccatgccctcaacaggcggagacagctgtcctttctgtctgaagctactacttccagggttattactgttgctggtggtgataatcctaattctggctttttgggtactgcccaaatacaaaacaagaaaagctatgagaaataatgtgcccagggaccgtggagacacagccatggaagttggaatctatgcaaatatccttgaaaaacaagcaaaggaggaatctgtgccagaagtgggatccaggccgtgtgtttccacagcccaagatgaggccaaacactcccaggagctacagtatgccacccccgtgttccaggaggtggcaccaagagagcaagaagcctgtgattcttataaatctggatatgtctattctgaactcaacttctgaaatttacagaaacaaactacatctcaggatggagtctcactctgttgcccaggctggagttcagtagcgcgatcttggctcacttcaatctccatcttcccagttcaagcgattctcatgcctcgacctcccgagtagctgggattacaggtgcccgctaccacgcccagctaatttttgtatttttagtagagatggggtttcactatggtggccaggctggtcttgaactcctgacctcagatgatctgcctgcctcggcctcccaaagtgctggaactacaagcctgagccaccgtgcccggccctgaatcgctttagtaaataaagggtctccaagaataaattcatccgaacatgcaaaaaaaaaaaaaaaaaaaaaaaaaaaaaaaaaaaaaaaaa

SEQ ID NO: 1305 - DNA, 1859 bp, Homo Sapiens
  NM_001087
aggggctcgagttccgcgtcgtcgcgcagagctgactctgggaggcgtttgggcccagagaagtggatccgccgcttgcgccgcatggagtccgaatcggaaagcggggctgctgctgacacccccccactggagaccctaagcttccatggtgatgaagagattatcgaggtggtagaacttgatcccggtccgccggacccagatgacctggcccaggagatggaagatgtggactttgaggaagaagaggaggaagagggcaacgaagagggctgggttctagaaccccaggaaggggtggtcggcagcatggagggccccgacgatagcgaggtcacctttgcattgcactcagcatctgtgttttgtgtgagcctggaccccaagaccaataccttggcagtgaccgggggtgaagatgacaaagccttcgtatggcggctcagcgatggggagctgctctttgagtgtgcaggccataaagactctgtgacttgtgctggtttcagccatgactccactctagtggccacaggggacatgagtggcctcttgaaagtgtggcaggtggacactaaggaggaggtctggtcctttgaagcgggagacctggagtggatggagtggcatcctcgggcacctgtcctgttggcgggcacagctgacggcaacacctggatgtggaaagtcccgaatggtgactgcaagaccttccagggtcccaactgcccagccacctgtggccgagtcctccctgatgggaagagagctgtggtaggctatgaagatgggaccatcaggatttgggacctgaagcagggaagccctatccatgtactgaaagggactgagggtcaccagggcccactcacctgtgttgctgccaaccaggatggcagcttgatcctaactggctctgtggactgccaggccaagctggtcagtgccaccaccggcaaggtggtgggtgtttttagacctgagactgtggcctcccagcccagcctgggagaaggggaggagagtgagtccaactcggtggagtccttgggcttctgcagtgtgatgcccctggcagctgttggctacctggatgggaccttggccatctatgacctggctacgcagactcttaggcatcagtgtcagcaccagtcgggcatcgtgcagctgctgtgggaggcaggcactgccgtggtatatacctgcagcctggatggcatcgtgcgcctctgggacgcccggaccggccgcctgcttactgactaccggggccacacggctgagatcctggactttgccctcagcaaagatgcctccctggtggtgaccacgtcaggagaccacaaagcgaaagtattttgtgtccaaaggcctgaccgttaatggctgcagcccctgcctgtgtgtctggtgttgaggggacgaagggacccctgcccctgtctgccagcagaggcagtagggcacagagggaagaggagggtggggccctggatgactttccagcctcttcaactgacttgctcccctctccttttcttctctttagagacccagcccagggccctcccacccttgtccagacctggtgggcccttcagagggaggggtggacctgtttctctttcactttcatttgctggtgtgagccatggggtgtgtatttgtatgtggggagtaggtgtttgaggttcccgttctttcccttcccaagtctctgggggtggaaaggaggaagagatactagttaaagattttaaaaatgtaaataaaatatacttcccagaaaaaaaaaaaaaaaaaaaaaaaaaaaaaaaaaaaaaaaaaaaaaaaaaaaaaaaaaaaaaaaaaaa

SEQ ID NO: 1306 - DNA, 6623 bp, Homo Sapiens
  NM_001089
gcggccgctgcgtccgccagtagcgggttgcaggcgcaccctcccctccagggcggccacgcagctgtcagtgccgccgccactgcgaggctggagcggagcccgggtggccgagggaggggaccccgcgagagggccgcgcgccggccgccgccgccccggcgcccaggctcggtgctggagagtcatgcctgtgagccctgggcacctcctgatgtcctgcgaggtcacggtgttcccaaacctcagggttgccctgccccactccagaggctctcaggccccaccccggagccctctgtgcggagccgcctcctcctggccagttccccagtagtcctgaagggagacctgctgtgtggagcctcttctgggacccagccatgagtgtggagctgagcaactgaacctgaaactcttccactgtgagtcaaggaggcttttccgcacatgaaggacgctgagcgggaaggactcctctctgcctgcagttgtagcgagtggaccagcaccaggggctctctagactgcccctcctccatcgccttccctgcctctccaggacagagcagccacgtctgcacacctcgccctctttacactcagttttcagagcacgtttctcctatttcctgcgggttgcagcgcctacttgaacttactcagaccacctacttctctagcagcactgggcgtccctttcagcaagacgatggctgtgctcaggcagctggcgctcctcctctggaagaactacaccctgcagaagcggaaggtcctggtgacggtcctggaactcttcctgccattgctgttttctgggatcctcatctggctccgcttgaagattcagtcggaaaatgtgcccaacgccaccatctacccgggccagtccatccaggagctgcctctgttcttcaccttccctccgccaggagacacctgggagcttgcctacatcccttctcacagtgacgctgccaagaccgtcactgagacagtgcgcagggcacttgtgatcaacatgcgagtgcgcggctttccctccgagaaggactttgaggactacattaggtacgacaactgctcgtccagcgtgctggccgccgtggtcttcgagcaccccttcaaccacagcaaggagcccctgccgctggcggtgaaatatcacctacggttcagttacacacggagaaattacatgtggacccaaacaggctcctttttcctgaaagagacagaaggctggcacactacttcccttttcccgcttttcccaaacccaggaccaagggaacctacatcccctgatggcggagaacctgggtacatccgggaaggcttcctggccgtgcagcatgctgtggaccgggccatcatggagtaccatgccgatgccgccacacgccagctgttccagagactgacggtgaccatcaagaggttcccgtacccgccgttcatcgcagaccccttcctcgtggccatccagtaccagctgcccctgctgctgctgctcagcttcacctacaccgcgctcaccattgcccgtgctgtcgtgcaggagaaggaaaggaggctgaaggagtacatgcgcatgatggggctcagcagctggctgcactggagtgcctggttcctcttgttcttcctcttcctcctcatcgccgcctccttcatgaccctgctcttctgtgtcaaggtgaagccaaatgtagccgtgctgtcccgcagcgacccctccctggtgctcgccttcctgctgtgcttcgccatctctaccatctccttcagcttcatggtcagcaccttcttcagcaaagccaacatggcagcagccttcggaggcttcctctacttcttcacctacatcccctacttcttcgtggcccctcggtacaactggatgactctgagccagaagctctgctcctgcctcctgtctaatgtcgccatggcaatgggagcccagctcattgggaaatttgaggcgaaaggcatgggcatccagtggcgagacctcctgagtcccgtcaacgtggacgacgacttctgcttcgggcaggtgctggggatgctgctgctggactctgtgctctatggcctggtgacctggtacatggaggccgtcttcccagggcagttcggcgtgcctcagccctggtacttcttcatcatgccctcctattggtgtgggaagccaagggcggttgcagggaaggaggaagaagacagtgaccccgagaaagcactcagaaacgagtactttgaagccgagccagaggacctggtggcggggatcaagatcaagcacctgtccaaggtgttcagggtgggaaataaggacagggcggccgtcagagacctgaacctcaacctgtacgagggacagatcaccgtcctgctgggccacaacggtgccgggaagaccaccaccctctccatgctcacaggtctctttccccccaccagtggacgggcatacatcagcgggtatgaaatttcccaggacatggttcagatccggaagagcctgggcctgtgcccgcagcacgacatcctgtttgacaacttgacagtcgcagagcacctttatttctacgcccagctgaagggcctgtcacgtcagaagtgccctgaagaagtcaagcagatgctgcacatcatcggcctggaggacaagtggaactcacggagccgcttcctgagcgggggcatgaggcgcaagctctccatcggcatcgccctcatcgcaggctccaaggtgctgatactggacgagcccacctcgggcatggacgccatctccaggagggccatctgggatcttcttcagcggcagaaaagtgaccgcaccatcgtgctgaccacccacttcatggacgaggctgacctgctgggagaccgcatcgccatcatggccaagggggagctgcagtgctgcgggtcctcgctgttcctcaagcagaaatacggtgccggctatcacatgacgctggtgaaggagccgcactgcaacccggaagacatctcccagctggtccaccaccacgtgcccaacgccacgctggagagcagcgctggggccgagctgtctttcatccttcccagagagagcacgcacaggtttgaaggtctctttgctaaactggagaagaagcagaaagagctgggcattgccagctttggggcatccatcaccaccatggaggaagtcttccttcgggtcgggaagctggtggacagcagtatggacatccaggccatccagctccctgccctgcagtaccagcacgagaggcgcgccagcgactgggctgtggacagcaacctctgtggggccatggacccctccgacggcattggagccctcatcgaggaggagcgcaccgctgtcaagctcaacactgggctcgccctgcactgccagcaattctgggccatgttcctgaagaaggccgcatacagctggcgcgagtggaaaatggtggcggcacaggtcctggtgcctctgacctgcgtcaccctggccctcctggccatcaactactcctcggagctcttcgacgaccccatgctgaggctgaccttgggcgagtacggcagaaccgtcgtgcccttctcagttcccgggacctcccagctgggtcagcagctgtcagagcatctgaaagacgcactgcaggctgagggacaggagccccgcgaggtgctcggtgacctggaggagttcttgatcttcagggcttctgtggaggggggcggctttaatgagcggtgccttgtggcagcgtccttcagagatgtgggagagcgcacggtcgtcaacgccttgttcaacaaccaggcgtaccactctccagccactgccctggccgtcgtggacaaccttctgttcaagctgctgtgcgggcctcacgcctccattgtggtctccaacttcccccagccccggagcgccctgcaggctgccaaggaccagtttaacgagggccggaagggattcgacattgccctcaacctgctcttcgccatggcattcttggccagcacgttctccatcctggcggtcagcgagagggccgtgcaggccaagcatgtgcagtttgtgagtggagtccacgtggccagtttctggctctctgctctgctgtgggacctcatctccttcctcatccccagtctgctgctgctggtggtgtttaaggccttcgacgtgcgtgccttcacgcgggacggccacatggctgacaccctgctgctgctcctgctctacggctgggccatcatccccctcatgtacctgatgaacttcttcttcttgggggcggccactgcctacacgaggctgaccatcttcaacatcctgtcaggcatcgccaccttcctgatggtcaccatcatgcgcatcccagctgtaaaactggaagaactttccaaaaccctggatcacgtgttcctggtgctgcccaaccactgtctggggatggcagtcagcagtttctacgagaactacgagacgcggaggtactgcacctcctccgaggtcgccgcccactactgcaagaaatataacatccagtaccaggagaacttctatgcctggagcgccccgggggtcggccggtttgtggcctccatggccgcctcagggtgcgcctacctcatcctgctcttcctcatcgagaccaacctgcttcagagactcaggggcatcctctgcgccctccggaggaggcggacactgacagaattatacacccggatgcctgtgcttcctgaggaccaagatgtagcggacgagaggacccgcatcctggcccccagcccggactccctgctccacacacctctgattatcaaggagctctccaaggtgtacgagcagcgggtgcccctcctggccgtggacaggctctccctcgcggtgcagaaaggggagtgcttcggcctgctgggcttcaatggagccgggaagaccacgactttcaaaatgctgaccggggaggagagcctcacttctggggatgcctttgtcgggggtcacagaatcagctctgatgtcggaaaggtgcggcagcggatcggctactgcccgcagtttgatgccttgctggaccacatgacaggccgggagatgctggtcatgtacgctcggctccggggcatccctgagcgccacatcggggcctgcgtggagaacactctgcggggcctgctgctggagccacatgccaacaagctggtcaggacgtacagtggtggtaacaagcggaagctgagcaccggcatcgccctgatcggagagcctgctgtcatcttcctggacgagccgtccactggcatggaccccgtggcccggcgcctgctttgggacaccgtggcacgagcccgagagtctggcaaggccatcatcatcacctcccacagcatggaggagtgtgaggccctgtgcacccggctggccatcatggtgcaggggcagttcaagtgcctgggcagcccccagcacctcaagagcaagttcggcagcggctactccctgcgggccaaggtgcagagtgaagggcaacaggaggcgctggaggagttcaaggccttcgtggacctgacctttccaggcagcgtcctggaagatgagcaccaaggcatggtccattaccacctgccgggccgtgacctcagctgggcgaaggttttcggtattctggagaaagccaaggaaaagtacggcgtggacgactactccgtgagccagatctcgctggaacaggtcttcctgagcttcgcccacctgcagccgcccaccgcagaggaggggcgatgaggggtggcggctgtctcgccatcaggcagggacaggacgggcaagcagggcccatcttacatcctctctctccaagtttatctcatcctttatttttaatcacttttttctatgatggatatgaaaaattcaaggcagtatgcacagaatggacgagtgcagcccagccctcatgcccaggatcagcatgcgcatctccatgtctgcatactctggagttcactttcccagagctggggcaggccgggcagtctgcgggcaagctccggggtctctgggtggagagctgacccaggaagggctgcagctgagctgggggttgaatttctccaggcactccctggagagaggacccagtgacttgtccaagtttacacacgacactaatctcccctggggaggaagcgggaagccagccaggttgaactgtagcgaggcccccaggccgccaggaatggaccatgcagatcactgtcagtggagggaagctgctgactgtgattaggtgctggggtcttagcgtccagcgcagcccgggggcatcctggaggctctgctccttagggcatggtagtcaccgcgaagccgggcaccgtcccacagcatctcctagaagcagccggcacaggagggaaggtggccaggctcgaagcagtctctgtttccagcactgcaccctcaggaagtcgcccgccccaggacacgcagggaccaccctaagggctgggtggctgtctcaaggacacattgaatacgttgtgaccatccagaaaataaatgctgaggggacacagtc

SEQ ID NO: 1307 - DNA, 615 bp, Homo Sapiens
  NM_001089590
atggatgcatacaagtacatccaggagcaatggaggaagaagcagtctgatgtcatgcgctttcttctgagggtctgctgctggcagtactgccagctatctgctgtccacggggctccctgccccacctggcctgataaagcacgccagctgggctacaaggccaagcaaggttacattatatataggattcatgttcaccatggtggtcaaaaatgcccaattcctaagggtgcaacttatggcaagcctgtccatcatggtgttaaccagctgaagtttgctcgaagccttcagtccattgcagaggagcgagttggacacaactgtggggctctaagagtcctgaattcttactgggttggtgaagattccacatacagattttttgaggttatcctcattgatccattctatgaagttatcagaagaaatcctgacacccagtcgatcaccaaaccagtccacaagcagagggagatgtgtgggctgacatctgcaggccaaaggagctgtggccttggaaagtgccataagttccaccacactattgatggttcttgctgggcagcttggagaaggcgtgatactctccagctccaccgttaccactaa

SEQ ID NO: 1308 - DNA, 9260 bp, Homo Sapiens
  NM_001093
attttctgaatggtcttgcttctttgtctatcttgtctgattttctcctgtctgaccttttcctggttaaaaatctgggggaaaatgacggactccaagccgatcaccaagagtaaatcagaagcaaacctcatcccgagccaggagccctttccagcctctgataactcaggggagacaccgcagagaaatggggagggccacactctgcccaagacacccagccaggccgagccagcctcccacaaaggccccaaagatgccggtcggcggagaaactccctaccaccctcccaccagaagcccccaagaaaccccctttcttccagtgacgcagcaccctccccagagcttcaagccaacgggactgggacacaaggtctggaggccacagataccaatggcctgtcctcctcagccaggccccagggccagcaagctggctccccctccaaagaagacaagaagcaggcaaacatcaagaggcagctgatgaccaacttcatcctgggctcttttgatgactactcctccgacgaggactctgttgctggctcatctcgtgagtctacccggaagggcagccgggccagcttgggggccctgtccctggaggcttatctgaccacaggtgaagctgagacccgcgtccccactatgaggccgagcatgtcgggactccacctggtgaagaggggacgggaacacaagaagctggacctgcacagagactttaccgtggcttctcccgctgagtttgtcacacgctttgggggggatcgggtcatcgagaaggtgcttattgccaacaacgggattgccgccgtgaagtgcatgcgctccatccgcaggtgggcctatgagatgttccgcaacgagcgggccatccggtttgttgtgatggtgacccccgaggaccttaaggccaacgcagagtacatcaagatggcggatcattacgtccccgtcccaggagggcccaataacaacaactatgccaacgtggagctgattgtggacattgccaagagaatccccgtgcaggcggtgtgggctggctggggccatgcttcagaaaaccctaaacttccggagctgctgtgcaagaatggagttgctttcttaggccctcccagtgaggccatgtgggccttaggagataagatcgcctccaccgttgtcgcccagacgctacaggtcccaaccctgccctggagtggaagcggcctgacagtggagtggacagaagatgatctgcagcagggaaaaagaatcagtgtcccagaagatgtttatgacaagggttgcgtgaaagacgtagatgagggcttggaggcagcagaaagaattggttttccattgatgatcaaagcttctgaaggtggcggagggaagggaatccggaaggctgagagtgcggaggacttcccgatccttttcagacaagtacagagtgagatcccaggctcgcccatctttctcatgaagctggcccagcacgcccgtcacctggaagttcagatcctcgctgaccagtatgggaatgctgtgtctctgtttggtcgcgactgctccatccagcggcggcatcagaagatcgttgaggaagcaccggccaccatcgccccgctggccatattcgagttcatggagcagtgtgccatccgcctggccaagaccgtgggctatgtgagtgcagggacagtggaatacctctatagtcaggatggcagcttccacttcttggagctgaatcctcgcttgcaggtggaacatccctgcacagaaatgattgctgatgttaatctgccggccgcccagctacagatcgccatgggcgtgccactgcaccggctgaaggatatccggcttctgtatggagagtcaccatggggagtgactcccatttcttttgaaaccccctcaaaccctcccctcgcccgaggccacgtcattgccgccagaatcaccagcgaaaacccagacgagggttttaagccgagctccgggactgtccaggaactgaatttccggagcagcaagaacgtgtggggttacttcagcgtggccgctactggaggcctgcacgagtttgcggattcccaatttgggcactgcttctcctggggagagaaccgggaagaggccatttcgaacatggtggtggctttgaaggaactgtccatccgaggcgactttaggactaccgtggaatacctcattaacctcctggagaccgagagcttccagaacaacgacatcgacaccgggtggttggactacctcattgctgagaaagtgcaggcggagaaaccggatatcatgcttggggtggtatgcggggccttgaacgtggccgatgcgatgttcagaacgtgcatgacagatttcttacactccctggaaaggggccaggtcctcccagcggattcactactgaacctcgtagatgtggaattaatttacggaggtgttaagtacattctcaaggtggcccggcagtctctgaccatgttcgttctcatcatgaatggctgccacatcgagattgatgcccaccggctgaatgatggggggctcctgctctcctacaatgggaacagctacaccacctacatgaaggaagaggttgacagttaccgaattaccatcggcaataagacgtgtgtgtttgagaaggagaacgatcctacagtcctgagatccccctcggctgggaagctgacacagtacacagtggaggatgggggccacgttgaggctgggagcagctacgctgagatggaggtgatgaagatgatcatgaccctgaacgttcaggaaagaggccgggtgaagtacatcaagcgtccaggtgccgtgctggaagcaggctgcgtggtggccaggctggagctcgatgacccttctaaagtccacccggctgaaccgttcacaggagaactccctgcccagcagacactgcccatcctcggagagaaactgcaccaggtcttccacagcgtcctggaaaacctcaccaacgtcatgagtggcttttgtctgccagagcccgtttttagcataaagctgaaggagtgggtgcagaagctcatgatgaccctccggcacccgtcactgccgctgctggagctgcaggagatcatgaccagcgtggcaggccgcatccccgcccctgtggagaagtctgtccgcagggtgatggcccagtatgccagcaacatcacctcggtgctgtgccagttccccagccagcagatagccaccatcctggactgccatgcagccaccctgcagcggaaggctgatcgagaggtcttcttcatcaacacccagagcatcgtgcagttggtccagagataccgcagcgggatccgcggctatatgaaaacagtggtgttggatctcctgagaagatacttgcgtgttgagcaccattttcagcaagcccactacgacaagtgtgtgataaacctcagggagcagttcaagccagacatgtcccaggtgctggactgcatcttctcccacgcacaggtggccaagaagaaccagctggtgatcatgttgatcgatgagctgtgtggcccagacccttccctgtcggacgagctgatctccatcctcaacgagctcactcagctgagcaaaagcgagcactgcaaagtggccctcagagcccggcagatcctgattgcctcccacctcccctcctacgagctgcggcataaccaggtggagtccattttcctgtctgccattgacatgtacggccaccagttctgccccgagaacctcaagaaattaatactttcggaaacaaccatcttcgacgtcctgcctactttcttctatcacgcaaacaaagtcgtgtgcatggcgtccttggaggtttacgtgcggaggggctacatcgcctatgagttaaacagcctgcagcaccggcagctcccggacggcacctgcgtggtagaattccagttcatgctgccgtcctcccacccaaaccggatgaccgtgcccatcagcatcaccaaccctgacctgctgaggcacagcacagagctcttcatggacagcggcttctccccactgtgccagcgcatgggagccatggtagccttcaggagattcgaggacttcaccagaaattttgatgaagtcatctcttgcttcgccaacgtgcccaaagacacccccctcttcagcgaggcccgcacctccctatactccgaggatgactgcaagagcctcagagaagagcccatccacattctgaatgtgtccatccagtgtgcagaccacctggaggatgaggcactggtgccgattttacggacattcgtacagtccaagaaaaatatccttgtggattatggactccgacgaatcacattcttgattgcccaagagaaagaatttcccaagtttttcacattcagagcaagagatgagtttgcagaagatcgcatttaccgtcacttggaacctgccctggccttccagctggaacttaaccggatgcgtaacttcgatctgaccgccgtgccctgtgccaaccacaagatgcacctttacctgggtgctgccaaggtgaaggaaggtgtggaagtgacggaccataggttcttcatccgcgccatcatcaggcactctgacctgatcacaaaggaagcctccttcgaatacctgcagaacgagggtgagcggctgctcctggaggccatggacgagctggaggtggcgttcaataacaccagcgtgcgcaccgactgcaaccacatcttcctcaacttcgtgcccactgtcatcatggaccccttcaagatcgaggagtccgtgcgctacatggttatgcgctacggcagccggctgtggaaactccgtgtgctacaggctgaggtcaagatcaacatccgccagaccaccaccggcagtgccgttcccatccgcctgttcatcaccaatgagtcgggctactacctggacatcagcctctacaaagaagtgactgactccagatctggaaatatcatgtttcactccttcggcaacaagcaagggccccagcacgggatgctgatcaatactccctacgtcaccaaggatctgctccaggccaagcgattccaggcccagaccctgggaaccacctacatctatgacttcccggaaatgttcaggcaggctctctttaaactgtggggctccccagacaagtatcccaaagacatcctgacatacactgaattagtgttggactctcagggccagctggtggagatgaaccgacttcctggtggaaatgaggtgggcatggtggccttcaaaatgaggtttaagacccaggagtacccggaaggacgggatgtgatcgtcatcggcaatgacatcacctttcgcattggatcctttggccctggagaggaccttctgtacctgcgggcatccgagatggcccgggcagagggcattcccaaaatttacgtggcagccaacagtggcgcccgtattggcatggcagaggagatcaaacacatgttccacgtggcttgggtggacccagaagacccccacaaaggatttaaatacctgtacctgactccccaagactacaccagaatcagctccctgaactccgtccactgtaaacacatcgaggaaggaggagagtccagatacatgatcacggatatcatcgggaaggatgatggcttgggcgtggagaatctgaggggctcaggcatgattgctggggagtcctctctggcttacgaagagatcgtcaccattagcttggtgacctgccgagccattgggattggggcctacttggtgaggctgggccagcgagtgatccaggtggagaattcccacatcatcctcacaggagcaagtgctctcaacaaggtcctgggaagagaggtctacacatccaacaaccagctgggtggcgttcagatcatgcattacaatggtgtctcccacatcaccgtgccagatgactttgagggggtttataccatcctggagtggctgtcctatatgccaaaggataatcacagccctgtccctatcatcacacccactgaccccattgacagagaaattgaattcctcccatccagagctccctacgacccccggtggatgcttgcaggaaggcctcacccaactctgaagggaacgtggcagagcggattctttgaccacggcagtttcaaggaaatcatggcaccctgggcgcagaccgtggtgacaggacgagcaaggcttggggggattcccgtgggagtgattgctgtggagacacggactgtggaggtggcagtccctgcagaccctgccaacctggattctgaggccaagataattcagcaggcaggacaggtgtggttcccagactcagcctacaaaaccgcccaggccgtcaaggacttcaaccgggagaagttgcccctgatgatctttgccaactggagggggttctccggtggcatgaaagacatgtatgaccaggtgctgaagtttggagcctacatcgtggacggccttagacaatacaaacagcccatcctgatctatatcccgccctatgcggagctccggggaggctcctgggtggtcatagatgccaccatcaacccgctgtgcatagaaatgtatgcagacaaagagagcaggggtggtgttctggaaccagaggggacagtggagattaagttccgaaagaaagatctgataaagtccatgagaaggatcgatccagcttacaagaagctcatggaacagctaggggaacctgatctctccgacaaggaccgaaaggacctggagggccggctaaaggctcgcgaggacctgctgctccccatctaccaccaggtggcggtgcagttcgccgacttccatgacacacccggccggatgctggagaagggcgtcatatctgacatcctggagtggaagaccgcacgcaccttcctgtattggcgtctgcgccgcctcctcctggaggaccaggtcaagcaggagatcctgcaggccagcggggagctgagtcacgtgcatatccagtccatgctgcgtcgctggttcgtggagacggagggggctgtcaaggcctacttgtgggacaacaaccaggtggttgtgcagtggctggaacagcactggcaggcaggggatggcccgcgctccaccatccgtgagaacatcacgtacctgaagcacgactctgtcctcaagaccatccgaggcctggttgaagaaaaccccgaggtggccgtggactgtgtgatatacctgagccagcacatcagcccagctgagcgggcgcaggtcgttcacctgctgtctaccatggacagcccggcctccacctgaccgtggcccgcccagccactcccgggaccacggcaaaaggaaccacccagacccaccacccgtacaccctcagcagaccctgaagacttgcttttaaacaaagaaaatcctgggcacttctgcagggctgctggttccgagctgacacccgtcttaacaaaaggcccaggagtgcctcttccaaacaaaaacagcctcctctccatagctgggaagtttattttgttttgtctctgaagacagcagttttattgcatcactaaatctaatcaagctaaaacatccctgtttccttttgcaaaacagtgcctggcatgtgggatccaggcgttctttaggatccttggataccacatcgtgaaatcttttatttttttactctgagaccagcaccagatgtaagtaagcatctcatatatttcagccaaataaatgggccaagggaaaaaaatatatatatatagacaggactagagaaaacctatttttgtaatgatgtttctttggatactgtctagtcacccagaaaaatgtatggatgaatttttttttttttttttgagacaaagtctcactgtgtcatgcaggctggagtgcagtggcatgatctcactgcaacctccatctcctgtctcagcctcctagataactgggattacaggtgcccaccaccatgcccggctaatttttgtatttttggtagagacagagtttcaccaggttggtcaggctggtctcaaactcttgacttcaggtaatccacccaccttggcctcccaaagtgctgggattacaggcatgagccaccatcttcagccagatgatttttttattgagagagtgaaatgctattttgttccccaaatggcgctagtgaatcactaggagggtcccactgataggccatgtttagcactggttgccagggattctctttttgagagagggaaagcaaaatgaatggaagtacccagctggaggtttcagggcttctggaggatgctctcgcatagctcgaggtcctctgcccacctcttctctccaaggaaaatgaggactgccccttccccctgcaggattggcccccagcctgcgcatgcaccctcctcttgcccaagtggggagcacagaggcggagaggaatcccttaccacacccacggcccagcttgctcacgagtgtcacctctgtgacggtcaccactgctcccttggagggccacttgagttactgttgcttcctcgcctgctggcttgatgagcaccgatggtgggatctgaccccgaggggcagagctgtcggtgactgaggactggactgtggtgaccatgccgatttgctcagggagaacgttgcaatgcacccagcagctcctggctctgcaggcggcacagcctggggccctgtgatcctctggtttcttccattggggcggagtcggggatggagggagctggccacaacccactgctctgatgggtggtttgtccaaggatgctgaatgtaatgcctggtcaatgtggaagcccatgaggttgcccagggaagcctccaaaagctgggatgcttgagggtatccaagttgaaaaagacaaaatctgaccatcagccagtgacagtcctggcaaatgaaggtggggcggggcagtgaggggtgggagaaggtgaatgattcattattccaccccgaggtttgctggggtgaggggaagaatcgatgctgctttgggaactgaaggtttttctgttgggaaggccctcttggttttggagagaaagacaagttatgagtagctgctaccctggaacggtgggcagagagcctactaggaaatgtgcagaataaactattttttgaaggaaaaaaaaaaaaa

SEQ ID NO: 1309 - DNA, 669 bp, Homo Sapiens
  NM_001093761
agggtctgaggcagctagtagccggagggtcaccatgaagttcaatcccttcgttacctcggaccgcagtaaaaaccgcaaacgttacttcaatgccccctcacacgtgcgcaggaagatcatgtcatccccgctctccaaggagctgcggcagaagtacaatgtccgctccatgcccatccgcaaggacgacgaggtccaggtagttcgaggacactacaaaggtcagcaaattggcaaggtagtccaggtgtacagaaagaaatatgtcatctacatcgagcgggtgcagcgtgagaaggccaacggcacgactgtccacgtgggcattcacccaagcaaggtggttatcaccaggctaaaactggacaaggatcggaaaaaaattcttgaacgcaaagccaagtctcgacaagttggaaaagagaaaggcaaatataaagaagaacttattgagaaaatgcaggaataaatagaacctgttgtgcaaccacggtttaaccggagattttgaggctagggtgtgtttctttcgaacttttcggaatgtctggaacatttcatttcctgttttgttacctgtggctctgtaaatctacttttgcaattttaagtaataattttatgaataaaaatgggaaatgcttccaaaaaaaaaaaaaaaagaaa

SEQ ID NO: 1310 - DNA, 3859 bp, Homo Sapiens
  NM_001093771
ttcccacagggccttgtgcgacatgggctgcgccgagggcaaggcagtggcggcggccgccccaacggagctgcagacgaaaggcaagaacggcgatggccgccgtaggtcagctaaagatcatcaccctggtaaaactttgccagagaacccagcaggattcaccagcacggccactgcagactccagagccctgcttcaggcctatatagatggtcactctgtggtcatcttcagtaggtccacatgcacacgctgtactgaggtaaagaagttatttaaatctctgtgtgttccttattttgtgcttgaacttgatcaaacagaggacggtcgggccctggaaggaacgctctcggaattggccgcggaaaccgatctgcccgttgtgtttgtgaaacagagaaagataggcggccatggtccaaccttgaaggcttatcaggagggcagacttcaaaagctactaaaaatgaacggccctgaagatcttcccaagtcctatgactatgaccttatcatcattggaggtggctcaggaggtctggcagctgctaaggaggcagcccaatatggcaagaaggtgatggtcctggactttgtcactcccacccctcttggaactagatggggtctcggaggaacatgtgtgaatgtgggttgcatacctaaaaaactgatgcatcaagcagctttgttaggacaagccctgcaagactctcgaaattatggatggaaagtcgaggagacagttaagcatgattgggacagaatgatagaagctgtacagaatcacattggctctttgaattggggctaccgagtagctctgcgggagaaaaaagtcgtctatgagaatgcttatgggcaatttattggtcctcacaggattaaggcaacaaataataaaggcaaagaaaaaatttattcagcagagagatttctcattgccactggtgaaagaccacgttacttgggcatccctggtgacaaagaatactgcatcagcagtgatgatcttttctccttgccttactgcccgggtaagaccctggttgttggagcatcctatgtcgctttggagtgcgctggatttcttgctggtattggtttagacgtcactgttatggttaggtccattcttcttagaggatttgaccaggacatggccaacaaaattggtgaacacatggaagaacatggcatcaagtttataagacagttcgtaccaattaaagttgaacaaattgaagcagggacaccaggccgactcagagtagtagctcagtccaccaatagtgaggaaatcattgaaggagaatataatacggtgatgctggcaataggaagagatgcttgcacaagaaaaattggcttagaaaccgtaggggtgaagataaatgaaaagactggaaaaatacctgtcacagatgaagaacagaccaatgtgccttacatctatgccattggcgatatattggaggataaggtggagctcaccccagttgcaatccaggcaggaagattgctggctcagaggctctatgcaggttccactgtcaagtgtgactatgaaaatgttccaaccactgtatttactcctttggaatatggtgcttgtggcctttctgaggagaaagctgtggagaagtttggggaagaaaatattgaggtttaccatagttacttttggccattggaatggacgattccgtcaagagataacaacaaatgttatgcaaaaataatctgtaatactaaagacaatgaacgtgttgtgggctttcacgtactgggtccaaatgctggagaagttacacaaggctttgcagctgcgctcaaatgtggactgaccaaaaagcagctggacagcacaattggaatccaccctgtctgtgcagaggtattcacaacattgtctgtgaccaagcgctctggggcaagcatcctccaggctggctgctgaggttaagccccagtgtggatgctgttgccaagactgcaaaccactggctcgtttccgtgcccaaatccaaggcgaagttttctagagggttcttgggctcttggcacctgcgtgtcctgtgcttaccaccgcccaaggcccccttggatctcttggataggagttggtgaatagaaggcaggcagcatcacactggggtcactgacagacttgaagctgacatttggcagggcatcgaagggatgcatccatgaagtcaccagtctcaagcccatgtggtaggcggtgatggaacaactgtcaaatcagttttagcatgacctttccttgtggattttcttattctcgttgtcaagttttctagggttgaatttttttcttttttctccatggtgttaatgatattagagatgaaaaacgttagcagttgatttttgtccaaaagcaagtcatggctagagtatccatgcaaggtgtcttgttgcatggaagggatagtttggctcccttggaggctatgtaggcttgtcccgggaaagagaactgtcctgcagctgaaatggactgttctttactgacctgctcagcagtttcttctctcatatattcccaaaacaagtacatctgcgatcaactctagccaaatttgcccctgtgtgctacatgatggatgattattattttaaggtctgtttaggaagggaaatggctacttggccagccattgcctggcatttggtagtatagtatgattctcaccattatttgtcatggaggcagacatacaccagaaatgggggagaaacagtacatatctttctgtctttagtttattgtgtgctggtctaagcaagctgagatcatttgcaatggaaaacacgtaacttgtttaaaagtttttctggtagctttagctttatgctaaaaaaaataatgacattgggtatctatttctttctaagactacattagtaggaaaataagtcttttcatgcttatgatttagctgttttgtggtaattgctttttaaaggaagttattaatatcataagttattattaatattttgaacacaggtggatgtgaaggattttcatttaaaaaccaagtggttttgactttttctgttgaatgaacaactgtgccttgtggaatttttgcagaagtgtttatgctttgttagcatttcaacttgcattattataaagaggtattaatgcctcagttatgtgtttgtcaatgtactggctgaggattctatctcagctgtcttttctaactgtgtaggttgagttttgaacacgtgcttgtggacatcaggcctcctgccagcagttcttgaagcttctttttcattcctgctactctacctgtatttctcagttgcagcactgagtggtcaaaatacatttctgggccacctcagggaacccatgcatctgcctggcatttaggcagcagagcccctgaccgtcccccacagggctctgcctcacgtcctcatctcatttggctgtgtaaagaaatgggaaaagggaaaaggagagagcaattgaggcagttgaccatattcagttttatttatttatttttaatttgtttttttctccaagtccaccagtctctgaaattagaacagtaggcggtatgagataatcaggcctaatcatgttgtgattctcttttcttagtggagtggaatgttctatccccacaagaaggattatatcttatagacttgtcttgttcagattctgtatttacccattttattgaaacatatactaagttccatgtatttttgttacaaatcttctgaaaaaaaacaaaacaatgtgaaacattaaaattaaaaggcattaataataaaaaaaaaaaaaaaaaaaaaaaaa

SEQ ID NO: 1311 - DNA, 4450 bp, Homo Sapiens
  NM_001096
agccgatgggggcggggaaaagtccggctgggccgggacaaaagccggatcccgggaagctaccggctgctggggtgctccggattttgcggggttcgtcgggcctgtggaagaagcgccgcgcacggacttcggcagaggtagagcaggtctctctgcagccatgtcggccaaggcaatttcagagcagacgggcaaagaactcctttacaagttcatctgtaccacctcagccatccagaatcggttcaagtatgctcgggtcactcctgacacagactgggcccgcttgctgcaggaccacccctggctgctcagccagaacttggtagtcaagccagaccagctgatcaaacgtcgtggaaaacttggtctcgttggggtcaacctcactctggatggggtcaagtcctggctgaagccacggctgggacaggaagccacagttggcaaggccacaggcttcctcaagaactttctgatcgagcccttcgtcccccacagtcaggctgaggagttctatgtctgcatctatgccacccgagaaggggactacgtcctgttccaccacgaggggggtgtggacgtgggtgatgtggacgccaaggcccagaagctgcttgttggcgtggatgagaaactgaatcctgaggacatcaaaaaacacctgttggtccacgcccctgaagacaagaaagaaattctggccagttttatctccggcctcttcaatttctacgaggacttgtacttcacctacctcgagatcaatccccttgtagtgaccaaagatggagtctatgtccttgacttggcggccaaggtggacgccactgccgactacatctgcaaagtgaagtggggtgacatcgagttccctccccccttcgggcgggaggcatatccagaggaagcctacattgcagacctcgatgccaaaagtggggcaagcctgaagctgaccttgctgaaccccaaagggaggatctggaccatggtggccgggggtggcgcctctgtcgtgtacagcgataccatctgtgatctagggggtgtcaacgagctggcaaactatggggagtactcaggcgcccccagcgagcagcagacctatgactatgccaagactatcctctccctcatgacccgagagaagcacccagatggcaagatcctcatcattggaggcagcatcgcaaacttcaccaacgtggctgccacgttcaagggcatcgtgagagcaattcgagattaccagggccccctgaaggagcacgaagtcacaatctttgtccgaagaggtggccccaactatcaggagggcttacgggtgatgggagaagtcgggaagaccactgggatccccatccatgtctttggcacagagactcacatgacggccattgtgggcatggccctgggccaccggcccatccccaaccagccacccacagcggcccacactgcaaacttcctcctcaacgccagcgggagcacatcgacgccagcccccagcaggacagcatctttttctgagtccagggccgatgaggtggcgcctgcaaagaaggccaagcctgccatgccacaagattcagtcccaagtccaagatccctgcaaggaaagagcaccaccctcttcagccgccacaccaaggccattgtgtggggcatgcagacccgggccgtgcaaggcatgctggactttgactatgtctgctcccgagacgagccctcagtggctgccatggtctaccctttcactggggaccacaagcagaagttttactgggggcacaaagagatcctgatccctgtcttcaagaacatggctgatgccatgaggaagcatccggaggtagatgtgctcatcaactttgcctctctccgctctgcctatgacagcaccatggagaccatgaactatgcccagatccggaccatcgccatcatagctgaaggcatccctgaggccctcacgagaaagctgatcaagaaggcggaccagaagggagtgaccatcatcggacctgccactgttggaggcatcaagcctgggtgctttaagattggcaacacaggtgggatgctggacaacatcctggcctccaaactgtaccgcccaggcagcgtggcctatgtctcacgttccggaggcatgtccaacgagctcaacaatatcatctctcggaccacggatggcgtctatgagggcgtggccattggtggggacaggtacccgggctccacattcatggatcatgtgttacgctatcaggacactccaggagtcaaaatgattgtggttcttggagagattgggggcactgaggaatataagatttgccggggcatcaaggagggccgcctcactaagcccatcgtctgctggtgcatcgggacgtgtgccaccatgttctcctctgaggtccagtttggccatgctggagcttgtgccaaccaggcttctgaaactgcagtagccaagaaccaggctttgaaggaagcaggagtgtttgtgccccggagctttgatgagcttggagagatcatccagtctgtatacgaagatctcgtggccaatggagtcattgtacctgcccaggaggtgccgcccccaaccgtgcccatggactactcctgggccagggagcttggtttgatccgcaaacctgcctcgttcatgaccagcatctgcgatgagcgaggacaggagctcatctacgcgggcatgcccatcactgaggtcttcaaggaagagatgggcattggcggggtcctcggcctcctctggttccagaaaaggttgcctaagtactcttgccagttcattgagatgtgtctgatggtgacagctgatcacgggccagccgtctctggagcccacaacaccatcatttgtgcgcgagctgggaaagacctggtctccagcctcacctcggggctgctcaccatcggggatcggtttgggggtgccttggatgcagcagccaagatgttcagtaaagcctttgacagtggcattatccccatggagtttgtgaacaagatgaagaaggaagggaagctgatcatgggcattggtcaccgagtgaagtcgataaacaacccagacatgcgagtgcagatcctcaaagattacgtcaggcagcacttccctgccactcctctgctcgattatgcactggaagtagagaagattaccacctcgaagaagccaaatcttatcctgaatgtagatggtctcatcggagtcgcatttgtagacatgcttagaaactgtgggtcctttactcgggaggaagctgatgaatatattgacattggagccctcaatggcatctttgtgctgggaaggagtatggggttcattggacactatcttgatcagaagaggctgaagcaggggctgtatcgtcatccgtgggatgatatttcatatgttcttccggaacacatgagcatgtaacagagccaggaaccctactgcagtaaactgaagacaagatctcttcccccaagaaaaagtgtacagacagctggcagtggagcctgctttatttagcaggggcctggaatgtaaacagccactggggtacaggcaccgaagaccaacatccacaggctaacaccccttcagtccacacaaagaagcttcatattttttttataagcatagaaataaaaaccaagccaatatttgtgactttgctctgctacctgctgtatttattatatggaagcatctaagtactgtcaggatggggtcttcctcattgtagggcgttaggatgttgctttctttttccattagttaaacatttttttctcctttggaggaagggaatgaaacatttatggcctcaagatactatacatttaaagcaccccaatgtctctctttttttttttttacttccctttcttcttccttatataacatgaagaacattgtattaatctgatttttaaagatctttttgtatgttacgtgttaagggcttgtttggtatcccactgaaatgttctgtgttgcagaccagagtctgtttatgtcagggggatggggccattgcatccttagccattgtcacaaaatatgtggagtagtaacttaatatgtaaagttgtaacatacatacatttaaaatggaaatgcagaaagctgtgaaatgtcttgtgtcttatgttctctgtatttatgcagctgatttgtctgtctgtaactgaagtgtgggtccaaggactcctaactactttgcatctgtaatccacaaagattctgggcagctgccacctcagtctcttctctgtattatcatagtctggtttaaataaactatatagtaacaaaaaaaaaaaaaaaaaaaaaaaaaaaaaaaaaaaaaaaaaaaaaaaaaaaaaaaaaaaaaaaaaaaaaaaaaaaaaaaaaaaaaaaaaaaaaaaaaaa

SEQ ID NO: 1312 - DNA, 1384 bp, Homo Sapiens
  NM_001097
agtgccaggagtatggttgagatgctaccaactgccattctgctggtcttggcagtgtccgtggttgctaaagataacgccacgtgtgatggcccctgtgggttacggttcaggcaaaacccacagggtggtgtccgcatcgtcggcgggaaggctgcacagcatggggcctggccctggatggtcagcctccagatcttcacgtacaacagccacaggtaccacacatgtggaggcagcttgctgaattcacgatgggtgctcactgctgctcactgcttcgtcggcaaaaataatgtgcatgactggagactggttttcggagcaaaggaaattacatatgggaacaataaaccagtaaaggcgcctctgcaagagagatatgtggagaaaatcatcattcatgaaaaatacaactctgcgacagagggaaatgacattgccctcgtggagatcacccctcccatttcgtgtgggcgcttcattgggccgggctgcctgccccactttaaggcaggcctccccagaggctcccagagctgctgggtggccggctggggatatatagaagagaaagcccccaggccatcatctatactgatggaggcacgtgtggatctcatcgacctggacttgtgtaactcgacccagtggtacaatgggcgcgttcagccaaccaatgtgtgcgcggggtatcctgtaggcaagatcgacacctgccagggagacagcggcgggcctctcatgtgcaaagacagcaaggaaagcgcctatgtggtcgtgggaatcacaagctggggggtaggctgtgcccgtgccaagcgccccggaatctacacggccacctggccctatctgaactggatcgcctccaagattggttctaacgctttgcgtatgattcaatcggccacccctccacctcccaccactcgaccgcccccgattcgaccccccttctcccaccctatctctgctcaccttccttggtatttccaaccgccccctcgaccacttccaccccgaccaccggcagcccagccccgacccccaccttcacccccgcccccacccccacctccagcctcacctttacccccacccccacccccacccccacctacaccctcatctaccacaaaacttccccaaggactttcttttgccaagcgcctacagcagctcatagaggtcttgaaggggaagacctattccgacggaaagaaccattatgacatggagaccacagagctcccagaactgacctcgacctcctgatctgacctggttctcaacagacccagtgagcccttcactcctgagaaaaaggaaagatgaaataaataaataaacatatatatatagatataaaaaaaaaaaaaaa

SEQ ID NO: 1313 - DNA, 742 bp, Homo Sapiens
  NM_001097577
tccaggttcacacaactggaacccatctccaggaacaaacagctggaacccatctcccgttgaagggaaactgccagatttttgtaagattcttcctcctgggagcctgtgttggaagagatggtgatgggcctgggcgttttgttgttggtcttcgtgctgggtctgggtctgaccccaccgaccctggctcaggataactccaggtacacacacttcctgacccagcactatgatgccaaaccacagggccgggatgacagatactgtgaaagcatcatgaggagacggggcctgacctcaccctgcaaagacatcaacacatttattcatggcaacaagcgcagcatcaaggccatctgtgaaaacaagaatggaaaccctcacagagaaaacctaagaataagcaagtcttctttccaggtcaccacttgcaagctacatggaggttccccctggcctccatgccagtaccgagccacagcggggttcagaaacgttgttgttgcttgtgaaaatggcttacctgtccacttggatcagtcaattttccgtcgtccgtaaccagcgggcccctggtcaagtgctggctctgctgtccttgccttccatttcccctctgcacccagaacagtggtggcaacattcattgccaagggcccaaagaaagagctacctggaccttttgttttctgtttgacaacatgtttaataaataaaaatgtcttgatatcagtaagaa

SEQ ID NO: 1314 - DNA, 1313 bp, Homo Sapiens
  NM_001097590
gttgtgtcgtttccgggtcgcgcgacgctgtgggccgctttcccctctccggagtgacctaacacaggataacgaaacctgcactgctccgagcgcttcctccccggcccgtcgcgtctgcgaggcgaggccgggaggcgagggctctgcgcacgcgcggcgcaggcgcactgggcgccggtgctgttgccttcaggtgaccacggattcgccatcgtgagttccagacagggtcagatgtgttactgggctggagtgtggtggcacaatcacgctcactgcatccttgacctcctgggctcaagtgatcttcccacctcagcctcccaagtagctgggactacaggattttcaaaatggctgcagctcctcaagcaccggggcggggatctctccgtaagacgagacctctggttgtgaagacgtcgttgaacaacccatacatcatccgctggagcgctctggagagcgaggatatgcacttcatcctacagacgcttgaggacaggcttaaagctattggacttcagaagattgaagataagaagaaaaagaacaaaacaccttttctgaaaaaagaaagcagagagaaatgcagcattgctgttgatattagtgagaatctgaaggagaagaaaacagatgctaagcagcaagtgtcagggtggacgcctgcacacgtcaggaagcagcttgccattggcgttaacgaagttaccagagccctggaaaggagggaactgctgttagttctggtgtgtaaatcagtcaagcctgccatgatcacctcacacttgattcagttaagcctaagcagaagtgtccctgcctgtcaggtcccccggctcagtgagagaatcgcccccgtcattggcttaaaatgtgttctagccttggcgttcaaaaagaacaccactgactttgtggacgaagtaagagccatcatccccagagtccccagtttaagtgtaccatggcttcaagacagaattgaagattctggggaaaatttagagactgaacctctggaaagccaagacagagagcttttggacacttcatttgaagatctgtcaaaacctaagagaaagcttgctgacggtcggcaggcttctgtaacattacaaccccttaaaataaagaaactgattccaaaccctaataagataaggaaaccacccaaaagtaaaaaagctactccaaagtaatcttgcataaacttgtcatgtcatacagtttgtgaaaggacaccttgtaaagaagccttgaaactaataaaatgagttatacttacatagaaaaaaaaaaaaaaa

SEQ ID NO: 1315 - DNA, 1569 bp, Homo Sapiens
  NM_001097616
atgtttttagggatcttatccatagaacagctcatcagccgggttggtgtgattggagtgactctcatggctcttctttctggatttggtgctgtcaactgcccatacacttacatgtcttacttcctcaggaatgtgactgacacggatattctagccctggaacggcgactgctgcaaaccatggatatgatcataagcaaaaagaaaaggatggcaatggcacggagaacaatgttccagaagggggaagtgcataacaaaccatcaggtttctggggaatgataaaaagtgttaccacttcagcatcaggaagtgaaaatcttactcttattcaacaggaagtggatgctttggaagaattaagcaggcagctttttctggaaacagctgatctatatgctaccaaggagagaatagaatactccaaaaccttcaaggggaaatattttaattttcttggttactttttctctatttactgtgtttggaaaattttcatggctaccatcaatattgtttttgatcgagttgggaaaacggatcctgtcacaagaggcattgagatcactgtgaattatctgggaatccaatttgatgtgaagttttggtcccaacacatttccttcattcttgttggaataatcatcgtcacatccatcagaggattgctgatcactcttaccaagttcttttatgccatctctagcagtaagtcctccaatgtcattgtcctgctattagcacagataatgggcatgtactttgtctcctctgtgctgctgatccgaatgagtatgcctttagaataccgcaccataatcactgaagtccttggagaactgcagttcaacttctatcaccgttggtttgatgtgatcttcctggtcagcgctctctctagcatactcttcctctatttggctcacaaacaggcaccagagaagcaaatggcaccttgaacttaagcctactacagactgttagaggccagtggtttcaaaatttagatataagaggggggaaaaatggaaccagggcctgacattttataaacaaacaaaatgctatggtagcatttttcaccttcatagcatactccttccccctcaggtgatactatgaccatgagtagcatcagccagaacatgagagggagaactaactcaagacaatactcagcagagagcatcccgtgtggatatgaggctggtgtagaggcggagaggagccaagaaactaaaggtgaaaaatacactggaactctggggcaagagatgtctatggtagctgagccaaacacgtaggatttccgttttaaggttcacatggaaaaggttatagctttgccttgagattgactcattaaaatcagagactgtaacacttttgccttacgttcattttatcaagcatagcttggtatttattatgcttgtgtgatctaacatgagttagcatcccacacctcctcttctgatcctgccccattaaaataaccaagaggttatctgttcttttccgggaaaggggtggtatgcacctgaaatagattttaccaaaagaga

SEQ ID NO: 1316 - DNA, 5524 bp, Homo Sapiens
  NM_001097635
gcatgccatctttaagagctgtaacgctcactgcgaaggtctgcggcttcattcctgaggtcagggagaccacgaacccacgggaaggaagaaactcaggacacatctgaacatctgaaggaacaaactccagatgcatcatctttaagagctgtaatactcaccgggagggtccgcagcttcattcttgatttctttaaagactcgtgcagcacatcattatcgctggatgcccggacatgtaatacacctgacagcatgtgaagtgctcagaatggggcaggatgtcacctggaatcagcactaagtgattcagactttccttacttttaaatgtgctgctcttcatttcaagatgccgttgcagctctgataaatgcaaactgacaaccttcaaggccacgacggagggaaaatcattggtgcttggagcatagaagactgcccttcacaaaggaaatccctgattattgtttgaaatgctgaggacgttgctgcgaaggagacttttttcttatcccaccaaatactactttatggttcttgttttatccctaatcaccttctccgttttaaggattcatcaaaagcctgaatttgtaagtgtcagacacttggagcttgctggggagaatcctagtagtgatattaattgcaccaaagttttacagggtgatgtaaatgaaatccaaaaggtaaagcttgagatcctaacagtgaaatttaaaaagcgccctcggtggacacctgacgactatataaacatgaccagtgactgttcttctttcatcaagagacgcaaatatattgtagaaccccttagtaaagaagaggcggagtttccaatagcatattctatagtggttcatcacaagattgaaatgcttgacaggctgctgagggccatctatatgcctcagaatttctattgcattcatgtggacacaaaatccgaggattcctatttagctgcagtgatgggcatcgcttcctgttttagtaatgtctttgtggccagccgattggagagtgtggtttatgcatcgtggagccgggttcaggctgacctcaactgcatgaaggatctctatgcaatgagtgcaaactggaagtacttgataaatctttgtggtatggattttcccattaaaaccaacctagaaattgtcaggaagctcaagttgttaatgggagaaaacaacctggaaacggagaggatgccatcccataaagaagaaaggtggaagaagcggtatgaggtcgttaatggaaagctgacaaacacagggactgtcaaaatgcttcctccactcgaaacacctctcttttctggcagtgcctacttcgtggtcagtagggagtatgtggggtatgtactacagaatgaaaaaatccaaaagttgatggagtgggcacaagacacatacagccctgatgagtatctctgggccaccatccaaaggattcctgaagtcccgggctcactccctgccagccataagtatgatctgtctgacatgcaagcagttgccaggtttgtcaagtggcagtactttgagggtgatgtttccaagggtgctccctacccgccctgcgatggagtccatgtgcgctcagtgtgcattttcggagctggtgacttgaactggatgctgcgcaaacaccacttgtttgccaataagtttgacgtggatgttgacctctttgccatccagtgtttggatgagcatttgagacacaaagctttggagacattaaaacactgaccattacgggcaattttatgaacaagaagaaggatacacaaaacgtacccttatctgtttccccttccttgtcagcatcgggaagatggtatgaagtcctctttggggcagggactctagtagatcttcttgtcagagaagctgcatggtttctgcagagcacagttagctagaaaggtgatagcattaaatgttcatctagagttaatagtgggaggagtaaaggtagccttgaggccagagcaggtagcaaggcattgtggaaagaggggaccagggtggctggggaagaggccgatgcataaagtcagcctgttcaaagtgctcagggacttagcaaaatgagaagatgtgacctgtgccaaaactattttgagaattttaaatgtgaccatttttctggtatgaataaacttacagcaacaaataatcaaagatacaattaatctgatattatatttgttgaaatagaaatttgattgtactataaatgatttttgtaaataatttatattctgctctaatactgtactgtgtagtgtgtctccgtatgtcatctcagggagcttaaaatgggcttgatttaacattgtttttgtgttatttttgcttgaaacaacgcacacattttcaacaaccaaaaaatgacaatttctagtttagttaatttctacaaatcatcttatgttattagcaaggttaagacatcttttttaaaaaaattatagcttctaccaagagaaacactcaatttttctagagatttgcctctatcttcctttcctcagtcttcccagactgctatcaagctgtgtaaaaatttactttcactggaccctaaattattgtctctgctatctgactgccagtaattagtgcagaaaactaagacaggatgatacaggtttgaggggctggggagtgggaggggggagaaaaggaatgtatttaaacaatttccgatgcccatgatgagtttaaaaaccagcattgacaccatccccaaaattaaggctgtcgcttattgaatccacttgtgtccaacctcccaggattgttttatcctaatgtcacctgtatattcatttgaaaggacttggccctgttcttgggtcttcccgttacctgccccctgggtggtaagtttcctcctttctcaaccttccacgaggaggaaagaagtgtgcagtcattccacatggcctgttggaaggcctggggagggaactttgggtttgggacagatttttttttttgtttttggtatcattcacagcatacgatttttactctctccatcttcaccataagacagataatttggggttgctataatgctgtcacacatctcaaagtacattcaaatcttaaaaagaaattctcgtacttttgccatgttgatactgttcagcaaacaagctaccaggaactgtgaggctttgtcatttagcattagactttaaacaagaattaaaatcatgtgctgtatttttaaaatctagccaaattaaatagtacatgagaaattcagagtattagacagttttaaggcattcaactgagaaaactttatttgtcaaagtcagaaaacattttcatcttattgagagatatgtttttaaacttttatcatcatttgtaaatgtggaagttggtggattgctgtgtttttgcatgattagcatgggagtctgttggagcaagaggaacatgcttgttttgaaaactcgagatgatgagggtggtacatgcagtgtgttctctctttattggcttctaaaccagttttgtcctttaatgcatgtcaaatatttctcccatgcttctcttagcagaaaagtttttacctataagacagggcaccttttaactctaaaactagtgatactcagtgacatagactttgtcttataaacattttttcattttttattttgaaaaattgcaaatctacagcaaaagtaaaacagtagagtgaacaccatgtaaccctcacctggtgttaacattgtaccctatttgctttaagttgtatgtatttctgaacttggcaaaattggaaattaaaatttttaaaaattacaaatatacaaagttatttatcttagcacatttattatgtgtgactgcatctgatttatatttaaattggcaggttttgagggatttttttcttcatcataaatgtaaacataggattttagagtctatttccccaagcgccacattataactgtaaacttaccatcttctatgtagctgtgatatctcatctttctaaaatggaacttgttaaaaagtgttcaaacactatccctaatgcctgcggcagaatttatatacgatccattcattggggctcaaagtatcttttagacttttaaggacaatttacagcaaatgaaatttatgatgctgtgacaagaaatttaaagaatcaaaacgatggtttgaaaaggaaacctatgatacatgcaggagaagcaaaacccaagtgattggtgagaaatatagaaattatttaaattactttatagtaattattaaacactaatttttgtactgtcattgaaggtgttttatagagaaatctgagaaatcacattcacaaattagaagtcaaacatggccaggcacagtggctcacacctgtaatcttcaggatttcaagaccagcctagccaacatgacgaaaccccatctctactgaaaatagaaaaaaaaaattagccaggcttgcacctgtaatcccagttacctgggaggctgaggcaggagaatctcttgagcccaggaggcggaggttgcagtgagctgagatgccaccaccacaccagcctgggtgacagagtgaaactcgtatctccaaacaaacaaacaaaaagtccttaaacatatgtgaacaaaaattttgtgatggaaggattctagttaatgagtattgcatcaagatttacatctttcttactaaggaaaagagttaataaaaattgttctttattttacaggcagttactgaggctcttcccagatctcagtaaacagccactcagccttgaaaatggagtgttgttgtttctaaacatatatttatgtcatttattaagtacagttcacttaaataacataagtagattttctcttgtagtgatttgggtaggaagaggccatgtttcagttcgttttctctgtagggtcgattgaattggaccttttcagttgttcagaaaaataaaaataatttctcatattaaatacagacgctcctcaacttatgatgtgggtaggtcccagtaaacccattataatttgaaaatatcacattgaaaatgcatttaatatctcttacctgaaatcataacttagccaagcctaccttaaatgttctcagaacatttagcctgcagttgggcaaaaccatttaacacaaagcctattttataatgaagtgttgaatagctcatgttatttactgaatactgttgtgaaagtgaaaaacaatgattgtatgggtactcaaagtataatttctactgaatgcatatcacttgtgcactgttgtaaagctgaaaaaccgttaagcctctacgatttttaagtaagttggggaccatcagtttaaaataaatgcaatactatttcatgataaacatggtcactgtaagttttactcttttgaatgagggtgcgacagaatgcagttagaatcagttcatatcaccattaaaatcatccattcagaaaccaaaaaaaaaaaa

SEQ ID NO: 1317 - DNA, 12615 bp, Homo Sapiens
  NM_001098175
gtgtacgtgtaaaattatgatcaaataaatttgtatgccttttctcctattaacctgccttttttgtcagcgattgtcagtgaaacttcagagggcaaaggggaagttttccttggcccctccagttttggtgctgtgaacaggataccaaagctgctctgttcttctggaagctgcaatgaagggaaccaaggacctgacaagccagcagaaggagtctaacgtgaagacattttgctccaagaatatcctagccatccttggcttctcctctatcatagctgtgatagctttgcttgctgtggggttgacccagaacaaagcattgccagaaaacgttaagtatgggattgtgctggatgcgggttcttctcacacaagtttatacatctataagtggccagcagaaaaggagaatgacacaggcgtggtgcatcaagtagaagaatgcagggttaaaggtcctggaatctcaaaatttgttcagaaagtaaatgaaataggcatttacctgactgattgcatggaaagagctagggaagtgattccaaggtcccagcaccaagagacacccgtttacctgggagccacggcaggcatgcggttgctcaggatggaaagtgaagagttggcagacagggttctggatgtggtggagaggagcctcagcaactacccctttgacttccagggtgccaggatcattactggccaagaggaaggtgcctatggctggattactatcaactatctgctgggcaaattcagtcagaaaacaaggtggttcagcatagtcccatatgaaaccaataatcaggaaacctttggagctttggaccttgggggagcctctacacaagtcacttttgtaccccaaaaccagactatcgagtccccagataatgctctgcaatttcgcctctatggcaaggactacaatgtctacacacatagcttcttgtgctatgggaaggatcaggcactctggcagaaactggccaaggacattcaggttgcaagtaatgaaattctcagggacccatgctttcatcctggatataagaaggtagtgaacgtaagtgacctttacaagaccccctgcaccaagagatttgagatgactcttccattccagcagtttgaaatccagggtattggaaactatcaacaatgccatcaaagcatcctggagctcttcaacaccagttactgcccttactcccagtgtgccttcaatgggattttcttgccaccactccagggggattttggggcattttcagctttttactttgtgatgaagtttttaaacttgacatcagagaaagtctctcaggaaaaggtgactgagatgatgaaaaagttctgtgctcagccttgggaggagataaaaacatcttacgctggagtaaaggagaagtacctgagtgaatactgcttttctggtacctacattctctccctccttctgcaaggctatcatttcacagctgattcctgggagcacatccatttcattggcaagatccagggcagcgacgccggctggactttgggctacatgctgaacctgaccaacatgatcccagctgagcaaccattgtccacacctctctcccactccacctatgtcttcctcatggttctattctccctggtccttttcacagtggccatcataggcttgcttatctttcacaagccttcatatttctggaaagatatggtatagcaaaagcagctgaaatatgctggctggagtgaggaaaaaaatcgtccagggagcattttcctccatcgcagtgttcaaggccatccttccctgtctgccagggccagtcttgacgagtgtgaagcttccttggcttttactgaagcctttcttttggaggtattcaatatcctttgcctcaaggacttcggcagatactgtctctttcatgagtttttcccagctacacctttctcctttgtactttgtgcttgtataggttttaaagacctgacacctttcataatctttgctttataaaagaacaatattgactttgtctagaagaactgagagtcttgagtcctgtgataggaggctgagctggctgaaagaagaatctcaggaactggttcagttgtactctttaagaacccctttctctctcctgtttgccatccattaagaaagccatatgatgcctttggagaaggcagacacacattccattcccagcctgctctgtgggtaggagaattttctacagtaggcaaatatgtgctaaagccaaagagttttataaggaaatatatgtgctcatgcagtcaatacagttctcaatcccacccaaagcaggtatgtcaataaatcacatattcctaggtgatacccaaatgctacagagtggaacactcagacctgagatttgcaaaaagcagatgtaaatatatgcattcaaacatcagggcttactatgaggtaggtggtatatacatgtcacaaataaaaatacagttacaactcagggtcacaaaaaatgcatcttccaatgcatatttttattatggtaaaatatacataaatataattcaccattttaacatttaattcatattaaatacgtacaaatcagtgacatttagtacattcacagtgttgtgccaccatcaccactatttagttccagaacatttgcatcatcaatacattgtctagagacaagactatcctgggtaggcagaaaccatagatcttttgtgtttacagctatggaaaccaactgtaccataaagatagttcactgagttttaaagccaagccacatcttatttttccaaggtttaatttagtgagagggcagcattagtgtggagtggcatgcttttgccctatcgtggaatttacacatcagaatgtgcaggatccaagtctgaaagtgttgccacccgtcacacaacatgggctttgtttgcttattccatgaagcagcagctatagaccttaccatggaaacatgaagagaccctgcacccctttccttaaggattgctgcaagagttacctgttgagcaggattgactggtgatgtttcattctgaccttgtcccaagctctccatctctagatctggggactgactgttgagctgatggggaaagaaaagctctcacacaaaccggaagccaaatgtcccctatctcttgaatgatcaagtcacttttgacaacatccaggtgaatataaaaacttaataaagctgtggaaaggaactcttaatcttcttttctgctacttaggttaaattcactagatcttgattaggaatcaaaattcgaattgggacatgttcaaattctttcttgtggtagttgcctatactgtcatcgctgctgttggttgagcatttgtggtgtaccacgctgtgtgctcaagggtattacattcatcttctcatttaatcctcacaacaatctgaagaaggtaggtattacaattcccacttcatagaaacagaaactgaggttcagagaggttaagtcatttgcccaaatggctgagccaaagcctaccatgtacctaacctttattttctttcccgaacataccaggctgtctcctcataacttccaagcatgcacttaaaactccacatgaatacaaggttcatgggacttggtattcatagaaagggaggcagaaagctggtctgttcctgataggcttgtaatttaatatcattctgttcatgtgctttggatggaagcacatctggcatatgatgctaatcagtggttcccatacccctggcttcctaattttaatgtttgctcacagcatagtagattgacatcaaatagtggccgatgatgatgaaaataaaggtcaaataagttgagccaataacagccgcttttttccttctgtctgcgtatacaaagcactgtcatgcacacaatctattctgaccctcacaacaacccataagggtgtaaatagtatttccattttacaaatgaggatcacacaaactactacatggcagagcagatactccaactcatgtcttctggttgaagcctattgctttttcttttctaaacactttccctcagcaagttggaattagacttcacaagtctccttcagagaacacaaatcttttcttattccattcctgtttggttgcctacgtccaatctccccctccccagagatgccaaaaaaaaaatcctttaaggtatttgggagccaaactcaacttgttaaaatctcaaattatggagacaatcagcagacacaacctaaccccaattattttggcaggaaggttggtttagaggcagatccagcaatctgctttgggccactctgggtggggtaggtgaaataagattggtcactgttaactaattttaatattggattggccattggttatcactgattaccattctcccctggattttcacccaggactcaaaacttggttctgctaaccctgttcctttatgaggaaccttttaaagattcctttataaggtgggagttttttttctatgaacctataggggagaaaaaagatcagcagaagtcattacttttttttttttttttttttttttttgagagagagtctcactccattgcccaggctggagtgcagtggtgctatctcggctcactgcaacctccgcctcctgggttcaagcaattctcctgcctcagcctcccgagtagctgggattgcaggtgcccaccaccacacccggctaatttttgtatttttagtaaagacagggtttcaccatgttggccaggctggtctccaactcccaatctcaggtgatcctattgcctcgggctcccaaagtgctgggattacaggagtgagccaccatgcctggccagaagtggttacttctgtagacaaaagaataatgctacttaatcaggctttctgtgtgacaagaaagagaaagaaaataaagaagtttcaattcatccaattcttaataagaaatatgtaaataaaattttttaaaattacacttcattttaatgttgtatcagtcaaggtccctgcaagagatggatggtatggtacactcaaactgggtaacacaggagagttttcagaaagcaactaaatccaaaatactatcaaggaatcaatataaaaattgttaatatttttctcatactaaattttcaaaatattttgtgtctattacatttacagcacatcttaattaggactagctgtgtgttcacctcacatgtggcttgtagctaccatactggacagcacatgtccaaaaaaatacacgtaaagttaaagtttaaaagacacaggaactaagccctcattgtctttcccttgggaggtagtttaaagagctatagatgctgtaacattcttgctattatttattatatatgacattattcctaaaaaagcttttgagatcctaggttgtattcctcaggttttgttgccttcccatgaagatgtgaaggcagggatgcctgttattcagtccaagatgcatgacaagagaccttgggaaagtttcatctggatttaaagattaattcttgatgcttacattccatactcaaaatgtaaatttgaatattaaaataaagatgattttttttttggagctagtcttgctctgttgcccaggctggaatgcagtggcatgatcatggctcactgcagcctcgacctcccaagctcaagcaaggctacaggtgtgcacctaagtagctaggactacaggtgtgcaccaccatgtctagctatttttttttctgtagagacagggttttcctatgttgtccaggctggtctcgaactcctgccctcaagcaatcctcctgccttggcctcccaaagtgttgagattacaggcgtaagccactgcacctggccaagatgaatattttaatagctcacagaacaaagtttgccacataatgataaaattactatgaaaatatattccctttattgtcagtttaaaagatgaactgagtttcacccaaactggtctggcccctctctgattcaaataccaatagttgctctgattcaaattccaactgttagaacatgacagctgctcataactagctttgcttactaaccatgtttctttccatttgtattaggtcctttactttttataacagcctcaaagtttcatgaattgctgcagtaaacattgattttcatgtttgtgagtctgcaagccagctgggcagctctacttcaggtggtaagggtggatcagacctattccatatacctcttgttctccttgtccagtggtttctagggatatgttctcatgatgaaccccgcagaggctcgtgaaagtgagaggaaactaggatgcctcttaaggtcttggtcaggatggggtctcctgtcacttctgtcacaggctattgtaagtcatatgagcaagctcaataaaatataaacaagtcagataaacagtgggaggaatggcaaagtcatatggccaaggccatgagtgattaattttaacacaggaaaaaagtaaagcattaaatgcgattatttaatatacaatgtcttattaactgaaatataaaatgtgtttactgtaaaatataatctgtttatctcaccaaagaaatattatctttaaaaaatgtcattacttctaagacatcatcagtctgcaacttctttccatagccttaatcaggatgctgtggcagctcccacattagcctcgcattctaaactggtagatgtcctaggaaaccatacatctatgtatttttcttattttatacgtttaggacaatgtatagctaattacccaactttttatttgcatacaaatctaatacaactgaacacaatcagttttatcacaggtataatggatttttcaatagtgaggaggtgcctccatgagccttctctttagaaaagtggcattcaagactcttcatttgaagtgaagattgctatgtcttttgcattgctctattttacataaattaagttataaattgacactataatcaactgacaccatgatcagtgatgatgatcaccctcatcagcactagagttgacttgtttttataacccctttgcatgtatgttgaatagcaaagttcatcagagaacatgtattagtcaatggtaagtaagatactctcatctaagaaataacatcacctcttctaatgaagttctaagaagagagggaagaaaaagtcttgggagctagtcagggaatagtgtgtatttgcaattacctaaactgaactctaccattactcctaacccagttcctcctcctgtgttttacatgattaatgccacccctgcctcaatgaaccaagatcagctccatcactgggacctccccattctgcctgtgcaatatttttcttttttatttctccttctaatattactgttattgctccagtaaagagctgtaatatattttacctggactgataccaggaatggtggtgttgcttccaatctgttgctgctagattaatctttgcaaagcacaggcttaatttcattgctgctcaactaaaaccactggtggctttccattgcctacaaaataaagtcaacctccccatcagacattcaaggctttcaatgatccatggccgccagctctctccaggctcatatcccactccactcctctgatgtttcctacactacactacactatactacactacagccaggtagaatgactgttcacccaacaccactcaggttgtcttctcaacttggaatactcttgcaccttcaaagctcatttcaaatgccccttcatttgtgaagccttctccaaatttccaagtcagaatgtctcttccttgtgctaccacaaccctttaactgagcctccattagtgcactgagaccattctgttcagtgtctgggtgaagcttcctggtgaaaaatatgttacctatttctttctgaaaagttggattcagggatattatcacggacctaaggtaatagttctagccaacctccctgtccactgccaggccgactacaaacccttctgttgctggcgagctggtccgcaccactagttctgcttcactctatttatctcttgatgtaaccatcttctttctccaggttttaagaaccagcccaactcctggttccctgatgaagcttttattcccctagccacatggaacttttcctttttggaacatgcctttagtttctgtgtagtttgccatgcagcacttcattgtacacattattaaaacagaattttaaggattagaatgaaccttaaaagatcatgcatctcaaaatttaatgtacatacaaattacccagggattttgttgaaataaaaattatttaattttaattaatataaataattcagtaggtctggggtgaggcctgaggttttacatttccaacaagctgccaggtaaagccaatacatctgtccaggaatcacactttgcgtatcaaaggtctagatgacattatcattccaaagagtttcttttacaggctctcagatcagtgttcatccactacctgactactgtcattcacaggcattctgttccacagcaggccagctaacgtggtatttacaaagctcactcctcttatacaacaatccaagtgtttcttttgtcagttgtctgtgccccaggagatccctctctgccttgccttgccctctgcctttggagaccagcacctcatactcagtgaaggcctggagtgcttaagagggatttcttccagctctcttgccctggtcttcagtgtattagatgtattacctccatgctctcagtagaggcccataggaaagagtaggtaggttatgccagctcacacgcatcctttaaaaatggtttagaagtttagctggtttcttattactcctgtctatggatgtttccttctgtcactctactagggatgaaacagctaatcatgttcaatagttacatttagattggtttttaaaaactatgattgtattagttcgtttccatgctgctgataaagacatatctgagactggaaacaaaaagggtttaattggacttacagttccacatggctggggaggcctcaaaatcaggtgggaggcaaaaggtacttcttacgtggtggcatcaagagcaaaatgaggaagaagcaaaagcagaaactcttcataaacccaccagatcttgtgggacttattatcacgagaatagcacagaaaagactggcctccatgattcaattacctcccactgcgtccctcccacaacatgtgggaattctgggagatacaattcaagttgagatttgggtggggacacagccaaaccatatcattcctccctgggctcctccaaatttcataatcctcacatttcaaaaccaatcattccttcccaacagttccccaaagtcttaactcatttcagcattaacccaaaagtccacagtccaaagtctcatctgagacaaggcaagtcccttccacttacaagcctgtaaaagcaagctagttacctcctagatacaatggggggtacaggtattgggtaaatacagctgttccaaatgagagaaattggccaaaacaaaggggttacagggtccatgcaagtctgaaatccagtggggcagtcaaattttaaagctccataatgatctcctttgactccatgtctcacattcaggtcatgctgatgcaagagataggttcccatggtcttgtgcagctccgcccctgtggctttgcagagtacagcctccctcctggctgctttctcaggctgatgttgagtgtctgtagcttttccaggcacaagatgcaagttggtggttgatctaccattctggggtctaccattctggggtctaccgttctgggactgtggccttcttctcacagctccactaggcagtgccccaacagggactctgtgtgggggctctgccccacatttcccttccacactgccctaggagaggttccccatgagggctctgcccctgcagcaaacttttgcctggacatccaggtgtttccatatatattctgaaatctaggcagaggttcccaaatctcaattcttgacatctctgcacccacaggctcaacatcacatggaagctgccaatgcttggggcctctaccctctgaagccacagcccaagctctatgttggctcctttcagccatggctggagcagctgggacacagggcaccaagtccctaggctgcacacagcacagagaccctgggcccagcccacaaaaccactttttcctcctgggcctctgggcctgtgatgggaggggctgccatgaaggtctctgacatgacctggagacattttccccatggtcttggggattaacattaggctccttgctgcttatgcaaatttctgcagccagcttgaatttctccttaaaaaaaatgggtttttcttttctactgcatcatcaggctgcagattttccacatttatgctcttgtttcccttttaaaacagaatgtttttaacagcacccaagtcaccttttgaatgctttgctgcttagaaatttattccaccagataccctaagtcatctctctcaagctctaagttccacaaatctctagggcaagggtgaaatgctgccagtctccttgctaaaacataacaagggtcacctttacttcagttcccaacaaggtcttcatctccatctgagaccacctcagcctggaccttattgttcatatcactatcagtatttttgtcaatgccattcacagtctctaggaggttccaaactttcctacattttcctatcttcttctgagccctccagattatttcaacacccagttccaaagttgcttccacattttcgggtatcttttcagcaatgccccactctactggtactattagtccattttcatgctgctgataaagacatacctgagactgggaacaaaaagaggtttaattggacttatagttccacctggctggggaggcctcagaatcatggcaggaggtgaaaggcatttcttacacggcagcagcaagagaaaaatgaagaagcagcaaaagcagaaacccctgataaaaccatcagatctcgtgagacttattcactatcacaagaatagcatgggaaagaccagcccccttgattcaattacctccccctgggtcctgtgggaattctggaaggtacaattcaagttgagatttgggtggggacacagccaaaccatatcaatgattttgtactttaaccagctgaatggaagtacaatctcttgctatatgacacaataattatttgcaaaatgagtaaacatatcataaggaaattatttttacaaggtttgaaacctgaaatgcagtctattatcatacataactaaaaatagagcctcaataaacagattcccagttttgaaaatgcaacatttgtactccacattgtcagttttcttaggtatatttataaatactcctataaaaatgtaaagaaacacataatgtagattgctaattttataataacacaagttgattttgacatccaacttattaattatgaaatgacttttggcctagtaacaatgaaaatgggggcaaatacagataaatggtaattcttagaatgaactactcagcaccaattctaagtttttcttgatggtaaatcataatgttccctttctcctcggttctgcaatctataggcataccataattgtaatcaatagcttaaaaatatgtctctctgtcctattctgtatctgtatctcttggatttttacctttgcaatagtcaactgaaccatcttcttggagtactcatgaagatggaagtctacatggagaatacaggatgaatccactctgtctcctgcagtgaagtctgtttgaaggatgtatttggctgtcttctggacaggccattctaataacagaaacaaacaagttattttaaaacttattggaatattcaaatattaaccaaagtagaaaaatataatacacatccatgtgcccatcacagaacttcactgattatcatcatttagccagtcttgaagaagcaagtgctaattacaatcacaaatgaaacaagattcagacttcatgaagagcactgcgctataataaaagaagaaatgagcacatacattcttttactgacagtcaaatggtgaaggtgggcagaatcattatgtgatgcaacatggcaaaagtatacagacagtgcatccagaggaaggcaccttgctgaatgactagaatggaagtaggagacattttgcaggcccccttcatcctgcagggagaaccagaaccacagcagctctatttgcctattcctctttaaattacaaagttaaaatttgggagtagtagaaaatcaattggttatcttatagagtctcctagaatatttcattggcattgagaaggtggaaaatgcaaattatatactttaaaatgtaatttttgcttttcacatatgcttaaagcctaaaacctcttaataaacttcttctgaaatata

SEQ ID NO: 1318 - DNA, 1484 bp, Homo Sapiens
  NM_001098200
aagtcataaggtgaaaaagcctatttcagagagcacttcctgaaagagacaaagcagcaattaaagtcagcccagcaccaactccgacgccaagcgttacactggaaactactttttaaagcaacaaaagagtctaaaacaaaatacaacatttcttaaatacactgtttccagaaagagctattttaacagaagcaactcaaagatatcccttcgacagaagtggaagtgctgaaaaatgctcatctctcacacagacttttgatggacaggagtttctaagtatcatgcctaccaacaagctgtaaaatgatcaccctgaacaatcaagatcaacctgtcccttttaacagctcacatccagatgaatacaaaattgcagcccttgtcttctatagctgtatcttcataattggattatttgttaacatcactgcattatgggttttcagttgtaccaccaagaagagaaccacggtaaccatctatatgatgaatgtggcattagtggacttgatatttataatgactttaccctttcgaatgttttattatgcaaaagatgaatggccatttggagagtacttctgccagattcttggagctctcacagtgttttacccaagcattgctttatggcttcttgcctttattagtgctgacagatacatggccattgtacagccgaagtacgccaaagaacttaaaaacacgtgcaaagccgtgctggcgtgtgtgggagtctggataatgaccctgaccacgaccacccctctgctactgctctataaagacccagataaagactccactcccgccacctgcctcaagatttctgacatcatctatctaaaagctgtgaacgtgctgaacctcactcgactgacattttttttcttgattcctttgttcatcatgattgggtgctacttggtcattattcataatctccttcacggcaggacgtctaagctgaaacccaaagtcaaggagaagtccataaggatcatcatcacgctgctggtgcaggtgctcgtctgctttatgcccttccacatctgtttcgctttcctgatgctgggaacgggggagaacagttacaatccctggggagcctttaccaccttcctcatgaacctcagcacgtgtctggatgtgattctctactacatcgtttcaaaacaatttcaggctcgagtcattagtgtcatgctataccgtaattaccttcgaagcatgcgcagaaaaagtttccgatctggtagtctacggtcactaagcaatataaacagtgaaatgttatgaataataaggttctttcatttcaatcccatcaaaattcacttcactaactactctggcgtcaatggatattctgtataatactatcaagtcccttttctcttgaaaaaataaattcattatcttcattttaaaaacttatataaaacatttttgtgaattattcaaaaaaaaaaaaaaaa

SEQ ID NO: 1319 - DNA, 2650 bp, Homo Sapiens
  NM_001098204
acaatgcgccgtcgcggccccgcccccggacgccggacgcagaaactccgccctgccgcggtccttgcgtccttccggctccgtcgtggaagcaggactgcgccgcgtcttcctcaaggttgagaacaaaaacatgcacctggagtttccccggagccctctgcgtggttgagcttcggtggaatttcggggctcttggctgccagccgcgcttgcctggtagcaacagaaaccagtcctgctcgcctccgtggacatttcattaccatccagaagtgtctcccactgaaggcatccgtggttgtttttaagccacaaaaaagccacacccaagatcacctgacacccaccctgacaagtgtccatgatgctgggccctgagggaggtgaaggctttgtggtcaagctccgtggcctgccctggtcctgctctgttgaggacgtgcagaacttcctctctgactgcacgattcatgatggggccgcaggtgtccatttcatctacactagagagggcaggcagagtggtgaggcttttgttgaacttggatcagaagatgatgtaaaaatggccctgaaaaaagacagggaaagcatgggacaccggtacattgaggtgttcaagtcccacagaaccgagatggattgggtgttgaagcacagtggtcccaacagtgccgacagcgccaacgatggcttcgtgcggcttcgaggactcccatttggatgcacaaaggaagaaattgttcagttcttctcagggttggaaattgtgccaaacgggatcacattgcctgtggaccccgaaggcaagattacaggggaagcgttcgtgcagtttgcctcgcaggagttagctgagaaggctctagggaaacacaaggagaggatagggcacaggtacattgaggtgtttaagagcagccaggaggaagttaggtcatactcagatccccctctgaagttcatgtccgtgcagcggccagggccctatgaccggcccgggactgccaggaggtacattggcatcgtgaagcaggcaggcctggaaaggatgaggcctggtgcctacagcacaggctacgggggctacgaggagtacagtggcctcagtgatggctacggcttcaccaccgacctgttcgggagagacctcagctactgtctctccggaatgtatgaccacagatacggcgacagtgagttcacagtgcagagcaccacaggccactgtgtccacatgaggggcctgccgtacaaagcgaccgagaacgacatttacaacttcttctctcctctcaaccctgtgagagtccatattgagattggcccagatggaagagtgacgggtgaagcagatgttgagtttgctactcatgaagaagctgtggcagctatgtccaaagacagggccaatatgcagcacagatatatagaactcttcttgaattcaacaacaggggccagcaatggggcgtatagcagccaggtgatgcaaggcatgggggtgtctgctgcccaggccacttacagtggcctggagagccagtcagtgagtggctgttacggggccggctacagtgggcagaacagcatgggtggctatgactagttttgttaggaacatttgagttacttcaatcattttcacaggcagccaacaagcaattaagagcagttataatagaggaagctgggggacccattttgcaccatgagtttgtgaaaaatctggattaaaaaattacctcttcagtgttttctcatgcaaaattttcttctagcatgtgataatgagtaaactaaaactattttcagcttttctcaattaacattttggtagtatacttcagagtgatgttatctaagtttaagtagtttaagtatgttaaatgtggatcttttacaccacatcacagtgaacacactggggagacgtgcttttttggaaaactcaaaggtgctagctccctgattcaaagaaatatttctcatgtttgttcattctagtttatattttcatttaaaatcctttaggttaagtttaagctttttaaaagttagttttgagaattgagacacaatactaatactgtaggaattggtgaggccttgacttaaaactttctttgtactgtgatttccttttgggtgtattttgctaagtgaaacttgttaaattttttgttaactaaatttttttcttaaaataaagactttttcacaatgactggcacagattactcagcaaaagatagcaaaacgggtggttgaagataattcattttaatcgtaatgtattttagtgtgaatttaaaaatttcatacatcaaatctatgatctcccttatattcttatgatgaggctaaataaaagtctaataaaaatgttaaatatgtgaatggtggaaatggtgactagcagcacacattctgggaagcatcaaatagacacacggccccagccacctgcaacttatgtgcactgttgtaaaccattcagaattttcctgctaggcccttgatgctggagtcacatctgttgatagctggagaactttagtttcaagtactacattgtgaaagcaattattttgtttctagtttttataaaatgctgatttaaacttttaaaaaaaaaaaaaaaaaa

SEQ ID NO: 1320 - DNA, 3415 bp, Homo Sapiens
  NM_001098209
aggatacagcggcttctgcgcgacttataagagctccttgtgcggcgccattttaagcctctcggtctgtggcagcagcgttggcccggccccgggagcggagagcgaggggaggcggagacggaggaaggtctgaggagcagcttcagtccccgccgagccgccaccgcaggtcgaggacggtcggactcccgcggcgggaggagcctgttcccctgagggtatttgaagtataccatacaactgttttgaaaatccagcgtggacaatggctactcaagctgatttgatggagttggacatggccatggaaccagacagaaaagcggctgttagtcactggcagcaacagtcttacctggactctggaatccattctggtgccactaccacagctccttctctgagtggtaaaggcaatcctgaggaagaggatgtggatacctcccaagtcctgtatgagtgggaacagggattttctcagtccttcactcaagaacaagtagctgatattgatggacagtatgcaatgactcgagctcagagggtacgagctgctatgttccctgagacattagatgagggcatgcagatcccatctacacagtttgatgctgctcatcccactaatgtccagcgtttggctgaaccatcacagatgctgaaacatgcagttgtaaacttgattaactatcaagatgatgcagaacttgccacacgtgcaatccctgaactgacaaaactgctaaatgacgaggaccaggtggtggttaataaggctgcagttatggtccatcagctttctaaaaaggaagcttccagacacgctatcatgcgttctcctcagatggtgtctgctattgtacgtaccatgcagaatacaaatgatgtagaaacagctcgttgtaccgctgggaccttgcataacctttcccatcatcgtgagggcttactggccatctttaagtctggaggcattcctgccctggtgaaaatgcttggttcaccagtggattctgtgttgttttatgccattacaactctccacaaccttttattacatcaagaaggagctaaaatggcagtgcgtttagctggtgggctgcagaaaatggttgccttgctcaacaaaacaaatgttaaattcttggctattacgacagactgccttcaaattttagcttatggcaaccaagaaagcaagctcatcatactggctagtggtggaccccaagctttagtaaatataatgaggacctatacttacgaaaaactactgtggaccacaagcagagtgctgaaggtgctatctgtctgctctagtaataagccggctattgtagaagctggtggaatgcaagctttaggacttcacctgacagatccaagtcaacgtcttgttcagaactgtctttggactctcaggaatctttcagatgctgcaactaaacaggaagggatggaaggtctccttgggactcttgttcagcttctgggttcagatgatataaatgtggtcacctgtgcagctggaattctttctaacctcacttgcaataattataagaacaagatgatggtctgccaagtgggtggtatagaggctcttgtgcgtactgtccttcgggctggtgacagggaagacatcactgagcctgccatctgtgctcttcgtcatctgaccagccgacaccaagaagcagagatggcccagaatgcagttcgccttcactatggactaccagttgtggttaagctcttacacccaccatcccactggcctctgataaaggctactgttggattgattcgaaatcttgccctttgtcccgcaaatcatgcacctttgcgtgagcagggtgccattccacgactagttcagttgcttgttcgtgcacatcaggatacccagcgccgtacgtccatgggtgggacacagcagcaatttgtggagggggtccgcatggaagaaatagttgaaggttgtaccggagcccttcacatcctagctcgggatgttcacaaccgaattgttatcagaggactaaataccattccattgtttgtgcagctgctttattctcccattgaaaacatccaaagagtagctgcaggggtcctctgtgaacttgctcaggacaaggaagctgcagaagctattgaagctgagggagccacagctcctctgacagagttacttcactctaggaatgaaggtgtggcgacatatgcagctgctgttttgttccgaatgtctgaggacaagccacaagattacaagaaacggctttcagttgagctgaccagctctctcttcagaacagagccaatggcttggaatgagactgctgatcttggacttgatattggtgcccagggagaaccccttggatatcgccaggatgatcctagctatcgttcttttcactctggtggatatggccaggatgccttgggtatggaccccatgatggaacatgagatgggtggccaccaccctggtgctgactatccagttgatgggctgccagatctggggcatgcccaggacctcatggatgggctgcctccaggtgacagcaatcagctggcctggtttgatactgacctgtaaatcatcctttagctgtattgtctgaacttgcattgtgattggcctgtagagttgctgagagggctcgaggggtgggctggtatctcagaaagtgcctgacacactaaccaagctgagtttcctatgggaacaattgaagtaaactttttgttctggtcctttttggtcgaggagtaacaatacaaatggattttgggagtgactcaagaagtgaagaatgcacaagaatggatcacaagatggaatttatcaaaccctagccttgcttgttaaatttttttttttttttttttaagaatatctgtaatggtactgactttgcttgctttgaagtagctctttttttttttttttttttttttttgcagtaactgttttttaagtctctcgtagtgttaagttatagtgaatactgctacagcaatttctaatttttaagaattgagtaatggtgtagaacactaattcataatcactctaattaattgtaatctgaataaagtgtaacaattgtgtagcctttttgtataaaatagacaaatagaaaatggtccaattagtttcctttttaatatgcttaaaataagcaggtggatctatttcatgtttttgatcaaaaactatttgggatatgtatgggtagggtaaatcagtaagaggtgttatttggaaccttgttttggacagtttaccagttgccttttatcccaaagttgttgtaacctgctgtgatacgatgcttcaagagaaaatgcggttataaaaaatggttcagaattaaacttttaattcattcgattg

SEQ ID NO: 1321 - DNA, 7479 bp, Homo Sapiens
  NM_001098402
gcgatgacctcatccctggtgtgggatgacgtcaaattcaagatggatggaatcacagcggcagcggcggctgcggcgcgcgcgagccgagtgtgagcggaaaggggcccggcgtctgcctcgagactgaagaccgaagacatgaagtagaaacaatccaggaaggctttgggaagctatttgtgtgcgaggatcaaagtgataaactcaagccatggagggattactgcattacatcaaccctgcacacgccatttctctcctaagtgccctgaatgaggagcgtctcaaaggacagctgtgtgatgtgctgctgattgttggagaccaaaagttccgagctcataaaaacgtcttggctgccagcagcgaatactttcagagtttattcacaaataaggaaaatgagtcacaaactgtatttcagcttgacttctgtgagccagatgcttttgataatgttttaaactacatttattcttcctctctatttgttgagaagagcagccttgctgctgtgcaagaacttggctatagtcttgggatttcctttctgactaacatcgtttctaaaacacctcaagccccctttccaacgtgtcctaatagaaaaaaagtgtttgtagaagatgatgaaaacagttctcaaaagagaagtgtcattgtttgtcaaagtagaaacgaagcgcaaggaaaaactgttagtcaaaatcaacccgatgtaagccatacttcccggccctctcctagcattgcagtcaaggccaataccaataagccacatgtcccaaaaccaatagaaccacttcataatttgtcattaactgaaaagagttggccgaaagatagttctgtggtatatgcaaagtctcttgagcattctggatctttggatgatcctaatagaatcagtttggtgaaaagaaatgcagtgttgccttcaaagcctctgcaagacagagaagctatggatgataaaccaggtgtgagtggtcagcttccaaaaggaaaagctctagagctggctttgaagagaccacggccacctgttttgtctgtttgtagctcatcagagactccctatctattaaaagaaactaacaaaggaaatggtcaaggtgaagatagaaacttgttgtactattcaaagttaggcttagtgatcccatccagtggatctggttctggaaaccaaagcattgacaggagtggcccacttgttaagagtctcctcagacggtcattgtcgatggatagccaggttcctgtctattcaccttccatagatttgaaatcttcccagggatcatcttcggtgtccagtgatgcaccagggaatgtgttgtgtgctttatctcagaagtcatctttaaaagattgtagtgaaaaaacagccctagatgacaggcctcaagtgctacaaccgcatcgcctcaggtcctttagtgcttctcagtcaacagacagggagggagcttcccctgtgactgaggtgcgcataaagactgagcccagcagcccgctgtcggacccctcggacatcatccgcgtcactgtgggagatgcggcaacaacagcagctgcctcatcttcgtcggtcacaagagacctgtctctgaaaacagaagatgaccaaaaagacatgagcagactcccagcaaaaaggaggttccaagcggaccgaagattgccgtttaagaagttaaaggtgaatgagcacgggtctcctgtgtcagaagataattttgaggaaggctcaagccctactctccttgatgcagattttccagattctgatttgaataaagacgaatttggtgagttggaggggacgagaccaaacaaaaaatttaaatgcaaacattgccttaagatctttagatcaacagcaggtcttcaccgtcatgttaacatgtaccataacccagaaaagccctacgcttgtgacatctgtcacaagaggtttcacaccaacttcaaagtgtggacacactgtcagacccaacacggcatagtgaagaacccatcaccagcctctagttcacatgctgttttggatgaaaaattccaaagaaagctgattgacatagtgagagagagagaaattaagaaggccctgatcattaagttaaggcgcggcaagcctggttttcagggacagagtagctcccaagcacagcaagtcatcaagaggaacttgagatctcgagccaaaggagcttacatttgtacttactgcggaaaagcgtaccgctttctctctcaatttaagcagcatataaaaatgcatccaggagaaaaaccccttggagtaaataaagttgctaaaccaaaagagcatgctcctcttgcaagtccagtagaaaacaaggaggtttaccagtgccgcctctgtaatgctaagctctcttctctcctagagcaaggaagccacgagcggctgtgccggaacgcggccgtctgcccttactgcagcctcaggtttttctcgcccgagctgaagcaagaacacgagagcaagtgtgagtataagaagctgacctgcctcgagtgcatgcgcaccttcaagtcctctttcagcatctggcggcaccaggttgaagtccataatcagaacaacatggcacccaccgaaaacttttctttgcccgttttggaccacaatggtgatgtgactggttcttcaaggccccaatcccagcctgagcccaacaaagtaaaccacatcgtcaccacaaaagacgacaacgtgttcagtgattcttcagaacaagttaacttcgactcggaagattcctcttgtcttcccgaagaccttagtctttccaagcaactgaaaatccaagtcaaagaggagcctgtggaggaggctgaagaagaggcacccgaggccagcacagcccccaaagaagcgggtcctagcaaagaagccagcctgtggccctgcgagaagtgtgggaagatgttcacggtgcataagcagctggagcgtcaccaggagcttctgtgctctgtgaaaccatttatttgtcacgtgtgcaacaaagcttttcgcactaattttcgactctggagtcacttccaatcgcacatgtctcaggcttcagaggaatcggcacataaggaatctgaggtgtgccctgttcccacaaactctccctctccaccacctctgccaccgccaccaccactgcccaagatccagcctctggagcctgacagccccacaggcctgtccgaaaacccaactccagccacagaaaaactgtttgtgccccaagaatcagacacccttttttaccatgccccacccctttcagcaatcacatttaaaagacagtttatgtgtaaactttgccacaggacattcaagactgcatttagtctttggagtcacgaacaaacacacaattgaaagaccaacactttttacctatgggaggcagtccccagatttcaacctgaattgtgaaatgtgtcataagaaacaaaatattttttaaacaagaataataaaggttggagattgttacgcttgaaattaagttggaggcaaattgataattacttagtaatgtccttaactttagaaatacagcttttaaaatattgtggttctggaccttacaagaacaagatggtttgatttcattaatgttgaaattggattagtcttgattgtgtgcatggttcctcattccatggtgtcagtataatcatttaattgaggtttttggttttttattgattagtggaatactgtcgaagtattccttcttttaattattttagacacttgagttctagttaaatcttaaccatgttcttaagtccaaaataggaagaagtggagtagtttgcagtattgatttatatcttagactactttagcaataaaagataaatctcaactttaataagttatcctgacacttgataaaaataaatatttggtattttgtggtcatgtaaaacttctttttgtatgaaaattgtgagaaatttaaatcagcaatagtaacacttagatttttataaactaacaaaaacttgctctcagtcaatataataaatgatagttaaactctaaggaagacctgggaaatgaaaacaatttatggaagtcccctacagtcagtttataagggcttcagtagtgatagacattgttataaaaacttgtaccatgttacatgtacactgcaccacagtctaaattcagaccagcatttgaaggactgcacatatttcatttcctctgatttatgctgtcacaaattgaaaatctgagtgtagttaggacaaaaaacaaagctaaccatatggcactaattttgattttaacattagtgtaacaaataaggtcgggacatatatttacatagatcccagacactcaagaattagcacagctgatgtaaaattctaaattaccatttacttccagatagagcagaggagaaacacctcactgcagtttcaacatgctttccaagaacaatatatacgacatatacattttcctgcctctctcttgtgacaatttctgttagaatttgttgggggtctgatggttaaaatcatgggcaaggccattctctacatcattgcttaatatttcaaaaataggtattagagcactatcagtggtccaaaattagttttagctacttattttgctccatgggttttgggcttttcaaagaatactatgtataatttgtaattgaaagcctttcagtaggatatccaaagttcaatgtgtttcaaaagggaaaacttttacttgtgggggtgggagttagatgtattaaaaaaacgaaactacaaaatccttttaagaaagtaataccaatttagactctagtttgtgttacgaggtattctttcaaattttttttaaaagccaactactgtcattaagaaataattttagatttgtgctctagcagaaaataactctgtacccatcaatcttattgccaacattccataccagtggtaggaaagatattctcattttttttattgaaccagacatttttataaaatactgattgactttgtacattatggatattatatatgaaattttgccttgtattctttcacttgaaaaaactccaaaattccacaatattttagtagttaacttcctattctttcttaaatttgatggagaagggaaaataaattgcagttattgattcttgccatctttgttttcttaaagaaatctatgcattttaaggataaaactaaagcatatgggtttacatgaaacatcaggatggattattgtacattgaattcattccgcgtataatgtggtatttcttactctgtccatcttggtagctgtcacttcaaaagaagacagtttccctgagtaatcatcacctacatggccattagagtatctatcggtgataattccatgatacagagtatcttggcattataaattcagtatcccaggacctaaacctttatgctacattttcgaagattttttaaaaataatattgttaatcagtaaaaaaaaaaaatatttttgatctaaacataggttctgcatatctgttagattttaaaaatgactggtgttttgtcttcacatttttgtctaagcaaggaatataagatttcaaataaaattttgaaccaaaaacatttataatgccgttctggtttttctattactttttatactgtactttaaaagcattaggctgaaagagtttattttggtggtcaaaaaaaatatgcttccactcatgtaactattttaaatgttaagaagtaaaataatgaaagatatgttaattactttattcagtaaagttttttaagaatgtttatctcagccagtaggcaaatacttggtgtaaaacaagttggtcttaaattgttgcaactcattagctagtgaagatattcatgtaaatatattttaggattgtaattaattttgaaaatgtagaaagctctttattccatgtaagtatgcaggatgcctgcttttttatgcagttgtggaaagaatgtaaaatgttttaatatattctttgttaatctgagaacttgatactgaatcgtttatgtgggagaaggaaggagtaacataaaacatgtttttatcactcaaagtaagcaatggaggtaacaaatattgtgcattttaacagtaatatttgaagatttgtagaatattcacctttaaaactagttagtatgcatttataattttaccagaatatacaactaacaattcaacagtgatgttctttgcatttgtggggagatgtgtgatgttcttggttttctggtttggaatggaacgtttatagccttgcctgtaaaaatgtgccccagcacttaatgagtgaccgtttgaatccatatgtagtcccattggtgctaatgagagtagctgctgtgaaacaggaataaaatgtgtctgttcacggaggtgcggtgtggatgcacctacaaggccaactctctgatcagggtgagggagagatggaagaattaacagatctaaagttggcctttgttgtctcaaattgggtttgtacacacatgcatgcatgtgtgtatacaactgtaatctggaacttcaggaagtaaaattatttgaagtttcttagtaaaaagtaattaggtataattccaaatagatttctgtataaattgtatctaactggattacaagtcagtttgacaatttacgatgtctcagtgatgtttctgcaataattgtgaaatgcattattgatttaaataatgctgacacgtactctttaaaagtgttctttaacactgactactaaactttaagttttaaaaaataggttttcatttatggctttttgtggttttagcactttaagaagtttaattttttgtaatttttaatatgctctttcagtgtatctcagcgggtactccagcttgtggcattcccatgtgactggggagaagacaaaattggtgtttagattctggaggagaaaaaatgagttacaatgtcaggtgtttttaaaaattccttttagagacagtcttttgggaaccaaagtattttactgtaaatctttaaaataacagaattcagtgctctttcatttgttaatgctgtccagatttttcacacagttatactcagttaatactagttttcagaacattagtccaaggctatttcaagttttccattgaatatatgcttatggttaaaagaaaaacgaatggttttataattctgtgtattttgtcatatgccttagcagagtaagtcatttttccattttacttaggaataagctttttcgaactgaaaattcatggtaaaataggatttctatctaatgttaatccattgcttatttgtattcaattccattgtctacagtttgcttaaatgttgactaagaatgattggagtcaataaatttgtactgtattttgcttcga

SEQ ID NO: 1322 - DNA, 8051 bp, Homo Sapiens
  NM_001098414
ggggcgggtctggccacggggcgaccgagatggcggcctccgggggcctagagggaccctgggcgtgcactcgcccttccggctcggcctttagttagtgaccagctcctcggcgttctgcagagcgtgggtttcagcgagttctacgtgccagctcttgaggatcttgcttgtccaaacccagaagacagtgcatgaagccaggggacatccgccatgctccaaacaacttggcctcaggagtcagtgacctttgaggatgtggctgtttacttcacccagaatcaatgggccagcctcgaccctgcgcagagggccctgtacggggaggtgatgctggagaattatgcaaatgtggcttctctggtagcgtttccattccccaaacctgctctgatctcccacctggagagaggggaagcaccatggggcccagatccctgggacaccgagattctgagaggcatcagtcaaggtggtgagtcctggatcaaaaatgaagggctagttataaagcaggaagcctctgaagaaacagagttgcacagaatgccagtaggaggacttctcaggaacgtttctcagcactttgattttaaaaggaaggcactgaagcagactttcaatctaaatccaaatctgatacttcgaggtggaatgaagttctatgaatgtaaagaatgtgggaaaatcttccgatataactcaaagcttattcggcatcagatgagtcatactggggaaaagccctttaagtgtaaggagtgtggcaaagctttcaagtccagctatgattgtattgtacatgagaaaaaccacattggagaagggccctatgaatgtaaggagtgtggcaaaggtttgagttccaacacagccttgactcaacatcagaggatccacactggagagaaaccctatgaatgtaaagagtgtggaaaggctttccgtaggagtgcggcatacctgcagcatcagagattacacacgggagagaaactctataaatgtaaggaatgttggaaagctttcggttgtaggtcactttttattgtccatcagagaattcatactggggagaaaccttatcaatgtaaggagtgtggcaaagccttcacccagaaaatagcctccattcagcatcagagagttcacactggggagaagccttatgaatgtaaggtgtgtgggaaagccttcaaatggtatggaagttttgttcagcatcagaaattgcaccctgtggagaagaagccagtcaaggtccttgggccatccctggtcagtccccagtgctcctctccagccatacctcctgttcttctccagggatcctgttctgcttcagccgtagctgtgccttcactgacctttccacatgctgtgctcattcctacctctgggaattttttcatgctgctgcctacatctggaataccttcttcatctgcccaaatagtgcgtgtcttccagggtcttactcccactgtgaaaccttccccagttattctcaccccttcttctcactcctcatgagctttatcttggcagtcttacggctcttatgcctagcaaatctccagcctaattttatatatttttttgagaaagggtcttgctctgtcacccaggctagagtgcggtggtgtgatcttggctcactgcaacctccccctcctgggttcaagcgattctcctccttcagactctcgaatagctgggattacaggcacgcctcaccacgcccagctaatttctgtatttttagaagagatggggtttcgccatcttggccaggctggtctcaaacacctgacctcaagtgatccgcctgccttggccccccaaagtgctgggattacaggagtgagccactgtgcccagcctccaacctaatttgagtttcatttgtatttttttcatcaccttacatgtgttaacagctgtttcaacataaactccattataatctatatacatttaaagaccgtgtttacataatctcttctgggtagaaaatggaaatacttaacctttgcattggtccctttcaggcttgaacaacagtggctgtatctgcatcgtggggttgctggtggtagaacactttggtgttaggaaagtttggaaaagaggatatccctgtattaggccattatgattagagataagcagcctgggagaaacatacaagacctgtggctactggtagagaattggaataagcttccaacaatggactgtagagattaatggagattgtttagtgggcccatggctaggtggggtattaatacagttgaagttatgttgcccttggcacagatctttgagaatctcatacatctgtgaaaaagataatgtgaaataaacagtaaaaaaaaaaagtatgttgatggcagtgagagtaatcatgtctttaaacgtgaagtttttttttctttagttttgctcttgatagctagatgtttcttttaacttttatttcgtaagtaaatatacacaaaggcattcatctttgttgaatctgttgtgcagatttttcttgatgagcattctgtttttttttctttgtgagcactggcttctatattttatttcatatttatgaattataaatatgaatttaattactaaagaaataaaaataatggtgtaaagccaactcgaggggaatctgaataagcttccaaaatttttttttttaagaaataaagggagctgtgtagtgggtcagtggctaggtaggttagtgaagtggaatttggggttgctcttggaagtggccttgatgaggatcctttacaactattcagaggactgtgtgaagtagttactggaaaaagaacttgaattatgcatttattggcattaatgtaaacagtaagtcctaagctttgatggaagggtccatacattttttttttttttttgctgatgttgctatctagatgtttctctatagcaattaatagcaaaacctttacattcttggtttttaaactttaccatgtgtctgaattacatagtgtgcttgtaaaaagaagagttttctctcttgcacaaattctgattttggctatctgtggtgatggccagatctttagcatggaccatactttgagagatatgcttcaaacagaaaatgcccacccctcctcctttacccagcataaactctatggttaattcttaaaataatgccttacagtctccattaactcccttgcccttctcttgctttgtcatgctcgcttggcaaaacctcatctctgactaaatgcagttctttgccttctctgttcctgcaccaaaaatgatcaggagaaagcatattaccaggctgaactgtcactttaaattcatgaccagtaacttcatggaggcccttaacgtttcctgatggtcatactacaatttttggagtccacttaactcccctgctttcctaggccactactttatactttctctcttctgtaacttccaaagcatccctctcagttctcatgctcagctgatggttatgtttctgccttcggcgagagaacagcaagctccagaaagtggctgcgccttcagccccgtgctagaatgagaacatatggagccaacttgagttcggaagggctgtggccacctcgtttcgcccatctacttttcaccttgccgtatctgattcttcaccaccgtattctcagtcacttccactaaacagtgccagtgttttaaggttctgtcacactcagtaacccacttctggttcctcattccgtgtcagtgatcagcagtagactgaagaatctaccttagatttgctccatactattaattagcttacaaaatgtctaagaggagctaagctgggatgccacataggcagaagccaggaaaaatgaccaaccacagaaccaagtggttccagtggaaactcagcagctgctggtgcctgctactggactgccaccccccattgaagagactggaccaccaggaaggtcgtttcacattctgtagtaaaaatacccctacaatcattttggtagggtcttctgtcttcagccagggtgtacctgctcggtgggagttggttatatatgtatgtccaagttgcaggggcttctgggaaatacaggttttggattctgcctgggaagagagtcatagtatgaagaagtctgaaaatggggaagggattttcagaatatgttgagcagctgtaaaatatcagatacccattataggcattgaaggttacctaaatgacagaaggatgcactatattcatgggtaggaaagattagtttcatcaagatttcaatttttatcaattcataaattaaaaacaatataaaaattccagaggggtgtgtgtatagagaggcaaaggacacagagtagctaacctagttttgaagaacaagatggggggttttatgctaccagatattatatacaatgatcatcaaacacagaacaaagcaaaaaacaaactccccaaacccaagttgaaacaaaaaaaacccccagactgtaatagtattattattattttttaagatggaatcttgctctgttgctcaggctggagtgcagtggtgcaatcttggctcactgcaacctacacctcccgggttcaagtgattctcttgcctcagcctcctgagtagtgtgtgccaccacgcccagctaattttttaatttttagtagagacagggtttcaccatgttggccaggctggtcttgaactcctggcagcctcaagtgatccacccacctcggtctcccaaagtgttgggattacaggcgtgagccactgcacctggcctgtaacatgatttgctgaaatttttaaaaatcttaaataatgtactgtttagaaatatacatattttatacaaaattataaagaaagcatagagaggtaagcattagtggcacagctgagaaaatataaaaggtagttctgtctctatcctgtctcctttattctgctactgctctcattctgtctcatcccaggaatccagtcccaagtgctgcctgccaatcgtccagcaccctccacctttgccacctatttcttgttgtaaaacagatgtttgtttctaaaatataatgaattaatgattatcaaagtacaggcatacctcattttattgcagtttgttttattgtgtcttgcggatattgcattttttacaaactgaaggtttgtggcaggcctgtgttgagcaagactatcagtgccattttttttcaacagcatgtgctcatttcatttttctgtgtcttacacagaaacttaaaatatttcaaacttttcattatatgtgttttggtgattagtgacttttatgtttctattgtaattgttttggggtgccacagactgcatccatctaagacagtgagcttagttgatgtgtgtgtgtgtgttctgattactccactaactgatggttccccatctctctccctctcctcagacctcactattctctcagacacaacagtattgaaattagaccaattgataaccttacaaacacctttaagtgtttaagtgaaaaagtcacatgcctctcactttaaatcaaaagctagaaatgattaagcttagtgaggaaggctaatgtcaacagctgagataggccaaaagctagactgcttctgccaaacagtcaagttgtgaatgcaaaagaaaagttcttgaaggaaatgaaaagtacttctccagggaacacatgaacgataataaagtggccaggtgcagtggctgacacctagaatcccagcacttcggggagccaaagcgggaggatcccctgaagccaggagtccgagaccagcttgggccacaaagtgagacccctgtctctacaaaaaattaaaaatttagctgggtgtggttgtgcatgcctgtagtccgatctacttgggaggctgaagtgagaggatccctttagccagggagttcgagactgcagtgagctatgattgtgccactgcactctagcctgtgtgacagaatgaaaccaaaaaaagtgaaacagcattattactgatatggagaaagttttaggggtctggatcaaaccaaccacaaattcccttaagccaaaacctaatccagagcaaggccataactgccattgtatgaaggctgagagaagtgaggaagctgcaggaaagtttgaagctagcagaggttggttcatgaggtttaagaagtcatcttatcataaaagtgcaaggtgaagcagcaagtgctggtgtagaagctgtagcaatttatccagatctagctaagttaattgatgaagttgctacaccacgagattttcagtgtattccaaacagccttcttttggaagaagaaaccatctaggactttcatggagaagagaagttaatccctggcttaaaagcatcaaaggacagctcgtctctcttgttaggggttcatgcagctggtaactttaagttgaagccaatgctcatttaccattcagaaaatcctagggcccataagaattatgctaaatccactctgcctgtgctctagaaatggaagatcaaagcctggatgacagcacatctgtttacagcatggattactgaatattttaagcccactgttgagacctactaaatattaggaaaaaagaattctgtcaggtgtggtggctcacacttgtaatcccaacactttgggaggccaaggcaggtggatcagttgaggtcaggagtttgagaccagcctgaccaacatggagaaaccctatctctactaaaaatacaaaaattagctggatgtggtggtgtgtgcctgtaatcccagctacttgggaggctgaggcaggagaattgcttgaatccagaggcagaggttgcagtgagctgaggttgcaccactgtgcttcagcctgggtaacagagtgagactgtctcaaaaaaaaaaaaaatttagttccaaatattactgctcgttgataatgtgtctggtcacccaagagttctgatggagatgtacaaagagattaatgtttttatgtctgctaaacaacatccattctgcaggatccattactccatgggtcaaggagtaattttgactttcaagtattatttaaggaatacattttgtaaggctgtggctgccatagtggttgttctgtacaaagtaacttgaaaaccttctggaaaggattcatcattctagatgccattaaggacatttgtgattcatgggagaaggtcaaaatatcaacattaacaggagttcagaagacattgacctcaaccctgatggatgatcttgaggggttcaagacttcagtggacgaagtaactgcagatgtggtggaaatagcaagataactagacttagaagtggaacctgcatatgtgactgaattgctgcaatctcatgataaaacgtgaacaaatgaggagttgcttctaatataagagccacaaaagtggtttcttgagatggaaactactcctggtgaagatcctgtgaccattgttgaaatgacaacaaaggacttagaatattacataaacttagttgataaaacagcagcagagtttgagaggattgacttcaattttgaagaatgttccactgtgggtaaaaggctatccaacagcaacacatgctacagataaatctttcggaaaggaagagtcagttgatgttgcagccttccttgttgtctcatttaaagaaatctctagagccacactaaccttcagcaaccaccacaccgatcattcagcagccatcaacagtgaggcaagactgtcttccagcaacaaagactcactgaagacttagattatcgttaacatcttttagcaataaaatatttttaaattaaagtatgtacattgtcagatataatgctattgcaaacttaatagactataatatagattaaacataacttttataggtactggaaaataaaaataattgtgtgactcccaaaaaaaaaaaaaaaaaaaaaaaaaaaaaaaaaaaaaaaaaaaaaaaaaaaaa

SEQ ID NO: 1323 - DNA, 6482 bp, Homo Sapiens
  NM_001098477
gcggccgccgtcccgacgcgcagctacagccaggtacgtgggcgccgtgagggacctggcgcgagatccctcccgggccgcgtgcacgcgcccccgcgcccctccgtccctccgtgtgcgcctcgcgggcacgcccggggatccgcgacactcgccgcacacccgcccccgtccaccctgtgctcctattgggccctggaacaagggaagctctcccaggcgtcgggtcttctgcttgttttgttctcgcctcgagtctctggtcggttgggcagtgagtccaaaactacttacctggaagaccttccaccaccccctgagtatgaattggccccgtccaagttagaagaggaagtggatgatgtctttctcattcgagctcaaggactgccctggtcatgcactatggaagatgtgcttaactttttttcagactgcagaatccgcaacggtgagaatggaatacattttctcctaaacagagatgggaaacgaaggggtgatgccttaattgaaatggagtcagagcaggatgtgcagaaagccttagagaagcaccgcatgtacatgggccagcggtatgtggaagtatatgagataaacaatgaagatgtggatgccttaatgaagagcttgcaggtcaaatcttcgcctgtggtaaatgatggtgtggttcgtttgagaggacttccttatagttgcaatgagaaagacattgtagacttctttgcaggactgaatatagttgacattacttttgtgatggactatagagggaggcgaaaaacaggggaagcctatgtgcaatttgaagaaccagaaatggccaaccaagccctgttgaaacacagggaagaaattggtaatcgatacatcgagatatttccaagcagaaggaatgaagttcgaacacatgtcggttcttataagggaaagaaaatcgcatcttttcctactgctaagtatataactgagccagaaatggtctttgaagaacatgaagtaaatgaggatattcaacccatgacagcttttgaaagtgagaaggaaatagaattgcctaaggaggtgccagaaaagcttccagaggctgctgattttggaactacgtcttctctgcattttgtccacatgagaggattacctttccaagccaatgcccaagacattataaacttttttgctccactcaagcctgttagaatcaccatggaatacagctccagtgggaaggccactggagaagctgatgtgcactttgagacccatgaggatgctgttgcagcgatgctcaaggatcggtcccacgttcatcataggtatattgaactgttcctgaattcatgtccaaaaggaaaataagactctaggggctccagataataagggtgaagcaagaagcatttcatttgcacatctttcttggacttgggatatacagttccagtttattagcagcaactgctagggaaatgattttggtgttttgggttaattgcttctaagaaaagtttcatagtggactgtttagaagaagaaatgaaagatccagtttgggattatgaaataaaccacaaattaaaatttttgtttaaactgtccaggatctgatttaaaaatatggtctttgttttatatgattaaatggtttgttttcatagatgatatgttactcattgtaaagaccacatatttttattcagcagtgttctttaaacggtttcatttaaaaagtaactttttttttttgcctgtgaattgagtgctctgatgtaaaacttctcatggagtgaaacagtgatttattttaaccaaacattcaccaaagcaaagaacggtttcagacctttgaactggtatggtttggcagaatagttttaaattttgctgtatttgattacttagagataggaatttttaaaaatcaaaacaaaaaataccacagcttagtgtaaatgacaatttggcggttttatgtctttagaaatgttttgcctttctaagccttgtgctaaaggcgtataacggtggtgcctatctacttaagggggcattctagtcttaacttaaaagttgtctaaactgtccctccctggctttttttggtttggggtagacctaagggtgtttgttagtctcaaaactgtgaagtgacatgtcagaacagtccagactggtaagaaaattaatggcttcacttgaatttaaaccagctctagataggaaaaaaatcagtctcctcatttgctttttaaatggagtagtacatcccatattttagaacaagtaggggtgccttgcttaaataaaaatagcatttaatgtataattgtgtgaagggtttatggataaagctgtacttctgtcacaatgtggcagtactttctgctttaatattaaacagcttgttatttaaatattggacaaaatggctggcttcaaaatatagtcattaataaactaactttatgtgcacctgtgtaggagaatcaaaatcctgtatgctttctttgccttgttcctgttctcagggtgacgactgccaccaggagatgcagttctagttcttaaaattaaatttgcccaggtttctgacaggtgatacctggaagagagactatgtcttctcttacttaatacataaccatctttgattaccagctaagatgcgaaatcactgtactgtagtcaataaatgaagacttgtttcaggctgaagattacctaagagtatttattattggagtctgtgagtcaactgaatatattattacctcaagtcctgctatattaatataagtagtaagggttaattttcgtgtgtgtgttctctaaaatcctgtgaacatgacttaaccagcttaacatcatcagtagtactgcctagatggaaatgcgttttcatatatggttgaatatgccaagctatgagaactggtatctgtagttgtacgaactattagaatgtgatctttgttgctctttcacatttggtatctgatttgctgtggaaaagatctgtggggcctactgtgaggaattcatctgcaattgatttaagctaatgagttttatttgcacatctctggaaaaagaatgcaagcaaagcattaaaatgctatatgatggatgggtaaggttgaaaggatatatcttcttggcacgctacaggctgagttttctgtacaaaatgtggccattattgggaaatcattttatgtatttgaatgctcccttttgtttttgttcatgatctaggctagtacgtaagtgattgctaaggtggatgtagttatgggaaaggaagagaagcacataatacagtaaaagtaatcttatttccatgcaagtggaagacggtaccgtctccccacatttgagaagactgttttgcatcactctttgctattgaaggaagcagtgatggtgaatttccttctgtttgggttccttgtgtctataacttcctttgtggtaaagccatcaggaagaatagtgggagtggggcatatggtcagggtgctcatatcctgctttagcctagctgctgcttacggagtgcaagggagaactctgagaagcagtatgtaaataccagggagctgattgctgaatattgtggtctcatctgaatattgtggtctcatctaaatattgacaccaggcaatgaagcagaaatagagtatgtgtccctttatgcgtgggtaacttaagcttctgtcatgtgggaagggggaccgaatcttccctgggaggaaggctccaaattctcactacttctgtgttacttgaagggggaagcataaggaacccagtttgaaggcaacattgtgtgccatgaatctgcttattaatcaacatgccttgttaatgtcctctgccctgaacagcccttactcagttctcatttggaaagttattttttggggttacatcctgtttgtttcagaatttaaaaccctccatggtgggtcacttgaggtcaggagttcaagattagcctggccaacttagtgaaactccggctctactgaaaatgcaaaaattagccaggtgtggcacacgcctgtaatcccagttacttgggaggccaaggcaggagaatcgcttgaacctgggaggcagaggttgtagcgagccaagatcacaccattgcactccagcctgggcaacagagtgagactctgtcaaaatcaaaaaaaccaaaatacaaaaaactccattgttctgagagtttcccctaaattatcggaagacactcacattgaattggtaggacctatagtatagaggagaatggtatgtatgtcagcagtagagttccaatccaaattgcgctatcgcattagaaatacattaccctcccactccccaagttcagcaaattagaagagaatctgaagtttgtaggaagggaataaagctgctataaacatttatgtgcaggtttttgtgtagactcgttttcagctcctttgggtaaataccaaggaaccaggttgctggattgtaagttaagagtatgtttagttttggaagaaactgccaaactgttccaacatgactattttgaattcccattgacaatgaataagagttcctgtagctcctcaccctcattagtatttggtgatgtcactcttgcattttagctaatgggtgaatagtggtctcatcgttttaattcccaatcccatagtgatgtggagcaccttttcatatacttaatctgccatccttatatcatcattggtgaggtgtctggattttctgtccagaattttagttctagtggttttcttatttttagaaaggaagtataggaaggaaggtttaatctgtcttaagcctgattatatgaaaatcaagaataggctaggtgtggtggctgacatctgtaatccccgcactttgtgaggctgaagtgggaggactgcttgagcctgggaagtcaagcctgcagtgagccatgactgttgctgcactccagcctgagtgacagagtgagaccctgtctcagaaaaaaaaaaagcaggctcattttaaagttgtttatattttattttttgaaggaaataaacttgaagagatacaaacggtagtgaagattctccttcccctcctgtaattcagctgtttagtttctattctcgcacagccctgttatcagtttctagtgtaagcttgcagtgacttttactttatttataagcaagtgttagtgggtgttgtcatttcttttaaaaatataaattatactgtacatgctattttgtattttggcttttctcccacctaaacaccctaaagatcattttctgtcagtatataaaatcttggtgatgccaatacccatcccttagattgtacaagcagcattttgccatgctttatcccatagcctgcctcctgcagtctcatctttttttctatatgcatgtccaagtaagttgtagacatttttcacttttaatcctttcagcatacatgtcatgggaatttgtttttgtttttgttttttgtgtttgagacagtcgctctgtcacccaggctggagttatagtgacgtgatcccagctcattacagcctccacctcccagtttcaagcaattctcatgcctcagattcccgagtagctgggattacagatgtgcaccaccacgcctgactaatttttgtatttttagtagagatggggtttcatcatgttggccaggctggtctggaactcctggcctccagtcatttgcctgcctcggcctcccaaagtgctgggattacaggcatcagccaccacacccagccgtcattggagtttttttgagggagatttgcagtaaggtgaataaatgttaagtgtatcatttgatgaggttttttctttttttttttttttttttgagatggagtcttgtatcgcccaggctagagtgcagtggcctggtcttggctcactgcaacctccacctcctgggttcaagggagtctcctgcctcagcctcccgagtagctgggattacaggtgtgagccaccatacccagactcatttgatgagttttgatgtaaaagcatgtaactcaaacccctatgtctggaacatctgtattacatctgaattttttcacctagtcaattcctgcacctctctctcctgtcccttcttccctcccctggcagtcagctactgttaggattttgttcactgtagattaattttgcctattctagaacttcatataacggactcacttatgcagtatgtattctgtaagttccttttactcagcatgtttgtatgttcatcagtgtgtttaagctttgttcctttttatggctgagcagtgttctatgtatgaatgccacattttaacgtttcacctgttaggtgaacaactaactggtgaacaatgggctgtttctagtttggggctatcatgaataaagttggtatgaacatgtacaacaaaaaaaaaaaaaaa

SEQ ID NO: 1324 - DNA, 2246 bp, Homo Sapiens
  NM_001098495
gtgcgacacgcaatgggcgggacttccggcgtctcgtttggtattcactttcgcgactcaggtgaactaacctgcgagaagctggttgtgcgctgaggcgaccagcgccggaaggcacggtggcgactcacgctgttctcgccgctcagaggcgggtctgaggctcggtggcggcgcccagggtggcccgggccctttcctcggtcattgtctcccctccagctctactcacaggctccgatggcggcggccgccctgagggaccccgctcagcagggctatgtgacctttgaggatgtggctgtctacttctcccaggaggaatggagattgcttgatgacgctcagaggctcctctaccgcaatgtgatgctggagaactttacacttctggcctctctgggttgttggcatggagccgaggctgaggaggctcctgagcagattgcttctgtaggactgctcagttcaaacattcagcaacaccagaagcagcactgtggagagaaacccttaaaaagacaagagggcagggtcccagttttgaggagttgcaaagttcacctatcagagaagtccttgcaaagcagggaggttgggaaggccctcctgatcagctcaggtgttctcaagcaccaggtgactcacacaggagagaagtcacataggagctccaaaagtagggaggcctttcatgctggaaaaaggcattacaaatgcagtgaatgtgggaaagcctttggtcagaaatatttacttgttcagcaccagagactacatgctgggaaaaagacgtatgaatgcagtgaatgtgggaagttatttagagatatgtccaacctttttatacaccaaatagttcacactggagaaaggccttacgggtgtagtaactgtggaaaatcctttagccgtaatgctcacctcattgaacaccagagagttcacactggagaaaagccttttacatgcagtgaatgtggaaaagctttcaggcataattccacacttgttcagcatcacaaaatccacactggagtaaggccttatgagtgcagtgaatgtggaaaattgtttagtttcaactccagcctcatgaaacatcagagaattcacactggagaaagaccttataagtgcagtgaatgtggaaaattctatagccacaagtccaaccttatcaaacattggcgtgttcatactggagaaaggccttacaagtgcagcgactgtgggaaattttttacccaatgctcaagcctcatgcaacatcaaaaagttcacactggagaaaagccttttaagtgcaatgaatgtgggagattctttagagagaattccaccctagttagacatcagagggttcacactggagcaaagccttatgagtgcagggaatgtgggaaattttttagccaaagctcaaccctcatgcaacatcgaaaagttcacattggagaaaagccttttaagtgcaatgaatgtgggagattgtttagagagaattccagccttgttaaacatcagagggttcacactggagcaaagccttatgagtgcagggaatgtgggaagttttttcgccacaactccagtctttttaaacatcgaaggattcacactggagaaatgcagtgattgtgtgaaatcctttagccagcgtttcaacctcattcaacaccagaaagttcacagtggaaaaaatcttgaaggtaacagatggaaatccgttagccacacctccagtctcattcaacactggacagtttacaatgtggacaatgtagtgaatatggaaaaaggtttcagccaaaggcctaaccctattcaacaccagaaagtttacactggagaaaggccttagggtgacaggttatgtactgtctctgaatcaatatgacctcacttaaaacagaaactctgaggatggcctttatgagggagctggcaattgaacatcattcatctaaatatgcacactggaggcaagatgagaattcctgacagattgtccttcctgagaagacagccctctgccttggagctccagagagagggagccctgtattcttggctgtacccgtcgaatggagttttgatctcgctgagtttggagttgggggaggaaaggagtggtcttggttcaaatgtgactcacttttgctgttcttgtgaatgttagatcttctttaataaatatttatttcccatacacccttatgaccattaaaaaaaaaaaaaaaaaa

SEQ ID NO: 1325 - DNA, 1378 bp, Homo Sapiens
  NM_001098506
ggacagcagagacaacagtcacagtaaccctgtctagagcgttcctggagcccaagctcctctccacagaggaggacagagcaggcagcagagaccatggggcccccctcagcttgtccccacagagaatgcatcccctggcaggggctcttgctcacagcctcacttttaactttctggaacgcacccaccactgcctggctctttattgcatcagcgccctttgaagttgctgaaggggagaatgttcatctctctgtggtttatctgcccgagaatctttacagctatggctggtacaaagggaaaacggtggagcccaaccagctaatcgcagcatatgtaatagacactcacgttaggactccagggcctgcatacagcggtcgagagacaatatcacccagtggagatctgcatttccagaacgtcaccctagaggacacgggatactacaacctacaagtcacatacagaaattctcagattgaacaggcatctcaccatctccgtgtatacgagtcagtggctcagccctccatccaagccagcagcaccacagtcacagagaagggctccgtggtcctgacctgccacacaaataacactggaacctctttccagtggattttcaacaaccagcgtctgcaggtcacgaagaggatgaagctgtcctggtttaaccatgtgctcaccatagaccccatcaggcaggaggacgctggggagtatcagtgtgaggtctccaacccagtcagctccaacaggagcgaccccctcaagctgactgtaaaatcagatgacaacactctaggcatcctgatcggggtcctggttgggagtcttctggtggctgcacttgtgtgtttcctgctcctccgaaaaactggcagggccagcgatcagagtgacttcagggagcagcagcccccagcctccacccccggccatggaccctctgacagctccatctcctaggaattgctacactctgacacaaacatttactgctggatcgaccacaaagcagatgtggcttcttaggttcctctgggagctgctcctgtgggttgatggagcgtccctgaagcccccagccctggggatggggaaggacatggagcctgagccagagaaccagctctgagtcctgaggagacacaggcctggggacaggaagggatgggggtccctgctgaatatatagagacctcaacagactgccccgggctctgggtgggccaaggcgaaggcttcccatcaccacaggaagcgggggcttgcagggaaagtgaatgggcctatggcccacccggggtcacctggaaaggatctgaataaaggggaaacttcctctcaaaaaaaaaaaaaaaaaaaa

SEQ ID NO: 1326 - DNA, 911 bp, Homo Sapiens
  NM_001098538
tgggagtcggccatcatgctggccccggaggccgttagcttagtcatggctctaaatatgtacctgcaatcggatgttgaggatcaccgagcccgcgacgtagaagtacgggaagttcatgcgcagctgccaggccagctcgaagaaggcgagcagggtgcgggagagccccttgcagaagacgccgtacgaggttctccagcatttggctcaaggccccaagggcacatgtgacaagaaggcgccagctttttaaacattggaagttcttctgtgtcagttctgtgacagaacatttacttaacacatcatgaaggctagtttggatgtggaggggaatagactccatctatccatatgagctgctgcagaagaatattttgcctgctggaacctgctgtatctactcaagagtggaagttttcacagatgtgaactatgaagactttactttcaccataccagatgtagaggactcaagtcagagaccagatcagggaccccagagacctcctcctgaaggactcctacctagaccccctggtgatagtggtaaccaagatgatggtcctcagcagagaccaccaaaaccaggaggccatcaccgccatcctcccccacctccttttcaaaatcagcaacgaccaccccgacgaggacaccgtcaactctctctaccccgatttccttctgtcagcctgcaggaagcatcatcattcttccagagggacagaccagcaagacatccccaggagcaaccactctggtaatctagaattcagtggcagaaaataaataagaagataacttccttcagaaagccatgacattgaaataatgtggtcataactctttcttcagtataccaataaaatattaatagcatgcaaaaaaaaaaaaaaaaaaaaaaa

SEQ ID NO: 1327 - DNA, 946 bp, Homo Sapiens
  NM_001098622
gctccagagaggggaaggaaggggcagcagagaggggtcagaaggagggagcttaagccaggcagggttacttgtctctgtgactccttccgcctggcacatgctgcccagctatggggacctttgacctgtggacagattacctgggtttggcacacctggttagggctctgagtgggaaagagggtcctgaaaccaggctgagcccccagccagagccagagccaatgctggagccggtgtcagccctggagccgatgccagcgccggagtcggtgccagtgccgggacccaaggatcagaagcgcagcctggagtcctcgccagctcccgaacgcctgtgctctttctgcaaacacaacggcgagtcccgggccatctaccagtcccacgtgctgaaggacgaggctggcagggtgctgtgtcccatcctgcgggactacgtgtgtccccagtgcggcgccacacgtgagcgcgcccacacccgacgcttctgcccacttactggccagggctacacctccgtctacagccacaccacccgaaactcggcaggcaagaagctggtccggcctgacaaggcgaagacacaggacacaggccaccgccgaggaggaggaggaggagcaggtttcagaggtgccgggaagtctgagccttcgccctcctgctctccctccatgtccacctaggaggctgcctacacctgggcaagggcacccgggctcggctggatttccaggaagacccaccctatgacgactgcccccactcccagaccctccccccagcctgggattgagccctggggatgacccggggttggcaagggaagagctgaaatcgccctgtccttggggaccccaccctttgtgccatctgccgtttccctagtgctgggcatccagtcagccctcaataaatgcttatgaatggatcaacaaca

SEQ ID NO: 1328 - DNA, 1405 bp, Homo Sapiens
  NM_001098725
gtcctcccgccccgccgcttggtggcggccgcatgctgcccggatataaagggtcggccccacatcccagggaccagcgagcggccttgagaggctctggctcttgcttcttaggcggcccgaggacgccatggccgagtgcccgacactcggggaggcagtcaccgaccacccggaccgcctgtgggcctgggagaagttcgtgtatttggacgagaagcagcacgcctggctgcccttaaccatcgagataaaggataggttacagttacgggtgctcttgcgtcgggaagacgtcgtcctggggaggcctatgacccccacccagataggcccaagcctgctgcctatcatgtggcagctctaccctgatggacgataccgatcctcagactccagtttctggcgcttagtgtaccacatcaagattgacggcgtggaggacatgcttctcgagctgctgccagatgactgatgtcttggcagcacctgtctcctttcaccccagggcctgagcctggccagcctacaatggggatgttgtgtttctgttcaccttcgtttactatgcctgtgtcttctccaccacgctggggtctgggaggaatggacagacagaggatgagctctacccagggcctgcaggacctgcctgtagcccactctgctcgccttagcactaccactcctgccaaggaggattccatttggcagagcttcttccaggtgcccagctatacctgtgcctcggcttttctcagctggatgatggtcttcagcctctttctgtcccttctgtccctcacagcactagtatttcatgttgcacacccactcagctccgtgaacttgtgagaacacagccgattcacctgagcaggacctctgaaaccctggaccagtggtctcacatggtgctacgcctgcatgtaaacacgcctgcaaacgctgcctgccggtaaacacgcctgcaaacgctgcctgcccgtaaacacgcctgcaaacgctgcctgcccacacaggttcacgtgcagctcaaggaaaggcctgaaaggagcccttatctgtgctcaggactcagaagcctctgggtcagtggtccacatcccgggacgcagcaggaggccaggccggcgagccctgtggatgagccctcagaacccttggcttgcccacgtggaaaagggatagaggttgggtttccccccttttatagatggtcacgcacctgggtgttacaaagttgtatgtggcatgaatactttttgtaatgattgattaaatgcaagatagtttatctaacttcgtgcggaatcagcttctatccttgacttagattctggtggagagaagtgagaataggcagcccccaaataaaaaatattcatggaaaaaaaaaaaaaaa

SEQ ID NO: 1329 - DNA, 3465 bp, Homo Sapiens
  NM_001098794
agtcgtgcgacgccgggcggttgcgtgtggtgcgcgggggcgcgggctgcgtgtggcgcggggcggggcgcggctggtgcgcttgagaagcgatggcggcggcctgaactcacctaacaccgcagcagcaaccgggcccggccaggttcggcgttccgtgagtgaacgatttagaaatctggactggccagtgacctctgggcttgccattccagcctggtataacctctggctccatgggcagctactggctcctacagaccggatgaagcagactggagacacaagtggagaaaacctccagctggcaaatcctcagagtgtaggcctctggctgccagtcctgcccagcctgcctcatggagaggatgaattggctgagcagactggcctcccggggccctgggcaccgtatacctcaaggggccaatctccaaaccccagtcatggctgatcccgagacctgcctcatggtcttcaagaatcactggtcccaggtggtgcgaatcctggagcggcaaggccctcgggcagctcctgggggtgcagacgatctcagtgctgtgcgcaaccacacttaccagatgttgacactgctggcagaggaccgtgcagttccctcggcccccacaggccctgggcccctgctggagtttgctctgcacgaggatctgctgacccgtgtgttgacatggcagctgcaatgggatgagcttggggatggggtcgaggaacggcgggctgagcaactgaaactatttgaaatgctagtgagcgaagctcgccagccactgttgcggcatggtccagttcgtgaggctctgctcaccctgctggatgcctgtggccgccctgtgcccagtagcccagcactggatgaaggcttggtgctacttctcagccagctgtgtgtttgtgtggcccaggagccttcattgctcgagttcttcctgcagccacctcctgagcctggagccgctccccgtcttcttctcttttctcgccttgtcccttttgtgcatcgagagggcaccctgggccagcaggcccgtgatgccctacttcttctcatggctttgtcagctgggagccccactgtgggccgctacatcgcggatcactcttacttctgcccggtgctggccacagggctcagtgccctgtactcatcactgcctcgaaagattgaggttccaggggatgattggcactgtctgcgacgggaagactggctgggagtgccagcccttgcactcttcatgagttccctggagttctgcaatgcagtaattcaggtggctcaccccctggtgcagaagcagttggttgattatatccataatgggttcctggtgcctgtcatgggtcctgccttgcacaagacctctgtggaggagatgatcgccagtaccgcctatctggaacttttcctacggagtatctcagagcctgctttgctccgtaccttcctgcgattcctgttgttgcaccggcatgacacccacaccatcctcgacaccctcgttgctcgtattggcagtaactcccggctctgcatggtctctctgagtctcttcaggaccctcctgaacctcagctgtgaggatgtcctgctgcagctggttctcaggtatcttgttccatgtaaccacgttatgctgagccagaagccggctgttcgtgatgtggacctatatggacgagcagctgacaagtttctctccctaatcccacgctgttgtcggcaccacgcccccagcccacctcgtccagagcatgcctcatgggcacgaggtcctggaagcccaagtgtggactcctcttctgtgacgacagtaccccggccctccacaccatctcgtctggctctcttcctgcggcagcagagcctgggtggctctgagtctccaggcccagccccttgctcaccagggctttctgcatcccccgcctccagccctggccgacggcctacccctgcagaggagcctggagagctggaagacaattacctggagtatctgcgtgaggcacgtcgtggtgtggaccgctgtgtccgagcctgccgtacctggtctgccccctatgatggcgagcggccctctcctgagcccagtccttttggctcccggactaagaaacgcagcctactgcctgaggaggacaggaacaacgtgggggaaggggaggaggaagagctggggaggagggggcgggctgggggtgcaggggagggccctggtcacctgccccctccccagctcaatggagtgccaggatcatggcctgagggggccaagaaggttcgtctggtgccaaaggagggagctggggaactgctagagggcatctccgagggcatggcaggactagagggctttgggcaggagctccgggagctagaggtggcattgagcaatgggggaactggctcagagtcccccttagaacctccactgccccttgaggaggaggaggcctacgagagcttcacctgtccccctgagccccctggccccttcctcagcagccctttgcggactctcaaccagctgccaagccagcccttcactggccccttcatggctgtgctctttgccaaactcgagaacatgctgcagaactccgtctatgtcaacttcctgctgacggggctggtggcccagctggcctgtcacccccagcccctgctccgctctttcctgctcaacaccaacatggtcttccagcccagtgtcaagtccctgctgcaggtgctgggctctgtgaagaataagattgagaactttgcggcttcccaggaggacttcccagcactgctgtccaaagccaagaagtacctcattgcccgtggcaagttggactgggctgagggccctgcagcaggacctgccccacgccgttctgatcccctagtgaagagccggaggccatccttgggggagttactcctgcggcatgcacacagtccaaccagggcccggcaggcggcacaattggtccttcagcctgggcgagacggagcaggacttggcctaagtgggggctcccctggggcttcaactccagttctactcacccggggcggggcccctgaacgccaaggtgaggctcttcgagtcaagaatgctgtctactgtgcagtcattttccctgaatttctcaaggagttggctgccatctcccaggctcatgccgtcacctcgcctttcttgttggagacttcagaggaaggatctggccctctcatctcaggctgtgggcccctcaatccttaactttcttccatggacaatcagggccatgggtggcccgggctggggctagggcacaggctcctttttatgtttggaggcagtggcaaaaggactttttaatttatttcagatgaatgttttatggagaacttgttgcaatatgtataaaagggaaatctctattctgtgctcaaaaaaaaaaaaaaaa

SEQ ID NO: 1330 - DNA, 3635 bp, Homo Sapiens
  NM_001098833
cacaacaacacccccacccccgtgtgtgcagccgtgttgccgcccgctgtgctatgagcagtcagagcgccgtctccacaagagtttacaaatgaaaatggaggaaatgtctttgtctggcctggataacagcaaactagaggccatcgctcaggagatatacgcggacctggtcgaggattcttgtttgggattctgctttgaggtacaccgggctgtcaagtgtggctacttcttcttggacgacacggaccctgatagcatgaaggattttgagatcgtggaccagccgggcttggacatctttggacaggttttcaaccagtggaagagcaaggagtgtgtttgccccaattgcagtcgcagcattgccgcctcccgctttgctccccatctggagaagtgcctgggaatgggtcggaacagcagccgaatcgccaaccgccggattgccaatagcaacaatatgaataagtctgagagtgaccaagaagataatgatgacatcaatgacaacgactggtcctatggctcggagaagaaagccaagaagagaaagtcagacaagaaccccaattcccctcgaagatccaagtcattaaaacacaaaaatggggaacttagcaattcggatccttttaagtataacaattcaactgggatcagctatgagaccctggggccggaggagcttcgcagcctgctaaccacgcaatgtggggtgatttctgaacacaccaagaagatgtgcacaaggtccctgcgctgcccacagcacacagatgagcagaggcgaaccgtacggatttattttctcgggccctcggctgtccttccagaggtcgagagctccctggataatgacagctttgacatgactgacagccaggccctgatcagccggcttcagtgggacggctcctctgacctctcaccctctgattcaggctcctccaagacgagtgaaaatcagggatggggtctaggtaccaacagctctgagtcacggaaaaccaagaaaaagaaatcccatctgagcctggtagggactgcctccggcctaggttccaacaagaagaagaagccaaagccaccggcacccccgacgcccagcatctatgatgacatcaactgacttgggtgcaagggatagcctttggctgagcagagccctctctcctgacccccacccaggtggcatagcctggcaaatggacggctgctgggggttggggcttgggaagcttggtgggccaggcaggcagaggatccgattatgcgcccctggggggtgtcaaagtcctctgcaatggagcacgactcctcggcgtgcaggactcagacctggacatattatgccttggacataagtttggtggggaggcggttttcctatttattctgtgagttactggatgtccagctaggccaggggcctgacctgggcactgtgccagggcactgcctgccccccaccccaggaactggactaagccctgctgaggggcaatgtggcgacccgggaggctgtgggttggaagctgagcctggagggggcctgcctcggccgccctcagcaatgtgaatgggtccggtgcttggagctgaggggcaaggctgggcatgtcctgtctgtgtgcagaatcttatcaaatgcccccagtcccaggggtaggcaggcacagagtgctgtctgctgaggtgggcgtccagaactgccgccaccttccctgcccctcacaggggcagccctttcccctcagtccccatgggcctccttggcagcaggagctgtccttttgttgggtgccaggaaagggcctccagcctctacagcttcaaggaatgggaaagggagggtaggaagagggagaagtgtcagaattcctccccctgcctctcctccctgacccagggctggtgaggagtggggccccaaggtgagagggaacggtgctgctttatttgaaatgttttcttacctcattccctgccccaggaagggacccagcctcaccctcctggggtggccccgtgttcctcctgcccaccctgccccactgccctaccggggcagcccaggttcccaactgctgcttccacccccttcaccttgactggcttcagttcctctcagcgctcctgcctccaaagcgtgccctgtttcccttccttagcgcttttaagttatttattctgtacttgtggtttggggctctgaggaaaatcctaatcttgtgcctctccccctttgctaggagttgggtgggaagagagggtggcctctgtgccccaggttgtcagtggaggggaaggggtgtcactgcccctctgtgggactgtcatgccagtgtgcccacctgcctggtctacatcctaaagagatgtaccgtcccccctccatgcgggcaccaccactcccaggagccaagctggaggaccgcgacctgggctgggagcagagctgactgacatgggtggaggtgaccctgagccaagttctctggcacttgctggacatgtcccctaccctcttcccaagaggagccatcccacatttgggtagttagtacccaggactggttggactgatcgggttagggaccctagagggttaagggaacaacagagatggggctgcaatgccctgtctggaactccgctctcccgctggggtggttctgattgtggctcatgcctggttgcaaattggtttttaacccacaaattgtgattattttttaaaaagccaaacagattttggcaggagttagaataaatcccggggcctgggcttctctattcttggccctccgtagtctccctccgagaggaggccagagggagaggaggatctcagcaggcctctagccgcttccagatgcagtctggggagtgggctgaaggtgaagggaggaaggctgtgggccactctcccttctgagaggcagctgcagctcaggccctaatacactctttgccctgtggcctctcccttttccccccttctggttggaggagggagaagtgggaagtagcttgggaactggtttgtccacataaacttccccattgttccttggcccgccctcagggcagagccccctgcccaggctgggtaagagatgggcttggtccagcagggaccctgagggaacaaacccttttccttctggggagagagtgccccccctaccatgtagttgaacaggggctaggagctccccactcccctccctctaacagcaggctgtgtgggtttcaattcccatccttcccaccccggctaggtgtcgtccaccctgtatcctgtgtctgagtgtgtgtgggggggttctgtactaatttccatggccggtggcttttccttccatgcatcactcccccccgcatgcccaggggccacccgcctggcattaccgcatgctggggtcattgggggaggggggtggggctcacgctgtcctgtggtcttgagatttttatttttgcatatgtaatccattctgtacaggtagctaactttgtaaacgctgtgtattccctctgcccccatggctgctggtgtaaataaactgcatctcccgttggtaaaaaaaaaaaaaaaaaaaaaaaaaaaaaaaaaaaaaaaaaaa

SEQ ID NO: 1331 - DNA, 2183 bp, Homo Sapiens
  NM_001099222
gacgccgatgcggagctgagctggctttcctccagggctctggactccctgctgagcaagagagaaagaggcccgcccttccaccaggacgcctgaccctggggtccttcccaaacccgggtctcttccgactccgggcccaacagtttgtgcgattaaagtgaagaaacaatggccagcaatcacaaatcttcagcagctcgccctgtttcaagaggtggagttgggttaacaggaaggcctccttctgggatacgacccctatcaggaaatattcgagtggcaactgcaatgccacctgggacagcaagaccaggttctcgtggttgtcccatagggactggtggagttctgtcttctcaaatcaaagttgcccatcgccctgtaacacaacaaggtttgactggaatgaaaactgggacgaaaggtccccagaggcaaattttagacaaatcttactatcttgggcttcttagaagtaaaataagtgaacttacaactgaagttaataaacttcagaagggaatagaaatgtacaatcaagagaattcagtatatttgtcatatgaaaagagggctgagactttagctgttgagataaaagagcttcaaggacaactagcagactacaacatgttggtagataaacttaataccaacactgaaatggaagaagtaatgaatgattacaatatgcttaaagctcaaaatgatcgagaaacacaaagtttggatgtcatatttactgaaagacaagcgaaagaaaaacaaatcagaagtgtcgaagaagaaattgaacaggaaaaacaagcaacagatgacattatcaaaaatatgtcttttgaaaaccaagtcaagtacctagagatgaaaaccacaaatgagaaactgttacaggaattagatacacttcaacaacaattggattcacagaacatgaaaaaagagagcctggaagcagaaatagctcactcccaggtgaaacaggaggcggtattgctgcatgaaaaactttatgagttggagtcccatcgagatcaaatgattgcagaagacaaaagcataggatctccaatggaagagagagagaaattacttaagcagattaaagatgataatcaggaaatagccagcatggaaagacagttaacagatacaaaagaaaagataaatcagtttattgaagaaattagacaacttgacatggatttagaggaacaccaaggtgaaatgaaccagaaatacaaggagctaaagaaaagggaggaacatatggacacttttattgagacttttgaggaaacaaagaatcaggaactgaaacgaaaggcacagatagaagccaacattgttgcactcttggagcactgcagtcgaaatataaatcgtatagaacagatatcctctatcaccaatcaagagctaaagatgatgcaggatgacctcaattttaaatctactgaagtgcagaaatcacaaagtacagctcagaatttgacttcagacattcaacgtctgcagttggatctgcagaaaatggagcttctagaaagtaagatgactgaagaacagcattctctaaaaagcaaaattaagcaaatgacaactgatctggagatatataatgatttgccagctttaaaatcatcaggtgaagaaaagataaagaaattacatcaggagagaatgatattatcaacccacagaaatgcctttaagaaaataatggagaagcaaaacatagagtatgaggcactaaaaacacaattgcaagaaaatgagacacattctcagcttacaaatttggagagaaagtggcaacaccttgagcaaaataattttgcgatgaaagaattcatagcaaccaagagtcaagagagtgattaccagccaattaagaaaaatgtgaccaagcagattgcagagtacaataaaaccatcgtggatgctttacatagcaccagcggaaactgagtttaagtccactgaaagtctctaaggaagtatcctcttgctgctaaacttggtacaagttgactaccaaaaaaaaaaaaagcttacttttggagtttacctaaaatttctgaatgttataatttttgtggcctcttttaagaatgatattttaaaatagtaaatagttcaataaatggtttgcatattaaaaagtaaaaaaaaaaaaa

SEQ ID NO: 1332 - DNA, 6577 bp, Homo Sapiens
  NM_001099270
cggggactggcctggcgccggcggcggcggagggggcgccgcgggcgggcgatgtgagcgcggcgctctggacagagtacgcttcatgtcagtagaaatggacagcagcagttttattcagtttgatgtgcccgagtacagcagcaccgttctgagccagctaaacgaactccgcctgcaggggaaactatgtgacatcattgtacacattcagggtcagccattccgagcccacaaagcagtccttgctgccagctccccatatttccgggaccattcagcgttaagtaccatgagtggcttgtcaatatcagtgattaaaaatcccaatgtgtttgagcagttgctttctttttgttacactggaagaatgtccttgcagctgaaggatgttgtcagttttctgactgcagccagctttcttcagatgcagtgtgtcattgacaagtgcacgcagatcctagagagcatccattccaaaatcagcgttggagatgttgactctgttaccgtcggtgctgaagagaatcccgagagtcgaaacggagtgaaagacagcagcttctttgccaacccagtggagatctctcctccatattgctctcagggacggcagcccaccgcaagcagtgacctccggatggagacgacccccagcaaagctttgcgcagccgcttacaggaggaggggcactcagaccgcgggagcagtgggagcgtttctgaatatgagattcagatagagggagaccatgagcaaggagacctattggtgagggagagccagatcaccgaggtgaaagtgaagatggagaagtccgaccggcccagctgttccgacagctcctccctgggtgacgatgggtaccacaccgagatggttgatggggaacaagttgtggcagtgaatgtgggctcctatggttctgtgctccagcacgcatactcctattcccaagcagcctcacagccaaccaatgtatcagaagcttttggaagtttgagtaattccagcccatccaggtccatgctgagctgtttccgaggagggcgtgcccgccagaagcgggctttgtctgtccacctgcacagtgacctgcagggcctggtgcagggctctgacagtgaagccatgatgaacaaccccgggtatgagagcagtccccgggagaggagtgcgagagggcattggtacccgtacaatgagaggttgatctgtatttactgtggaaagtccttcaaccagaaaggaagccttgataggcacatgcgactccatatgggaatcaccccctttgtgtgcaagttctgtgggaagaagtacacacggaaggaccaactggagtaccacatccggggccatacagatgataaaccattccgctgtgagatctgcgggaagtgctttccattccaaggtaccctcaaccagcacttgcggaaaaaccacccaggcgttgctgaagtcaggagtcgcattgagtcccccgagagaacagatgtgtacgtggaacagaaactagaaaatgacgcatcggcctcagagatgggcctagattcccggatggaaattcacacagtgtctgatgctcccgattaagatggtaaagaagtgcacccaaacaaagcacattaatcaatgcatatttgtgatttgctttgttgtaatctttggttttcccaaccatctggaaatctcttggtctcttggcagtttttctaaagtttctggatggaacacttcgttgtgtttatcctttcccctgccctccctccccgaaggagctcaaagcatgaagggcaacgcatccagggaaaacacaggctgacagtattcctctttggctgaactcttaatccaaaatctgccagtgatttagctatgccaactggttgaccctccattctctgccaagaggcatactctttctcattgtgtgcgctggcagcagtgcacttccacggagggagattaggatgccgtcagctgatacaaatgggtaaccttttctaatttaaaattccttttagggggtagttagacaatttatatatatatataataaaactattattatatatatagtatatatacattttcaaatttgattttattctggttgaggtgaatgtaagaggaatatataatttaatacaatgtgaacagggcttctgagtctatctcatccctacctaatatgttagggttttgccccttcatttcccttacaaaagaatgttagtaggtttatattaatcattgtgtccaaaagcaagcaaagcaaatcacagtgttcacagctctgcttcataacaaatacataaaccaaatgccataaaatttcttcaactctagttggaaaccgtttggaatttttgttagttgtccagcaggtaagctggatgacctgtggtgctgacctttttacatagtgtagtgttatattagccaaccccaaaggagcagtggttttcaaggtttttactggcctacaaatctaccttcattccgtactgtagaaacatacataccaggtaactaaatcgaatcactctctatcatgagttagtactcactcgcacttaaggaaagggatttgtagttctgtctacaaaattctccaagcagtgttgtggttttttttgtttttgttttttttctttctcttttcaaacagccagttcaggtgcacagcaactttttctacatgcagttcccagggaaactgcagaacttagaatttgtactttttgtaaagctatactctatgggaattgcaagcaatatatctatcttagtattgtgtgtgctaatgagagcctcagtggctcccccactctctcagtgtttcctgcttaaagaaccaacagtttaaaagccctctaagatactctgtgtgtcaccaaatctgtgtgtcaccattttttggtcatgtggtgctatttttgttaagtgtctttttaggtcagtatagttgtagaaaatgtgaaatctgatggtaataatgaattataattgttttcctctcttgagttcatagcttgaaaagagacctcaaaagcatgtgctggcaaacacgttactgtatgaaaacatacctgagtccatttgaataatgttttattagtactttcggaaatgtcttcagttctgtattgtgttcacatacacaaacaggctttacaagattgcttcggtactgtaaactctggcagagagtaattttgtaggcagtttggtggtgagtttgtgctgcaggctgcctgtgggatgtcagcgttctggtatctgcctgagaacctgggctctgagacgcacaaccagtgcacctccataggagaacagtgcagccacctaaaagaaaaacgaacgaaggaccagcctcagaggctagaagttaaaggaatacagaattagatgtttgctggttttctgtgcttttttggctcctaaaataccaatggtggatttgtttttgtttttgttttttgttttgagaaataaaaagtcattcaagccctttgtgtgtaatagcccccaggggtggcagctgtgcagtcgcatctctttggcacacaggatctgttcacgtgtgaactgctgcgctacacatcagtgttaactccctacagattacactctaatcccgctgctcccgaggagcggctttgctaaatcgggtatatagtatatgcctttttcctcgtcaaactgcctaagtaggggttcgttctctccctgaagcacttgttcaactcctgttaaagccgcgtgcctcaaggggaggctggaccccaagtgtttacccacttaaatatgttctggggtttcaggtaaatgtttgtgggtttttttttccttacatgaataagtttggttttgatttttttttaattgaatgcaaaaaatttgtgttgtgatacaaattaagtttgtgacaagaaatgcccaaatccaaggacataagaggtcaagctcagggaaggaacctccttttcactcaggcttggggcctccagcgaggtttccagagcattccatggtatgagagacagtgaggagggagggcacctggcgcgggcacttccagcgtcctggctcttggcattgtccgtcttaaccttatttacatggagttctttgtatttgtgaatctgtttaactggtttgagtttaccaaagagtgacttatccaaaattgtctttgacaaaaatatccattgctttgattgtacagttcaggttcaaacattgtaatgggactgttaaggggcagaaaattgattgagtttctctctaagaatcatgattccacattttgcaagttccacttgctcccattcgtgttgctaacactttaccctttccactgctcgcagtgttaagaatgaattctcaagccataacacagtactgtaaagttccgcagggcttcgagggaggcagcgcctaggccagcacggagctgtgtagcctctctgagcgttcgcactgtcatgcttcccaggggtgtgactggtgagagattaactccattcagatcgggcagcagcaattaattgtgccttgccgcatgaggatgtgtcaggaggattaacatgaccacagaaccgaaacattctctccctgaagttcacttcacgtctccgcagacgaagtacgctgtgtaactccttagagcaactctttttggaaagcaaagtccctatttctgtacagttttaggttaggtgtttcatttataacagatgcagaaatcaattaagataaagtgatatgtgaagaaatcttttacagtaaaatatatcctgaattcatataggcttgttcataattgagtctcttcttgagctaccttttcaatattagacaatgtgaagacagtgacagcgtccttttctagagatatttagcctgttattacaaactgtgaagacaaagaattttatacttttactaatgtttgtggttttaaacagttattttcattctaatcagttctctaccctctaatttctactaaagctgtaaatacatttagaaattatatttgtaaatacagtatatggagacaagttaattttttggtcagtggaaaaagcctcccaaccaattggccctgccttggcagttgtgttttttgttgttgttgttgttgttttagtttagtttttttttttaaacagcagaaaggatactgtcggttcactgttgagcagaatatactgtagaacgaaaatgataatttttaaatcttccagagcatgagtaaatgtcttttctaatgatagcaaatataaccaactctttgtttttcccttagcccagaccatatagacctgcgtattttgtgtgtggttttgtttttatttttgttcttacagcctagaccctaggaaaaatttgcaggaacacgaaacaagggctggggggaaaatcatctatgtgaatgagctttactttaaagagatcaatgtattttattttatcaactttttctcttagttactgtgatttttgttgttgttgtcctcgttattgttaaattctgtaatggtttcctgtgaagcctccactgaaagggactcaaatatgcaacacctaaactattttccaagggcacatgccccttgaatggtgcttctagactggtcagggttatttattaaattttatatatgaaagtattggggaattatgtaaattctttatatgaaactatctagttcataaatcatagatttcatattactcagtgcaactgaactaaaagttcagaaaagtcattcacattgttccaaatttgtaatggttgtcacatgtcacatgcgtctttttcagtaagtgccagagtgttcccactgtttctgcccagtgcttgacttctcggcccggaagagaacctgctttctctggtttccttcctgagtctggcacagacggggctattgtagttcttgatcaagtcctggagtcagccttgcctggctctccttgtagcagattcagtccacagacctcttgctgcccctcagtgacaagtatgctgtgaattcaacctttggacttgctgcccaagcctttggttgctgccctgactattgtaagaggtaaacttacctggtttgtttgagaatgaccattttcctaatgtgaaaaccatctctctcaccacttttattagtagggctaacatttttttccgttataaatggttgagcaatttgaatgacttaacacagtgtcattatcttgcaatataaactggtaacctcacaactccacacttcatcaccatatgaagtaaatgaagctagctaagcggatgctgtatcaactagtaacttgccattaaggattattttatagcatgaatttaagactatttattcaaatgatattttactcttgtattcactttgttttagatttgtgacatgaatatttcagtgctgcttaattttgttctgaattcttgtttcttgcttgtaaatggcttttttatggtataaataaagtcaatggacattgctgtttgtaaataaaaatgctgctagagcaaaaaaaaaaaaaaaa

SEQ ID NO: 1333 - DNA, 1924 bp, Homo Sapiens
  NM_001099283
ttgtatttcggggccctaggcgcgcgagcggtcagcatccggaatctggcccctgcaggcgtggggttccacgtgggaggagacttgaatgaaaattctgtggagaatcttcagcagaaaacacttcaggatctgttacatgagctttcctcctggctagttttggaaggcatggccagtacaattactggaagtcaggattgtattgtgaatcatcgaggggaagtggatggggagcctgaactagatatttccccttgtcaacagtggggagaagcatcttctcctatttccagaaacagggacagtgtgatgactcttcaaagtggttgtttcgaaaacattgaaagtgaaacatatttgcctttgaaagtctcaagccaaatagacacacaagactcttcagtgaagttctgtaagaatgagcctcaggatcatcaggaaagcagacgtctctttgtaatggaagaaagcactgagagaaaagtgataaagggggaaagttgttcagagaaccttcaagttaaactggtgtctgatggacaagaactggcctcgccattgttaaatggtgaggcaacttgccagaatggccagttaaaagaatctttggatcccattgactgtaactgcaaagacattcatggatggaaatcacaggtggtcagttgtagtcagcagagagctcatacagaggagaaaccctgtgaccataataactgtgggaaaatacttaacaccagcccagatggtcatccatatgagaaaatccacactgcagagaaacaatacgaatgtagtcagtgtggtaagaacttcagtcaaagctcagagctactacttcatcagagagaccacacagaagaaaaaccctacaaatgtgagcaatgtgggaagggcttcacaaggagctcgagtctgcttatccatcaggcagtccacacagatgagaagccttataagtgtgacaagtgtgggaagggcttcaccaggagctcaagtctgctcatccatcatgccgtccatacaggcgaaaaaccttataaatgtgacaagtgtgggaagggctttagtcagagctccaaactgcacatccaccagcgagtccacactggagagaagccctatgagtgtgaggagtgtggtatgagcttcagtcagcgctcaaacctgcacatccaccagcgagtacacacaggagagaggccctacaagtgtggtgagtgtgggaagggcttcagtcagagctcgaaccttcacattcaccggtgcatccacacaggagagaagccttaccaatgctatgagtgtgggaagggtttcagccagagctcggatcttcgcatccatctcagagtccacactggagagaagccctatcactgtggcaagtgtgggaagggatttagccagagttccaaactcctcatccaccagagagtacatactggagagaagccctatgagtgcagcaagtgtgggaagggcttcagccagagctccaaccttcacatccaccagcgggttcacaagaaagatcctcgctaactgacattagcccattcaggtcttcacagcgctcatactgtaaaaactgttaaatatttagtatcactcttactttatattctacaaaggagagagatgtaagggttatttagatatgttccctcactgaaaaatcactcattcaaaatatttaagtatcaagcactttgttatgctgtacaatgaatggattgttcttgtttctcagatgggtagagtaaaagtgtctgtactttacaattcaactacatgttctacccagcattttaacggcaagaactttatatttattctcaagcagggcatgtttccctttgttcacattctctgagaaattgaaactctggtttctcttcaaaaaaaaaaaaaaaaaaaa

SEQ ID NO: 1334 - DNA, 2635 bp, Homo Sapiens
  NM_001099436
cggcgctgggggcagcgtggagccacccagtgctcggcccgccccgcaacccgccggaaccgccgcccgcagcgaggaagcgcccgcgcgggcgcaggcggccggaatggcggggcccggctggggtcccccgcgcctggacggcttcatcctcaccgagcgcctgggcagcggcacgtacgccacggtgtacaaggcctacgccaagaaggacactcgtgaagtggtagccataaagtgtgtagccaagaaaagtctgaacaaggcatcggtggagaacctcctcacggagattgagatcctcaagggcattcgacatccccacattgtgcagctgaaagactttcagtgggacagtgacaatatctacctcatcatggagttttgcgcagggggcgacctgtctcgcttcatccatacccgcaggattctgcctgagaaggtggcgcgtgtcttcatgcagcaattagctagcgccctgcaattcctgcatgaacggaatatctctcacctggatctgaagccacagaacattctactgagctccttggagaagccccacctaaaactggcagactttggtttcgcacaacacatgtccccgtgggatgagaagcacgtgctccgtggctcccccctctacatggcccccgagatggtgtgccagcggcagtatgacgcccgcgtggacctctggtccatgggggtcatcctgtatgaagccctcttcgggcagcccccctttgcctccaggtcgttctcggagctggaagagaagatccgtagcaaccgggtcatcgagctccccttgcggcccctgctctcccgagactgccgggacctactgcagcggctcctggagcgggaccccagccgtcgcatctccttccaggacttttttgcgcacccctgggtggacctggagcacatgcccagtggggagagtctggggcgagcaaccgccctggtggtgcaggctgtgaagaaagaccaggagggggattcagcagctgccttatcactctactgcaaggctctggacttctttgtacctgccctgcactatgaagtggatgcccagcggaaggaggcaattaaggcaaaggtggggcagtacgtgtcccgggctgaggagctcaaggccatcgtctcctcttccaatcaggccctgctgaggcaggggacctctgcccgagacctgctcagagagatggcccgggacaagccacgcctcctagctgccctggaagtggcttcagctgccatggccaaggaggaggccgccggcggggagcaggatgccctggacctgtaccagcacagcctgggggagctactgctgttgctggcagcggagcccccgggccggaggcgggagctgcttcacactgaggttcagaacctcatggcccgagctgaatacttgaaggagcaggtcaagatgagggaatctcgctgggaagctgacaccctggacaaagagggactgtcggaatctgttcgtagctcttgcacccttcagtgaccctagaagaatgattggacagatgtgagccatctggagcagaggggcactaacccaggctgacgccaagaatgaagtggcccactgcagccctggcgagcaggcttcttggatggacagtgctgagacccccatatcccagagtccccagcctccctcaggttactctgcaccccacagatggtttgatggctgtgctgtatactggaggggagggcaggactctgggagaacagcacttctttcatgagacctttgttactcggtggttactgggtcctgtgcctgtccgttttggggcatgcagccctctatcatttttggctccgagaagagggcaaggggcccccgcagggtacttctgtgcttgccctcgccctgccagcaggcagctgtgcccctggcctgcccttcccgggaccccttattccaactcagctcctctttgcactggaatggggcactccaacacccctcagggaccaccctccccacagtatgcactcagccccacagaacccaccagtctttctgggaactcacacctgcccgccatcttggtactttaggttaatccctcaagcatgaaagctggatcttttggggtttaagaagcccaagccttgttcctgccctggcctagggagcactcaggagggttccttggtcctcatctctcccacctccgttccctctgggccccacactagccacagcgcgggccttgtgctggagtttgagcctgggacagggagagggaggcttggagacagtctgacccagtgccctctaggccacccacttctaggcctgccctgccgccgtggagccctgggcaagctctttcccctttctgggcctgggtctccccatctcttcaatggggctgataccttcacagcccacagcatgggcacttatgaggacaaagtgaatttaacctggaaaagaatgtatttgagagtttcttttaaataatcagcgggtgttggtgatttgtagcccttctgcccttaaatgcttccttgggcaagagctgtctgtcctccctgcaggaggctgagtgtaaagagtatcattcattgtttctctattaaattattttctcta

SEQ ID NO: 1335 - DNA, 2604 bp, Homo Sapiens
  NM_001099437
cttgtggactgcgccgggcatgctcggcggtgtgacggctcaggactgcatttcccagaggctgcagctatccggccaatgtagcctgaaactacatttctcagcggccactggaacgacctcaatctctgcctcctcgccagttcattgtggtcgttgacccggcagcgagctttggagttcatcgagggagaagtcagcgcccagctccgaggttggagcagccccgccgggcaacttgaatttctgcaaacgaacacagcaccgggagctctgcagacctgtgtcggcgcggaacccggactgagacatgccttttgaacttctcagatagaggaaccccagtgaagactgatcagttcttacaattctcaaagcatggcccataaatatgtgggtttgcagtatcacggatcagtgacatttgaggatgtggccatagccttctcccagcaggagtgggagagtctggactcttcccagaggggcttgtacagagatgtgatgttggagaactacaggaacttggtgtcaatggcaggacattcccgttctaaaccacatgtgatcgccttattggaacaatggaaagagcctgaagtgacagtgaggaaagatggaagaagatggtgcacagatttgcagttggaagatgatacaatcggctgtaaagaaatgcccacctctgaaaactgtccatcttttgctctacatcagaaaataagtagacagaaaccacgtgaatgtcaggaatatggaaagaccctttgtcaagactcaaagcctgttcaacatgaaagaatacatagtagtgaaaaacccaacagatgtaaagaatgtgggaagaactttagtaatggacatcaactcaccatacatcagagattgcatgttggtgagaaaccctataaatatgaaaaatgtgggaaggcctttatcagtggctcagcctttgttaagcatgggagaattcacactggtgagaagccactcaaatgtaagcaatgtggaaagactattagtggtagctatcaacttacagtacataagagtattcatactgggaagaaaccatatgagtgcggggaatgtgggaaagcttttctagtatatggaaagcttacccggcatcagagtactcacactggtgaaaaaccctttgggtgtgaggagtgtgggaaggccttcagtaccttttcatacctggttcaacatcagcgaattcataccagtgaaaaaccttacgaatgcaaagaatgtgggaaggcctttagcactagctcaccccttgctaagcatcagagaattcatactggcgagaaaccctatgaatgtaaggagtgtgggaagtccttcactgtgtatggacagcttactcgacatcagagtattcatactggtgagaaaccttttgaatgtaaggaatgtggaaaggcctttagacttagttccttccttcatgcacatcagcgaattcatgcagagataaagccctacggatgcaaggaatgcgggagaaccttcagtcgtgcctcatatcttgttcaacatggaagacttcacactggcgagaagccctatgaatgtaaggagtgtggcaaggcctttagtactggctcataccttgttcagcatcagaggatccatactggggagaaaccctatgaatgtaaggaatgtggcaaagcctttattagtcgccatcagcttaccgtacatcaaagggttcatactggagagaaaccctatgagtgtaaggaatgtggcaaggccttcagagtgcacgtacatctcacacagcatcggaaaattcatactgatgtaaagccctatgaatgtaaggaatgtggaaagacttttagtcgagcctcgtaccttgtacaacatagcagaatccatactggtaagaagccctatgagtgtaaggagtgtggcaaggccttcagttctggctcataccttgttcagcatcaaagaattcatactggggagaaaccctatgaatgtaacaaatgtgggaaagcctttactgtttatggacaacttattggacatcagagtgttcacactggtgagaaaccttttgaatgtaaggaatgcgggaaggcctttagacttaattcattccttactgaacatcagcgggtacacactggtgagaaaccctttaaatgcaaaaaatgtgggaagacctttagatacagttcagcccttaaagtgcatctgagaaaacatatgagtgttataccctaagagtctgaggagtgtgggaagtgcttcgtgtgtggctcaaacattgttgaacatcggggaatttatgctggtaggaaactttcaaatgtgaagaatattggcaggtctattctcatcttataattcataatataactcagaaaacataagaatattcctttgtcatttataggtttgtaataccaatatttatactggtggaccattcagaaaaagtgggaaacgttattacttaatggttacagcactgacagcatgaacttttatatgatgcatttattctaatgtgattgtatgaacaagtgaataaaaaaccttggacctcctaaaccacaaaaaaaaaaaaaaaaa

SEQ ID NO: 1336 - DNA, 3744 bp, Homo Sapiens
  NM_001099660
tttcagccaaccagactggagcagctgcgagtgctacatcttggctgtctgaagcgattggctcctctctggggagtggagggtgttcagttattaatgaccgctgagcaggcagcaccatgtcagtgtgacaactgatcgggtgaacgatgcaccactaaccaccatggaaacaaggaaaaataaagccagctcacaggatctctcttcactggattgagagcctcagcctgccgactgagaaaaagagttccaggaaaaagaaggaatcccggctgcagcctcctgccttcctttatattttaaaatagagagataagattgcgtgcatgtgtgcatatctatagtatatattttgtacactttgttacacagacacacaaatgcacctatttataccgggcaagaacacaaccatgtgattatctcaaccaaggaactgaggaatccagcacgcaaggacatcggaggtgggctagcactgaaactgcttttcaaggaggtgaagcattccacagataatcagctactctattcagggaaggagtgtaaacatcaccactttttgcatgtttgcataaaaaaggcccactgaatcagttaaagacgaggaagaggaggagaaagagaaagaagaggaagatgttgggcaacatttatttaacatgctccacagcccggaccctggcatcatgctgctattcctgcaaatactgaagaagcatgggatttaaatattttacttctaaataaatgaattactcaatctcctatgaccatctatacatactccaccttcaaaaagtacatcaatattatatcattaaggaaatagtaaccttctcttctccaatatgcatgacatttttggacaatgcaattgtggcactggcacttatttcagtgaagaaaaactttgtggttctatggcattcatcatttgacaaatgcaagcatcttccttatcaatcagctcctattgaacttactagcactgactgtggaatccttaagggcccattacatttctgaagaagaaagctaagatgaaggacatgccactccgaattcatgtgctacttggcctagctatcactacactagtacaagctgtagataaaaaagtggattgtccacggttatgtacgtgtgaaatcaggccttggtttacacccagatccatttatatggaagcatctacagtggattgtaatgatttaggtcttttaactttcccagccagattgccagctaacacacagattcttctcctacagactaacaatattgcaaaaattgaatactccacagactttccagtaaaccttactggcctggatttatctcaaaacaatttatcttcagtcaccaatattaatgtaaaaaagatgcctcagctcctttctgtgtacctagaggaaaacaaacttactgaactgcctgaaaaatgtctgtccgaactgagcaacttacaagaactctatattaatcacaacttgctttctacaatttcacctggagcctttattggcctacataatcttcttcgacttcatctcaattcaaatagattgcagatgatcaacagtaagtggtttgatgctcttccaaatctagagattctgatgattggggaaaatccaattatcagaatcaaagacatgaactttaagcctcttatcaatcttcgcagcctggttatagctggtataaacctcacagaaataccagataacgccttggttggactggaaaacttagaaagcatctctttttacgataacaggcttattaaagtaccccatgttgctcttcaaaaagttgtaaatctcaaatttttggatctaaataaaaatcctattaatagaatacgaaggggtgattttagcaatatgctacacttaaaagagttggggataaataatatgcctgagctgatttccatcgatagtcttgctgtggataacctgccagatttaagaaaaatagaagctactaacaaccctagattgtcttacattcaccccaatgcatttttcagactccccaagctggaatcactcatgctgaacagcaatgctctcagtgccctgtaccatggtaccattgagtctctgccaaacctcaaggaaatcagcatacacagtaaccccatcaggtgtgactgtgtcatccgttggatgaacatgaacaaaaccaacattcgattcatggagccagattcactgttttgcgtggacccacctgaattccaaggtcagaatgttcggcaagtgcatttcagggacatgatggaaatttgtctccctcttatagctcctgagagctttccttctaatctaaatgtagaagctgggagctatgtttcctttcactgtagagctactgcagaaccacagcctgaaatctactggataacaccttctggtcaaaaactcttgcctaataccctgacagacaagttctatgtccattctgagggaacactagatataaatggcgtaactcccaaagaagggggtttatatacttgtatagcaactaacctagttggcgctgacttgaagtctgttatgatcaaagtggatggatcttttccacaagataacaatggctctttgaatattaaaataagagatattcaggccaattcagttttggtgtcctggaaagcaagttctaaaattctcaaatctagtgttaaatggacagcctttgtcaagactgaaaattctcatgctgcgcaaagtgctcgaataccatctgatgtcaaggtatataatcttactcatctgaatccatcaactgagtataaaatttgtattgatattcccaccatctatcagaaaaacagaaaaaaatgtgtaaatgtcaccaccaaaggtttgcaccctgatcaaaaagagtatgaaaagaataataccacaacacttatggcctgtcttggaggccttctggggattattggtgtgatatgtcttatcagctgcctctctccagaaatgaactgtgatggtggacacagctatgtgaggaattacttacagaaaccaacctttgcattaggtgagctttatcctcctctgataaatctctgggaagcaggaaaagaaaaaagtacatcactgaaagtaaaagcaactgttataggtttaccaacaaatatgtcctaaaaaccaccaaggaaacctactccaaaaatgaacaaaaaaaaaaaaagcgaaagactgcagttgtgctaaaaacaaaacaaaacaaacaaacaaacaaaaaagtaaaaaaagattactttcgagagagaagtttaagcttcaccaatgctgctcctgaccaatggaaatatgtacaacttcagcattttaagtaactggcttcaaggggtactgtggcaaccaaataaaataactccattttctaaaactttcatgtaacttttatgtctggactacagttcaagtggacaaaaacatttctgtattttttttaagtaaataagagtagttgaactgagcaatacctcctcctgtgttgtattacacatattagccacgagtttttgcagtgaccagataaacttgaattgacacgtggtgtaataaaatggacaaattctgtagagtagacacagtgagtatgtggacctcttttataaggaaaaatacattttggattaaaatcaattgcttctgtcttgttttgtttctaaataaagaataatttctgggaaaaaaaaaaaaaaaaaaa

SEQ ID NO: 1337 - DNA, 2952 bp, Homo Sapiens
  NM_001099668
gctctaggtaagcgaaacaagccgggggactgcgagccagggactcgggccgcggggcgggaagaagtggggcagcgcttggccaggccgaaaggactttgggggtgggggctgggagtccgtgtctcgaatgagggaggagaggtggagttgccggggctcaggcccggcctcgagcatgggcggatgagaggagtcgggagccgaggcctagggtccttcgggtgaggggagacggagccagcgaggagatggagcagaagcttgtggaggagattcttcaagcaatcactatgtcaacagacacaggtgtttcccttccttcatatgaggaagatcagggatcaaaactcattcgaaaagctaaagaggcaccattcgtacccgttggaatagcgggttttgcagcaattgttgcatatggattatataaactgaagagcaggggaaatactaaaatgtccattcatctgatccacatgcgtgtggcagcccaaggctttgttgtaggagcaatgactgttggtatgggctattccatgtatcgggaattctgggcaaaacctaagccttagaagaagagatgctgtcttggtcttgttggaggagcttgctttagttagatgtcttattattaaagttacctattattgttggaaataaactaatttgtatgggtttagatggtaacatggcattttgaatattggcttcctttcttgcaggcttgatttgcttggtgaccgaattactagtgactagtttactaactaggtcattcaaggaagtcaagttaacttaaacatgtcacctaaatgcacttgatggtgttgaaatgtccaccttcttaaatttttaagatgaacttagttctaaagaagataacaggccaatcctgaaggtactccctgtttgctgcagaatgtcagatattttggatgttgcataagagtcctatttgccccagttaattcaacttttgtctgcctgttttgtggactggctggctctgttagaactctgtccaaaaagtgcatggaatataacttgtaaagcttcccacaattgacaatatatatgcatgtgtttaaaccaaatccagaaagcttaaacaatagagctgcataatagtatttattaaagaatcacaactgtaaacatgagaataatttaaggattctagtttagttttttgtaattgcaaattatatttttgctgctgatatattagaataatttttaaatgtcatcttgaaatagaaatatgtattttaagcactcacgcaaaggtaaatgaacacgttttaaatgtgtgtgttgctaattttttccataagaattgtaaacattgaactgaacaaattacctataatggatttggttaatgacttatgagcaagctggtttggccagacagtatacccaaacttttatataatatacagaaggctatcacacttgtgaaattctcttgtctaatctgaatttgcattccatggtgttaacatggtatatgtattgttattaaagtaagtgacccatgtcaaatgtcttttatttatttcatgaggaaaagctttctgtagaggaacaaatttgagaacaagtttcaggaaattgtcttttttgttgttgttctctaatcatgttctcctttctgtttcaacgattttaaaaatattttactttatggtatgttttattttttttccttttgtgggtaatttttgttctattgattatccatataaattttttttttttttttttgagacggagttattctctgtcatcttggctggcgtgcagtggcacgatcttggctcactgcaacttccatcccccaggttcaagtgattctcttgcctcagcctcctgagtagctgtgattacaggcatgcaccaacatgcctggctaatttttgtatatttagtagagacgaggtttcaccatgttggccaggctgatcttgaattcctgacctcaggttatccacctgcctcggcctcccaaagtgctaggattacaggcgtgagccaccacgcccagctgattatccatataattataacactcttctatttattttcagtcaccaataattccttttgagcaatatttaagcctagcatatttcttccttccctcctcctctactaaccagttctggtcgatatattattggattttactcttatactgtttgtttgtttgtttgtttgtttattttgagacagagtcttgctctgttgctgaggctggagtacagtggtgtgatctgagctcacggcaccctccacctcctagcttcgtgcgattctgatgcttcaaccttccgagtagctgggattacaggcatgcgccaccatgtcgggctaatttttgtgtttttagtaaaggcgaggtttcaccatgttggatgatcttgaactcctggcttcaagagatctatctgcctcagcctcccaaagtgctgggattacaagcataatccaccacacctgacctacttttgtatgttaaatgtgattatacttctctttgacttgtcagcttagctttagctgatacactctggtgcccaactattattgtatcagtgaacttccactttcttttccttttctctcaatttttgttgtatcattcctaccttgtgaggacatataatatttacattctgttgtcatcctcacatttcttagttccacagtttaaatgtatttgaaactcaaaacattcccattaatctcttggtcagctgaaattaatgatttaatagtttccttaaaaaagactcatggaacaatttccctaaatttttgccatgtcaaatatgtttatctgtagcctttacacagtaaaaacaatttggctagataatacaattctcagttcatatttttctttggaatattaaagtattgctatagagaaaaaaaaaaaaaaaa

SEQ ID NO: 1338 - DNA, 4261 bp, Homo Sapiens
  NM_001099691
agccgccttcctatttccgcccggcgggcagcgctgcggggcgagtgccagcagagaggcgctcggtcctccctccgccctcccgcgccgggggcaggccctgcctagtctgcgtctttttcccccgcaccgcggcgccgctccgccactcgggcaccgcaggtagggcaggaggctggagagcctgctgcccgcccgcccgtaaaatggtcccctcggctggacagctcgccctgttcgctctgggtattgtgttggctgcgtgccaggccttggagaacagcacgtccccgctgagtgacccgcccgtggctgcagcagtggtgtcccattttaatgactgcccagattcccacactcagttctgcttccatggaacctgcaggtttttggtgcaggaggacaagccagcatgtgtctgccattctgggtacgttggtgcacgctgtgagcatgcggacctcctggccgtggtggctgccagccagaagaagcaggccatcaccgccttggtggtggtctccatcgtggccctggctgtccttatcatcacatgtgtgctgatacactgctgccaggtccgaaaacactgtgagtggtgccgggccctcatctgccggcacgagaagcccagcgccctcctgaagggaagaaccgcttgctgccactcagaaacagtggtctgaagagcccagaggaggagtttggccaggtggactgtggcagatcaataaagaaaggcttcttcaggacagcactgccagagatgcctgggtgtgccacagaccttcctacttggcctgtaatcacctgtgcagccttttgtgggccttcaaaactctgtcaagaactccgtctgcttggggttattcagtgtgacctagagaagaaatcagcggaccacgatttcaagacttgttaaaaaagaactgcaaagagacggactcctgttcacctaggtgaggtgtgtgcagcagttggtgtctgagtccacatgtgtgcagttgtcttctgccagccatggattccaggctatatatttctttttaatgggccacctccccacaacagaattctgcccaacacaggagatttctatagttattgttttctgtcatttgcctactggggaagaaagtgaaggaggggaaactgtttaatatcacatgaagaccctagctttaagagaagctgtatcctctaaccacgagaccctcaaccagcccaacatcttccatggacacatgacattgaagaccatcccaagctatcgccacccttggagatgatgtcttatttattagatggataatggttttatttttaatctcttaagtcaatgtaaaaagtataaaaccccttcagacttctacattaatgatgtatgtgttgctgactgaaaagctatactgattagaaatgtctggcctcttcaagacagctaaggcttgggaaaagtcttccagggtgcggagatggaaccagaggctgggttactggtaggaataaaggtaggggttcagaaatggtgccattgaagccacaaagccggtaaatgcctcaatacgttctgggagaaaacttagcaaatccatcagcagggatctgtcccctctgttggggagagaggaagagtgtgtgtgtctacacaggataaacccaatacatattgtactgctcagtgattaaatgggttcacttcctcgtgagccctcggtaagtatgtttagaaatagaacattagccacgagccataggcatttcaggccaaatccatgaaagggggaccagtcatttattttccattttgttgcttggttggtttgttgctttatttttaaaaggagaagtttaactttgctatttattttcgagcactaggaaaactattccagtaatttttttttcctcatttccattcaggatgccggctttattaacaaaaactctaacaagtcacctccactatgtgggtcttcctttcccctcaagagaaggagcaattgttcccctgagcatctgggtccatctgacccatggggcctgcctgtgagaaacagtgggtcccttcaaatacatagtggatagctcatccctaggaattttcattaaaatttggaaacagagtaatgaagaaataatatataaactccttatgtgaggaaatgctactaatatctgaaaagtgaaagatttctatgtattaactcttaagtgcacctagcttattacatcgtgaaaggtacatttaaaatatgttaaattggcttgaaattttcagagaattttgtcttcccctaattcttcttccttggtctggaagaacaatttctatgaattttctctttatttttttttataattcagacaattctatgacccgtgtcttcatttttggcactcttatttaacaatgccacacctgaagcacttggatctgttcagagctgaccccctagcaacgtagttgacacagctccaggtttttaaattactaaaataagttcaagtttacatcccttgggccagatatgtgggttgaggcttgactgtagcatcctgcttagagaccaatcaacggacactggtttttagacctctatcaatcagtagttagcatccaagagactttgcagaggcgtaggaatgaggctggacagatggcggaagcagaggttccctgcgaagacttgagatttagtgtctgtgaatgttctagttcctaggtccagcaagtcacacctgccagtgccctcatccttatgcctgtaacacacatgcagtgagaggcctcacatatacgcctccctagaagtgccttccaagtcagtcctttggaaaccagcaggtctgaaaaagaggctgcatcaatgcaagcctggttggaccattgtccatgcctcaggatagaacagcctggcttatttggggatttttcttctagaaatcaaatgactgataagcattggatccctctgccatttaatggcaatggtagtctttggttagctgcaaaaatactccatttcaagttaaaaatgcatcttctaatccatctctgcaagctccctgtgtttccttgccctttagaaaatgaattgttcactacaattagagaatcatttaacatcctgacctggtaagctgccacacacctggcagtggggagcatcgctgtttccaatggctcaggagacaatgaaaagcccccatttaaaaaaataacaaacattttttaaaaggcctccaatactcttatggagcctggatttttcccactgctctacaggctgtgactttttttaagcatcctgacaggaaatgttttcttctacatggaaagatagacagcagccaaccctgatctggaagacagggccccggctggacacacgtggaaccaagccagggatgggctggccattgtgtccccgcaggagagatgggcagaatggccctagagttcttttccctgagaaaggagaaaaagatgggattgccactcacccacccacactggtaagggaggagaatttgtgcttctggagcttctcaagggattgtgttttgcaggtacagaaaactgcctgttatcttcaagccaggttttcgagggcacatgggtcaccagttgctttttcagtcaatttggccgggatggactaatgaggctctaacactgctcaggagacccctgccctctagttggttctgggctttgatctcttccaacctgcccagtcacagaaggaggaatgactcaaatgcccaaaaccaagaacacattgcagaagtaagacaaacatgtatatttttaaatgttctaacataagacctgttctctctagccattgatttaccaggctttctgaaagatctagtggttcacacagagagagagagagtactgaaaaagcaactcctcttcttagtcttaataatttactaaaatggtcaacttttcattatctttattataataaacctgatgcttttttttagaactccttactctgatgtctgtatatgttgcactgaaaaggttaatatttaatgttttaatttattttgtgtggtaagttaattttgatttctgtaatgtgttaatgtgattagcagttattttccttaatatctgaattatacttaaagagtagtgagcaatataagacgcaattgtgtttttcagtaatgtgcattgttattgagttgtactgtaccttatttggaaggatgaaggaatgaatctttttttcctaaa

SEQ ID NO: 1339 - DNA, 1352 bp, Homo Sapiens
  NM_001099786
ggagaagactgaataagccgtgaactgggcagctgtgacacgcgcaccttgtcaccttgtcaccaatttcctgcccgggatcccagagctacccttcttggagcccacaggggtaaggttgagcttctcactttccctccaatgaagcgtggcagcatgggaaggattttggcagtgtcgaggtctgagttttagtccgttcccctctctgggtctcagtttctcgctggaataaagtgaaacacctcaggctccaaccctcccaacccaaggctccctcctggagggagagagaggatggaggacatcaggcagcccttggctggtccctgcgagcccgtggagactgccagagatgtcctctttcggttacaggaccctgactgtggccctcttcaccctgatctgctgtccaggatcggatgagaaggtattcgaggtacacgtgaggccaaagaagctggcggttgagcccaaagggtccctcgaggtcaactgcagcaccacctgtaaccagcctgaagtgggtggtctggagacctctctagataagattctgctggacgaacaggctcagtggaaacattacttggtctcaaacatctcccatgacacggtcctccaatgccacttcacctgctccgggaagcaggagtcaatgaattccaacgtcagcgtgtaccagcctccaaggcaggtcatcctgacactgcaacccactttggtggctgtgggcaagtccttcaccattgagtgcagggtgcccaccgtggagcccctggacagcctcaccctcttcctgttccgtggcaatgagactctgcactatgagaccttcgggaaggcagcccctgctccgcaggaggccacagccacattcaacagcacggctgacagagaggatggccaccgcaacttctcctgcctggctgtgctggacttgatgtctcgcggtggcaacatctttcacaaacactcagccccgaagatgttggagatctatgagcctgtgtcggacagccagatggtcatcatagtcacggtggtgtcggtgttgctgtccctgttcgtgacatctgtcctgctctgcttcatcttcggccagcacttgcgccagcagcggatgggcacctacggggtgcgagcggcttggaggaggctgccccaggccttccggccatagcaaccatgagtggcatggccaccaccacggtggtcactggaactcagtgtgactcctcagggttgaggtccagccctggctgaaggactgtgacaggcagcagagacttgggacattgccttttctagcccgaatacaaacacctggacttaaaaaaaaaaaaaaaaaa

SEQ ID NO: 1340 - DNA, 1844 bp, Homo Sapiens
  NM_001099858
gtcacccggcccggaaccacgtgatgcaggaggtgcccgaggcggcggggctcgcgcgggtggagccgcctcggcgttcgagcggggtgggggctgcccggttgagatttcccggcgggtcccggcctctgcgtgcacgcgcctgcgtgctcgcgctcgcggttctggcgctgccggaaaggaataatgctgacagcatgtctgcacattccatgctctgtgaacgaatcgccatagccaaggaactgatcaagagagcagaatcactttctagatcaagaaaaggtggcatagaaggtggtgcaaagctgtgcagcaaattgaaggcagaattaaaattcttgcagaaagtagaagctgggaaagtagctattaaagagtctcatttacagagcactaacctaacacacctgagagccattgtggaatcagcagaaaacctggaagaagttgttagtgttcttcatgtctttggttatacagataccttaggagaaaagcaaacccttgtggtagatgtagttgcaaatggtggtcatacttgggtgaaagccattggccggaaggctgaagctcttcataacatctggctgggcaggggccaatatggtgacaaaagcatcattgagcaggctgaagacttcctccaggccagtcaccagcagccagtgcagtatagcaaccctcacatcatctttgcattttacaacagtgtctccagccccatggcagagaagctgaaagaaatgggcatatctgtgagaggagacatagtagcagtcaacgctctgttagatcaccctgaagagcttcaaccaagtgagagtgaatcagatgatgagggccctgaacttttgcaggtgaccagagttgaccgagaaaatatactagcaagtgttgcgtttccaacagaaattaaggtcgatgtgtgcaaaagagtaaatctggacattactactttaatcacatatgtatctgccctcagctatggaggctgccactttattttcaaagagaaagtgctcacagaacaagcagagcaagagaggaaagagcaggttctacctcagctggaggcctttatgaaggacaaggagttgtttgcttgtgaatctgctgtcaaggactttcagtctattttagataccttaggaggacctggggagagagagagggccactgtgttaattaagcgaattaatgtggtaccagaccagccttctgagcgtgccttgagactagtggccagttcaaaaattaatagccgctcattaacaatttttgggacgggagacaccctaaaagccatcacaatgactgctaatagtggttttgtcagagctgcaaacaaccagggtgttaaatttagtgtgtttatccatcagcccagagcacttactgagagtaaagaggctctagccacccccttaccaaaagactacacaactgacagtgaacactaaagataccctttaaatatttttgtggaagtaagttatttataccaaaggctgggtcttcccatctaaactggtgggaaaaaaggtctatagtaaaagtaaaactgagaactcttaaaccagtagagtttctttgtctctcatctaaagtatataacctcccaaagtagaaaaagcacaagagagaagcttatctatcaaactgtctgcattagtgcaattaagaaccgaaatacgtctatataaagctttcagctgtattgtaatactttgattcgatagggctacaactcccctactgctaaccacatttcatggaatatggctacattgcatcttgcattaaatatctggagaaaattcaaaaaaaaaaaaaaaaaaaaa

SEQ ID NO: 1341 - DNA, 2563 bp, Homo Sapiens
  NM_001100118
ctattggaggagaaggccgagaggagcaggacggcgggaagaggagtgcggaacccgcgggagagtccccagggagacacttaagggaaattaaactgcagagtgcaagagatgcctcagtcaagtcagccaaaaacacgcgggtcatccccaagccccagagagtgacagagccccgatgacacggacacctcggctgctgtcacttccctggttcgggcctcccacaggctttgaattgaaggcgagtgcctcagaatttgcatccattgttctgtctttcctgggaagttattcatcctggtggccagcccaccgacaaaatggatttggatctactggacctgaatcccagaattattgctgcaattaagaaagccaaactgaaatcggtaaaggaggttttacacttttctggaccagacttgaagagactgaccaacctctccagccccgaggtctggcacttgctgagaacggcctccttacacttgcggggaagcagcatccttacagcactgcagctgcaccagcagaaggagcggttccccacgcagcaccagcgcctgagcctgggctgcccggtgctggacgcgctgctccgcggtggcctgcccctggacggcatcactgagctggccggacgcagctcggcagggaagacccagctggcgctgcagctctgcctggctgtgcagttcccgcggcagcacggaggcctggaggctggagccgtctacatctgcacggaagacgccttcccgcacaagcgcctgcagcagctcatggcccagcagccgcggctgcgcactgacgttccaggagagctgcttcagaagctccgatttggcagccagatcttcatcgagcacgtggccgatgtggacaccttgttggagtgtgtgaataagaaggtccccgtactgctgtctcggggcatggctcgcctggtggtcatcgactcggtggcagccccattccgctgtgaatttgacagccaggcctccgcccccagggccaggcatctgcagtccctgggggccacgctgcgtgagctgagcagtgccttccagagccctgtgctgtgcatcaaccaggtgacagaggccatggaggagcagggcgcagcacacgggccgctggggttctgggacgaacgtgtttccccagcccttggcataacctgggctaaccagctcctggtgagactgctggctgaccggctccgcgaggaagaggctgccctcggctgcccagcccggaccctgcgggtgctctctgccccccacctgcccccctcctcctgttcctacacgatcagtgccgaaggggtgcgagggacacctgggacccagtcccactgacacggtggcggctgcacaacagccctgcctgagaagccccgacacacggggctcgggcctttaaaacgcgtctgcctgggccgtggcacagctgggagcctggttcagacacagctcttccagggcagcggctccactttctcatccgaagatggtggccacagactgacccccatctgagctggggggatgttctgcctctccctgggtctggggacaggcccgcttgctgggtacctggtccccactgctgagctggcccttggggagaggtgattctcagggctggagcctggggtgtcctacagtgactccctgggagccgcctgcttcttctctccacatggaagcccaactggggttgcgtctgaggcctgccccctgggctggggcctcagaccccctcagccttgggaccgtgcccacgagggtctcccctcctgcacacagggcagtccttactcccccaccactcaggccacagtggggctgcaggcaggcggctcctcctcacccacctctgggtccttggctcccgggggccccacctcggcacacactgtgccccacaaaacttcagtgtggtacaaggtggagaaagcatatcccaccaacctccagtgtcagggtccaggagagcctgggggtggggggactgccttgtctctagtagtgtggcctgtgccagcaccacagccggtcagaggagcgcaggcagcgcagggctggcacgtgacaggctcgtcagccacctgggaacacagttctgggcaaagaggatccgaggttgagaggaaggagggtcccggtgtatcctggccctgggggtctgggcgtccagctcagccctggcctggctgggtggtattctggtagggatatggcaggactcctggcagggccacctgcaggaccctgtcctgcagtcccacactgtgcagacccagtcccacactgtggccaggccttacatctggctggaaagcagagcctcctgggaacacatctggctgcacaggctgaaatatccacccagcaggcagagtggcgtggcctccccatgggcacagtggtgacccccttgattcccaccgtacaaccccctccaccccccactcagtgcctccacatgctgcctggcacagaccaggcctttgacaaataaatgttcaatggatgcaaaaaaaaaaaaaaaaaaa

SEQ ID NO: 1342 - DNA, 9642 bp, Homo Sapiens
  NM_001100164
atccgctgggcaggatccgccgcgccggctgcggccggccgggctgggagacccgcgcggggtagaaggtgaggggacccggcgggccgctcggcacaggccgggacatgaacgcctggaagtctggctgggagcggacccatgatcgaaggaccaaaggagccgcttgatcgctggacctggccctgcgaccccagtcatgggccagacctcggtgtccacgctgtccccgcagcccggcagcgttgacggactggacaaagcttctatagcaaactcagatggccccacagcaggttcccaaacacctcccttcaaaagaaaggggaaactatccaccattggtaaaatctttaagccttggaaatggaggaaaaagaagaccagcgacaaatttagagaaacctcggcagtattagaaaggaagatatccacacgacaaagtagagaggagctgataagaaggggagtgcttaaggaattgcctgatcaagatggagatgtaacagttaactttgaaaattcaaacgggcacatgatacccatcggagaggaatctacccgagaggaaaatgtagtaaagtctgaagaaggtaatggctctgtatctgaaaaaacaccacctctggaggaacaggcagaagataagaaagagaacactgaaaaccactctgaaacaccggcagctcctgctctacctccttctgctcctcctaagcctagacccaaacctaaacccaaaaaatcacctgtgcctccgaaaggggccactgctggggccagccacaaaggtgatgaagtgcctcccattaaaaaaaataccaaggctcctggtaagcaggcccccgtccctccacccaagccagcaagccgaaacacgacccgagaggctgctggctcctctcattcaaaaaaaacaactggctctaaagcatcagcttcgccatccacttcatccacctcatctcgtcccaaagcttcaaaggagacagtttctagcaaagcagggacagtggggaccaccaagggcaagagaaaaactgacaagcagccaataacttctcacctgtcctcagacacaacaacttctggcacatccgacctgaaaggagagcctgcagagaccagagtggagagtttcaaactcgaacagactgtccctggagctgaggagcagaacacaggcaaattcaagtccatggtccctccaccccctgtggctccagcaccttctcctctggccccccctctccctcttgaggatcagtgcattactgcctcagacactccagttgtcctcgtcagcgttggagctgacctgcccgtctctgccttagacccaagtcagcttctttgggctgaagagccgacgaacagaaccactctctactcaggcactggcttaagtgttaacagagaaaatgcaaaatgtttcacaaccaaagaggagctggggaagacagtgcctcagctactgactcctgggctgatgggcgaatcttcagaatcctttagtgcctcagaagatgaaggccacagggaataccaagccaatgactctgactcggacgggcctatcttgtacaccgatgatgaggacgaagacgaagatgaggatggcagtggagaaagtgctttggcaagtaaaatacgccggagggatactcttgctatcaaacttggcaacagaccatctaagaaagaactagaggacaaaaacatcttgcagcgtacatctgaagaagagaggcaggaaatccgacaacaaattggaaccaagttagtcaggaggctgagccagaggcccacaactgaagaattagagcaaagaaacatcctaaaacaaaagaatgaagaagaggaacaagaagcaaaaatggaacttaaacgcagactcagcagaaagctcagcctgagacccacagtggcagagctacaagctcgaaggatcctgcgatttaacgagtatgtagaagtcacggattctcctgactatgaccgccgagcagacaagccctgggccaggttaacacctgcagacaaggcagcaataaggaaagaactaaatgaatttaaaagcacagaaatggaagttcatgaagagagtcgacagtttacaaggtttcatcgtccataacgaagagtgagactatttggaaacagagactgatcatctttgggggaagccctgcttcctgaaaacctgatattgcactgggatttgaatgtgtgtgtttccgtttaacttgtggtgaaggaagtgtgtgactcagcttggctgggaagtgctcctcacctgtgtggcccagatggctccaacaagcaaaaggaaggatgcagtgactcttgctgcccagaatgcacagcgatggtaagagacaccgtggatattcttcatcagaagctttaatcaaagaagatgagcagaagacaatcactggctccctgttaccagaaagccaaattttataatgcgggtgaaagaaaaatatagattaaaattgctgggcactgaaaaggggtgggagttggaaatcagaaagaaagagaaatatttcattatgttaatgaagaaaagagaaaattgaagcataaatgtatttttgaagtagttattcggtagctgagaacttattaagggatttaggaatttaacctcctgatgtggattcctcaaagacttgatcggagaatactcttgtttcaccattatgttggtacagtatagtaccattattttatgttgtgccagtgaatccagttgccagaaataagtctgaatgttttcatgcatctttttcttaaatgcaagagcttctactgactcttaacaagcatgcttacccaaattttgttgcatgcttttaagtagcattagctatgcacacttgacatttttaaatatccctttcctagtgtaccagccttcacaggataagaggactgggaataaagtcagatgtaatgtgaccctagaaaactgtagcaagcttcagaaataaatcttttgatctttccctatcttgattagatccaaagtcaaagcaaccatacttcacctagagaagacagtattggcaatcatgacacctgtaataaaaacttgaatccaaagtcaaaacttaagcaagatacaaatgtgctgcctgcagttagtcctgcatgggaataaggactagttatttttttagtgctgcatttttttaaagttggattgctgctatttaaaaaaaaaaaaaggacacagatcaaaaaaacacccaaaggcttaacagaacatggaaagttcccactaagttgtgtgtgaggaaatcctcatcttgtattttaagaatctgcagatggcatccatagatacagtacagtatttactgtcaatgcaaaagaatcagtgaggttaaagtagtggaagttttccctatgagcctacagtctgtattgtttacattaagaaactctctattattgtgttgctattttccatggagtcacaggcacactatgacttctgctcccaaatacatatgaccatatgtaaataccaccttgcatttcattgttcttcacaagtgctttgtgcccctttaattaaaaacacatgaaatgaataacaaaacaagacccaaatagagtttattttattctcagagtttggactacaattttctaagatgtttctggttcaagactgtcattttctatttcaaccgaaaagtaagcatttaacccggtgaataaatgtagatcctgccattcattggtattttaaagaaccacttgaaatcggatcattttatttaaaaataaaaaatgttaatgccagttggcctactataaaaagccaggaccatgttagaattaggaaaagtaaccagcattactgcacctcttgttagactctgtgcattaataaaacacacctagagtctgttgtcatttcactaataggataagacaaattttttgctttgaaaaaatttttctgcatgcccaggtgtctgtctctggctgaggttttgtctattttacagtgtttcaatccagccataaaaattaacttgtgattttttttttcccaaagtcatgcttttccttaattatatttttattttattattttagtgtcttgagaaaaataccaagagatataatgtttcttttaattgtctatgcttaatcatctttaaacactttttaaatttctaaccacaagacctctctataatggtaaatgtaagacatcaccattttatcactcaaagtatgttattgaaagtttctatttggttgataaaaggaacaattttttcccacttttgatgcctgtgatgcaattttttattgcctacaatgagatacacttagtacaaaaaatgaaaatctggtatttcaaaattgcatttcttgtataataggtcagatttattaactactcatactttttctttacactaatcgatacatttagaaaaaattttctaagttagagacaagtttaaaagtaaaaaaaaaaaaaaattagccactgctagtctactgtttaggtaatcggaatcaccaattattttattagaatgatggcttgagtaaaaagctgtggaaagaattaaaggattatgagctaagctgtattttgcagaatatggttctattttagtagagcagagatgagacatatccccaccggccacccagccagaggtctcctacctgggggccctaaagggatgcagaggtctggcccaccctccgtgcataggcacctctgtccaccaccagcgtttcagcaatccaaccagtaagcatatgctgtataggaaaaataaaagtgtgtgggaattggatttcttttgttgtaacacaattccaggtttttggctatttaaagtttgacattaggctgacatcgaggaagtaagtgggttttcctgagttcccaagatatgattaaggaagaaaacaaacccatctccaggaagatcccaggcaggaaagaactagacagatgtagaaaccaaagtgaccattttagtttttttattggagaataaaacattaatattagggtattaagaagatgctcagcaagcttgatcagaatcttcatggtcattaccaatcagtctgacaaaatagttctctggtagtcagcattcatttaaggcagcttgcctgataatttcctgtgttatgtgaagtgtcttgcactttcacatgttagctataattccttaaattacttaactgaaatctgtaatagagaaccattttggcatttgaacagctattttacatggagaaaaagcaaacacatctgtttgctttacccagaaaaactgactttctggtttcatcttcatattgtttagtagcataatgagagtagtcctttatctttctctaatgttagtaaatatattctgttagtaggaagttctgaaattgaagggaaaatatatttaaggaaataaaggaattcaatacacccttcaaaagtcaccaaatactgaaaataagagatgagtccttaaaacctgagtcaaaaaaggtccagttttacagcctgcaattaattcagggctgcgttggcattaaaaaagaaaatatatatatatatatatatatatatatatatatatatatatatgtatattatatatacagtagcttacacttaaaagaggaaaaatttgcattaacattgcatattctgatatgtaccatattaacacataacaggcattttatttatgcttcatagaatcagacagacacaactttcaaaaatcttactgtattcacaatagaaaagggtagtcttgtctaccacagaggagtatgtccacacttaataatgaaaactttcttcctttcctgcccaaaaatttcttcagtctgttattatttttaagtgccccttgctgcaaatttcaaacagagcaagaaatcttcctcagagtaggtggtatgaaattaaactagtacaatatatatgaattcatgtcatttacccctgagtatggtagaattgttaaagcattcttaaattccaattatatgaagcctatcattactaggaaaagtatattctttgggataagaattaatttcttcacactattagagcatgttgtgagtagtaaggaactacttagatgcaatttatttacagaattgtcccttgacctcttgaaatggctagatctttcactactgtgtaggtagtctctacttactggtaggatagattacattgctttactggacaaagcagaatgaacttatataactaaaatatgtcctatattggctgggtgcggtggcttacacctgtaataccagcactttgggaggccaaggtgggtggatcagttgaggtcaggagttcgagaccagcctggccaacatggtgaaaccctgtctctactgaaaatacaaaaaaaaaaaagtatctgggcatggtggcttgtgcctgtaatcccagctacttgggaggctgaggcagggaaatcgcttaaacccgggaggtggaggttgcagtgggcccagatcgtgccactccactccagcctgggagacagagcaagactccatctcaaaataataataatagtaataatgaataaaataaaataaaatatgtcctccagggaaaagcaatgacagagtaatcaccaaattaataggaacatctttctagagaaagtacatgcccagttagttcaaacccaggtttcaaagaagtagcactgggctctactgtaaaggcaggcagtgaccaagaggtggtggggagagaggtagagtaccctcaaatcattcccattttcacttccaatttcccttttgtaatcattaagcttaagctatgtatggaaatgcaaagcaccattagcatttctagaaagcagctggaaccttacccaccaatgcttttttgaagacagtatcatcccaaatttaaaaatcctattgtatatgttgtaaaatttctggcaaagaaatggaggatcctgtggcagctattcccacctaaagccaaccctataaggatgggtcattttttagccatgctaggatttactgcacacacaaaaaatgtcatttagcttgtcacattgctagcacagctgcacatatgagcaaagcactgttggtctgtgtttctcagtgggggtactcttggcatttggagctggataggtctttgctgtacagaatcatcccatgcattgccagatgtttaatatcccaggcccctgctgactaaatgtcagtagcattctcagtcattgtaaacaccaagaataaaaagcattcccccaggttcaaatgccctccctgggaggttggtatcacctcccctgaatgccactgtctactgcattttgaggacacagggagaaaaagtgcctatcctcaaacattgtctctgctgccttgcatttctttgggccctgaatggtttttctcccttcatttttcgagcctttctctcagtgcagctgttcttcagggaggaggttactgggcagccttggccattcagtgggcatggggacttggcctagtccctatatatatatacttaaagtccctatatatacttaaaggagagatcatacatgaagaaagcttttttttttttttttttttttgccttacaacttttctttagaaccacattattggtcataatccttgttactgtcatgaggattgttgcatgggttaaacacaaacacagactagcaatgcacttgaacaaacctggtggtctttggaaataaatcaccattagatttcacctggttatgctgcatcccataagttccaaatgaatcacctgcttatcctattaacgaagcatttaattcacacacaaatgcttgaatttcccctgtataaatgtagtcatgcgattcaacttttctaataagatttgtgaatgctgcatcatgatgaaaatgtggattaactgtgggttgcatgcctgttgttcatacttcagtgatggtcacacacaaaacaagatgagttttacttaggtgaaacattattaaactgtactaacaatacagaaacatattctctttgtcgctttttatcaccaaaactgaatggcaaatatgtcttgacattacttggatgaactgtggctagcaaaatggaattaacttagccactataattttttaaaacattaaagtttctaaattgtttttggggccgagtaacgcagagtcaataaaggtggttatattgtaagcttttagatggtgcttaagaattcttatctttttaaatagcagtattttttttttaagaataaattgtaaggagcaaataaggcagaatgccactctaccctcaggtcaattttatggtatatgaaaatgccagtaatatttgtgccacttgccaactcgggggaggaggggcttttcccttactggatacttttgttatagtttgactatgtcattatgttgtttagagagcctccacaatgagaagttgccactgcagggctaactcgccttcagaaataatcagaatgattcaagggtcaaaccactttcatcccttaaaatatagggactaatatttctttttcttttttttaaaaaaaacatttcttctgtggcttagaaatgtgccagtgtgttcaaaacatttacaccaatttcaccagatttaggacctattaaaaattcaaacaagtttcttttttttttttttttttctgtgtaacagggatttttaaataacggactatatgcattcttttgttatttcacacttcagttaaagtgataacaatggtaaactgtgatcattatcagactgactgaatgctttctgatttccagtgagtgatctagttctacgtattacacaggtgtaatatctgtgagtgtaaataactggaactgtacactgattaacatgacagtttctcttttgttgttcttatctgtactgtattatagtatgtgggtataaatatctacaagtatacacacatatgtacttgtattccactattgtaacctgaaagaaagactatgtattcccttttttaattccgtactggtatttgtgttatttaaaaagcaaaattctgctctatttagttgtataatattagaggatactttgctgtgcacaattccaagtgccttagaacattgtttagctttcctaagtatatataaatgcatatatgtataaaattgggaaaagttacctcaataaaatcattgggaaatccccagttttagtttgttccagtttctcttatatttggatagtgctcagcctttttaaatgaaaaaagaaaaaagagtaagacaacttccctaattgcctgttatttcagcttcacctaagtttttaacacctctttgtatgtaaggtcttgagacatgtaaggcctggtactttttatttaaaatgtctgtctaaagaattactgctcttaaaagaaacttccagtattttttttaacttgctatctttttatgtctgaggtatttgatattgatgtttttattgccattattatatgtaaacataaaagatagtccatttagagtttataatatagaaaataaacagacttcctcattaaaaaaaaaa

SEQ ID NO: 1343 - DNA, 3015 bp, Homo Sapiens
  NM_001100169
aattctctttaagagtcacagctgtccattttccacgtgcggctgaagaatggatttcagagcgctctccctccggcagtgttcacctagtaaccccttccggataaggacctgcagcccgggcgcgacccggaaagggaatccgcccttttcgcctccttcgcgccaatcgcctggagttggcgtttccgcagccgggacacagcccaccctctaagagccgcggagtcggggacggtagaaggggccgcgcgtgcgcagtggcgtccgctgtgcttccggtgcgccgggcgcggacgcgggcacgcacacacgcaagcacgcctccacttaactcgcgccgccgcggcagctcgagtccaccagcagcgccgtccgcttgaccgagatgctgcgggcctgtcagttatcgggtgtgaccgccgccgcccagagttgtctctgtgggaagtttgtcctccgtccattgcgaccatgccgcagatactctacttcaggcagctctgggttgactactggcaaaattgctggagctggccttttgtttgttggtggaggtattggtggcactatcctatatgccaaatgggattcccatttccgggaaagtgtagagaaaaccataccttactcagacaaactcttcgagatggttcttggtcctgcagcttataatgttccattgccaaagaaatcgattcagtcgggtccactaaaaatctctagtgtatcagaagtaatgaaagaatctaaacagcctgcctcacaactccaaaaacaaaagggagatactccagcttcagcaacagcacctacagaagcggctcaaattatttctgcagcaggtgataccctgtcggtcccagcccctgcagttcagcctgaggaatctttaaaaactgatcaccctgaaattggtgaaggaaaacccacacctgcactttcagaagcatcctcatcttctataagggagcgaccacctgaagaagttgcagctcgccttgcacaacaggaaaaacaagaacaagttaaaattgagtctctagccaagagcttagaagatgctctgaggcaaactgcaagtgtcactctgcaggctattgcagctcagaatgctgcggtccaggctgtcaatgcacactccaacatattgaaagccgccatggacaattctgagattgcaggcgagaagaaatctgctcagtggcgcacagtggagggtgcattgaaggaacgcagaaaggcagtagatgaagctgccgatgcccttctcaaagccaaagaagagttagagaagatgaaaagtgtgattgaaaatgcaaagaaaaaagaggttgctggggccaagcctcatataactgctgcagagggtaaacttcacaacatgatagttgatctggataatgtggtcaaaaaggtccaagcagctcagtctgaggctaaggttgtatctcagtatcatgagctggtggtccaagctcgggatgactttaaacgagagctggacagtattactccagaagtccttcctgggtggaaaggaatgagtgtttcagacttagctgacaagctctctactgatgatctgaactccctcattgctcatgcacatcgtcgtattgatcagctgaacagagagctggcagaacagaaggccaccgaaaagcagcacatcacgttagccttggagaaacaaaagctggaagaaaagcgggcatttgactctgcagtagcaaaagcattagaacatcacagaagtgaaatacaggctgaacaggacagaaagatagaagaagtcagagatgccatggaaaatgaaatgagaacccagcttcgccgacaggcagctgcccacactgatcacttgcgagatgtccttagggtacaagaacaggaattgaagtctgaatttgagcagaacctgtctgagaaactctctgaacaagaattacaatttcgtcgtctcagtcaagagcaagttgacaactttactctggatataaatactgcctatgccagactcagaggaatcgaacaggctgttcagagccatgcagttgctgaagaggaagccagaaaagcccaccaactctggctttcagtggaggcattaaagtacagcatgaagacctcatctgcagaaacacctactatcccgctgggtagtgcagttgaggccatcaaagccaactgttctgataatgaattcacccaagctttaaccgcagctatccctccagagtccctgacccgtggggtgtacagtgaagagacccttagagcccgtttctatgctgttcaaaaactggcccgaagggtagcaatgattgatgaaaccagaaatagcttgtaccagtacttcctctcctacctacagtccctgctcctattcccacctcagcaactgaagccgcccccagagctctgccctgaggatataaacacatttaaattactgtcatatgcttcctattgcattgagcatggtgatctggagctagcagcaaagtttgtcaatcagctgaagggggaatccagacgagtggcacaggactggctgaaggaagcccgaatgaccctagaaacgaaacagatagtggaaatcctgacagcatatgccagcgccgtaggaataggaaccactcaggtgcagccagagtgaggtttaggaagattttcataaagtcatatttcatgtcaaaggaaatcagcagtgatagatgaagggttcgcagcgagagtcccggacttgtctagaaatgagcaggtttacaagtactgttctaaatgttaacacctgttgcatttatattctttccatttgctatcatgtcagtgaacgccaggagtgctttctttgcaacttgtgtaacattttctgttttttcaggttttactgatgaggcttgtgaggccaatcaaaataatgtttgtgatctctactactgttgattttgccctcggagcaaactgaataaagcaacaagatgaaaactgaaaaaaaaaaaaaaaaaa

SEQ ID NO: 1344 - DNA, 4511 bp, Homo Sapiens
  NM_001100389
ctggcaggtcccagaaggtggcgagtttcgcggccagaggcttacaggtccaggtggagaggccgggctggccagggcttcggcctccggcgtcgggaaatggcggcggggggcaggatggaggacggttccttggatatcacccagagtattgaagacgacccacttctggatgcccagcttctcccacaccactcattacaagctcactttagaccccgattccatcctcttcctacagtcatcatagtgaatcttctgtggtttattcatctcgtgtttgttgttttagcatttttaacaggtgtgctttgttcttatcctaatccaaatgaggacaagtgcccaggaaattacacaaacccattgaaagttcagacggttataatccttgggaaagttattttgtggattctccatttactccttgaatgctacatccagtatcaccacagcaaaatcagaaaccgaggctataacttgatctaccgatcaacaaggcatctcaagagacttgcgttgatgatacagtcctctggcaacacagtgcttctcctcatactgtgcatgcagcactccttcccagagcctggcagattgtatcttgacctcattctggccatcttggcactggaactcatctgttccctgatatgtctcctcatttacacagtgaaaatccggagatttaataaagctaaaccagagcctgatatacttgaagaagaaaaaatctatgcttaccccagcaatattacctcggagactggattcagaactatttcaagcctagaagaaattgttgaaaagcaaggagacaccattgaatacctgaagcgacacaatgcgctgctgagtaagcgattgttggctctcacttcctcagacctgggctgtcagccaagtagaacgtgagaggctcacggtcatgacagcaattgcagaggaacccagagtaattgagactgactgaccacctgacaagctgccacggggaactgcagcttttgctgaatagcattttacagtgtttgttggaaacctgaatttggttctgacttctgtggctgtttaaaatatagggcttgtgggtcacttgaaaagtacctgtagaagcccggataacttgaggggaatgtctgtttgtacttttggaaattatttaactgcttggtttatcctaggatcagaggctaaacaactccatagtcaacacttttccacctgacattagaaccctgtaatgatttcattatggataggggaagtctaacaagacaatcgattttaaacagggttttaatcaaataagttcttcccacttttaagctgatgaaagaagtcattatttcttgtgaatattttttcctggagagccttatcatgtattttatatgcttatgtggtgttggatgacatcatggaccatatagcttttatagagaatttttctcaccataggactgaggtctcaccaggtgatctactatgcaaattcctacagttttctattcttaagaaataagggctgggcacggcggatcatgaggtcaggaaattgagaccatcctggctaacacggtgaaaccctgtctctactaaaaatacaaaaaaaattagccgagcatggtggcgggcacctgtagtcccagccacctgggaggctgaggcaggagaatggtgtggacccaggaggcggagcttgcagtgagccgagatcacgccactgcactccagcctgggcgacagagcgagactccgtctcaaaaaaacaaaaaagaaaaagaaaagaaataagatatgatgattgattacttggaccagtgttagaccgacctgtgttagacgaacctgtgttgcctattatattggcagcaccttccattagcaatagctgaaaaattcagagaagaatttagaactttcactttatttttgccattcttcaagaagttgctgtatatttcagtctggttataccttcaattgatcaataacttcaattataggaaaggcatcttctataattttaaattactgtaaaaaaaagataccttttaaagccttggattatacttaaaaattgtaatggaagaaatgcatattaagttatatgcagatattaaacatatctgattctgaagataaaactgaagtatttttcagagcaaatggcattatttctccatttttcctagtatgcccctttaatttgtcagtttgctgttagcactgttatatgctgccttagaaagacttttggttgaaggctgaatatgaggggaggggatatttatgactgtgttaatcttttttgatcattagctgaatattcaatatttgatatgtaaccatatagggatgtgttcgatataactatataggcaagggatatattgatttggccacatctatttgacttatggagggcaaatacctgtttcttttagatacagccattgccggggcattctaaaagttttctactaagataaagatgattgtgtatggctgggagcagttgctcatgcctgtaatcttagtactttgggaggctgaggcaggaggatcactcaaggccaggagtttgagaccagcctgggcaacaatgagacactgtctctcaaaaaaaaaaaaaaaagatcgtgtgtcacctgcacacaacattcacaaactaaagccaaattgtatttttaaaatttcctttctcccttccgtttttttttgttttttgggggtttttttttttgttgttgtttttgagacagagtctcaccctgtcgcccaggctggagtgcaatggcgcctttctttctttctttttttttcagacggagtctcgctctgttgcccaggctggagcgcagtagcatgatctcggctcactgcaacctccgcctcccgggattaagaaattctcctacctcagcctgctgagtagctgggattacaggcacatgccaccatgcctggctaatttttgtatttttagtacaggcggggtttcaccatgctggccaggctggtctcaaactcctgaccttttgatccgccctccttggcctcccaaagtgttgggattacaggcatgagccactgtgcccggccttcctttctttttaataagtgtatgtatctcaaagccattgccttctctagaaatctgtttctctgttctggaagagcctataaactttgccttcagttgtttttcttttcaaaagggaacaccagtggtagatgattaactcttatttatttttaaaatttaatttggatctatagtcagtatctgagatttataggatgaactttggtttacaaggaacagtgtagttaaaaagttagggtgcctatgttcttatgtaatcatcaacatgtttgttgtataatcatcaacatttttctgaatgcaatgatgaacatttcaaacaataaatgaaaatgaaactaagtatcagaagtagcaaaacagctgatgcagtggcttacgcctgtaatcccagcacttcgggaggctgaggcaggtggatcacctgaggttaggagctcaagaccagcctggccaacatagtaaaaccccatctttactaaaaatacaaaataagccaggcatggtggcacgcatctgtaatcccagctactcaggaggctgaggcaggagaatcgcttgaacacaggaggcagaggttgcagtgagctgaaattgcaccactgcattccagcttgggcaacagagctagactcgatctcaaaaaaaaaagaagtaacaaaacagaaaaatgaacaaaacaatttaaatgttaaacattctattcaccaggctggtaattgtgctagcactgaggatacaaaaattaaagactctggttggcagcttacattctaaagagagcgaggaatagatttccagactctgtgctaagtgcagtaatgacagtaggcccaacatgctgtaggagctccacgtcagggggtaccctgggggcaggagggtagagggttttaagaatgtcagacagaacaatgagtaaagtaggaaggcaaatagctacaaaatatcacaagcactgtgtatagctggaaccaaaagtgtgaggcaggacctgggtggagaggtagacagggtcagagcttggagggccttgatactatgctggaagactgcactttatcttgttgataatgggatcctctgaagcatttcaagcaaggaagtgacaatgtcagttttagtttcagcaggatcagatggtagttcaatatggaggaaatatgtgtggcagaaagatatggccctgaactagggcaggtatagtaaaccttttattataagtatgtatgtgtataggtatatagatagatataggtatatatgtatgtatatgtattccaaatgacaacagtatcatgacttattataaagttaaaagctcattttttaaaaaatggcaatatggaaaaatataaagcaaaacaattatttgaaatctcaaaaaaaaaaaaaaaaa

SEQ ID NO: 1345 - DNA, 2125 bp, Homo Sapiens
  NM_001100408
ccaatcccggaagcgcgcgcggccccgcccccgaaagtcggctcggctccgctccaatcccggaagtgcgcgcggccccgcccccgccggttcgcgtctctctgctgcggcgcggggaccgctgtgctctcgacccctcctcctgtagagagtggtgctgccctctcgggatgtacctgcaggtggagacccgcaccagctcccgcctccatctgaagagggctccaggcatccggtcctggtccctgctggttgatagcctgggctggaagctcttctacgtcacaggctgcctgtttgtggctgtgcagaacttggaggactgggaggaagccatcttcgacaagagcacagggaaggttgttttgaagacgttcagcctctacaagaagctgctgactcttttcagagctggccacgaccaggtggtggtcctgctccatgatgtccgtgatgtgagcgtggaggaggagaaggtccggtacttcgggaaaggctacatggtggtgctccggcttgcgacgggcttctcccaccccctcacgcagagtgcagtcatgggccaccgcagtgatgtggaagccatcgccaagctcatcaccagcttcctggagctgcactgccttgagagccccacagagctgtctcagagcagcgacagtgaggccggtgaccctgcaagccagagctgacagccccactgtgcctgagcccgtgcaccgcccacaggacccatggcacattcccggtgtgcctgagcccgtgcaccgcccacaggacccgtggcacattcccggtgtgcctgagcccgtgcaccgcccacaggacccgtggcacattcccggtgtgcctgagcccgtgcaccgcccacaggacccgtggcacattcccggtgtgcctgagcccgtgcaccgcccacaggacccgtggccttggcttcagttggtgcctccagccgagttggcctattgcctgctcatgctgctgcttgcacactgcatgaaacagcaggccagaccaggacatccagactttctccatcgtgaggcctgggcctgcctttctgcagccggaggtctcgccagccctggactcctgctttgggccacagcaagacctcgggcgagtggagaggcggggccaggccgggcccttgtgggtgctgatgctgcatgttgtccccgacacagcgtcctctccctggtggacatccccagcggtcaggtgcttccccaagggcagtgaggggtgaacatccagggcctacctggctgtgcacgctgcagccacactgtggaagctgcccctccccgaggacccgcctcccttgctgatgccaggatctcggcgcatagaccactctgccccagcggtcgtcacagaaaggtctctctgttcctcacactcagcttcagcataagctgtgaggccagaaaaaaggtcagctcttctagtatcgtgcagtgcttaaaaaccgggagctccagccgggcgcagtggttcatgccagtaatcccagcactttcggaggccgaggtgggaggattgcttgaggccaggagttcaagaccagcctgggcaacacagcaagatcctgtctttgtaaaaaaactaaccaaacaggaaaaactgggagattttctgcagaaattgagttccagcctctctcgaacctgggaagacctggcaggagggggctgggctctcggctacagacttctccccaccccgtaggagctgaacgccaaccatcctgacccgccagtgctcttggtctcctgagtgtacccaggtcctcccaggtgcggtgtgcaccgagcgcgcctggcctgatgccctggcctgtgagctggggactcctgggccctgtgagcccctaggcggcaggcccaggaatggctgggtaggacagggaacacctttgccccacgtctggctgtgacctcggtgaaagccgacaggagagagatgggaccctcctcctcagtagtggctgccagtccctcgttgcaggacagggtcatcataaccataaataacccttcacgtgtcacctgcagcttccactctttatttccaaagaatcagtgtcacacatgcagatcacaaaaaaaaaaaaaaaaaa

SEQ ID NO: 1346 - DNA, 3575 bp, Homo Sapiens
  NM_001100417
agaacacgacaccgggaagcgccacccggaggcggaaatcagcccgcgtccggcgcaggcgggagaagggagaggagtgacatccgtttgtcggaagtcgctcctcccccttccttcgctttttttccttgtcattggttcctggcactcgggccccacctcctccggctacgcccctcacggccgcttttcccgcctccgccggggccgagccgctgttcggctgacagttgaggatggccggagccgagggcgccgctgggcggcagtcggagctggagcccgtggtatcgttggtcgacgtccttgaggaggacgaggagctggagaatgaggcgtgcgctgtcctgggcggcagcgactccgagaagtgctcctactctcagaaattttcgttgtgattgtggaaacagcaagtttaaaaatttggaatgcaaattacttcctgacaaagcaaaggtaaattctggcaataagtacaatgacaacttttttggattgtactgcatttgcaagagaccttatcctgatcctgaagacgagattccagatgagatgatccagtgcgtagtctgtgaagactggttccatggaaggcatcttggtgccattccccctgagagtggggattttcaggagatggtatgccaggcctgcatgaaacgttgttcttttttgtgggcttatgctgcacaattggcagtaaccaaaatatccactgaggatgatggattggtgcggaacattgatggaataggtgatcaggaagttatcaaacctgaaaatggagagcatcaagatagtaccctcaaagaggatgttccagaacagggaaaggatgatgtccgggaggttaaagtagagcagaacagtgaaccatgtgccggctctagttctgaatctgatctccagacagtgtttaagaatgaaagcctcaacgcagaatcaaaatctggctgcaaacttcaggagcttaaagctaagcagcttataaagaaagacactgccacctattggcccctgaactggcgtagcaagttgtgtacctgccaagactgtatgaaaatgtatggagatctagatgtcttattcctgacagatgaatacgacacagttctggcttatgaaaacaaagggaagattgcccaggccactgacaggagcgatcccctaatggatacccttagcagcatgaatagagtccagcaagtggaactcatttgtgaatacaatgatttgaagactgaacttaaagactatctcaagagatttgctgatgaaggcacggttgttaagagagaggacattcagcagttctttgaagagtttcagtcaaaaaagagaagaagagtggatgggatgcagtattactgcagctagagtggagtatgaagctttctcattcaagccaatgaaaatgcgcttcccattcttggaataaaagaggtgtggttcacatttggccccctttccgtcctcctctgtttggagaggcctcgcgctcccttcattctctttagctgcagtagccaccgtgtggatgctgacttcacagccagcgtcctctgtgactcagctgatgcagctcattccacagacttctccagtgtactcctactccagtgcacccagggttatttgcatagtttttaagtttgattttgttttgagaaagcaaattggtgtcttgtttaatgatctgttatttcactcccagatgtgtgtgttttgccacagagctgttgccttccagaacctcctccgcaggcatcacggaaggctctcttcccgtcacctagaacctctacaggtcccctcgcccctatgatcgtggtgccttgggtcaaagcttcctcaagcctggtctgctccttctttcacgtccctgttttctgaggtttggtcatagcttagaaaggatcttggggcttgttttctctaggcccaacctccagagtagccaggactgatggttttctggtctggatgtctgtcacaggcggagagattaacagatgacagggttgaggaagcaagcctttgttatgaattttactaatacagttcaagtgaaattttcgttcatgattctattggcactagaattagaatttcagtactgtagtgctcacagggcttcctggagaacatttgcccgtatactagtcccttctctgctgcctagaaaacagaccgggtctcacccctgtgaaatcttggtggtttacgaagtcctctggatttcttgatattatcagggatattcataagcatatatcaaaaatggacctattttgatattctgttatgaaaatgttattagaaccccaataaattattatttttcccccttgaatctgctaaagaaaacagatcctgacttagcttacttgaaataagcagggcagggagccctgttttggaagagacagactgtggaagagattacaaacaaggcccgaggctgcacgaatgatgagttttgtgtatataatgttaatgtccaccgccacttccctaacgactatgagatcttttttttgaagatcctcatggaaggttgtacagagccccacatttgaggggaagtcctttcagttgatatgagatctctttaacacccctcagtctatgtaggaaatgccttgtgatacatagagaaccctcagcttctctctgcctctggaggaccaaggtctttcctgacagtcggagacacaccttgatgtatgttaataaaagcatttcaggctgtggggccaccatgtatattaatactccttatgtgtccagcatctgtgtattcattcgagtgcccaatccctggatgagatgaactaggccttataaaaagtcaaagcctcaaagaaatggcacaaccatgttcttcggcactcaggctcctaattgcagatcctcacgaagggtggtatgtggagctggaaggtcttgtggccacaggacatgctggtgagccctgagctggccttgtgcagagggctccgttcaaaggctcggggtgtctttgaggttgtttatcaagctggggaactcttccaagtctgacaatgtttcgaaccctttttgcaaggttgcactattagtataccatcatgtccggaaaacttttaatcttctcaaatatctgatgtaactaccagaaagtcccttacttcctatgaccaatcaggaccaagtcttggaggtgatgtgttacattacgtgcagcacaatagtaccgatcagttaactcagcgctgaagggcttgttttatgaaaggtactattccttctttcacattaactggaaacctctttttttacctgttgttcacaactagttttcttattgactgtattggactgtctcttcttgtagagactgattttggccaacatattaatgcatgttttatgcaaaacacaaatatgatattagttgcttttaaggagttctggcattgtatgtgcatttttgtagaaattgttactggacttataattacatacttaactctgatcaggtttctgtaaaatttaaataaaaccaatacaaaataaaaaaaaaaaaaaaa

SEQ ID NO: 1347 - DNA, 1852 bp, Homo Sapiens
  NM_001101
accgccgagaccgcgtccgccccgcgagcacagagcctcgcctttgccgatccgccgcccgtccacacccgccgccagctcaccatggatgatgatatcgccgcgctcgtcgtcgacaacggctccggcatgtgcaaggccggcttcgcgggcgacgatgccccccgggccgtcttcccctccatcgtggggcgccccaggcaccagggcgtgatggtgggcatgggtcagaaggattcctatgtgggcgacgaggcccagagcaagagaggcatcctcaccctgaagtaccccatcgagcacggcatcgtcaccaactgggacgacatggagaaaatctggcaccacaccttctacaatgagctgcgtgtggctcccgaggagcaccccgtgctgctgaccgaggcccccctgaaccccaaggccaaccgcgagaagatgacccagatcatgtttgagaccttcaacaccccagccatgtacgttgctatccaggctgtgctatccctgtacgcctctggccgtaccactggcatcgtgatggactccggtgacggggtcacccacactgtgcccatctacgaggggtatgccctcccccatgccatcctgcgtctggacctggctggccgggacctgactgactacctcatgaagatcctcaccgagcgcggctacagcttcaccaccacggccgagcgggaaatcgtgcgtgacattaaggagaagctgtgctacgtcgccctggacttcgagcaagagatggccacggctgcttccagctcctccctggagaagagctacgagctgcctgacggccaggtcatcaccattggcaatgagcggttccgctgccctgaggcactcttccagccttccttcctgggcatggagtcctgtggcatccacgaaactaccttcaactccatcatgaagtgtgacgtggacatccgcaaagacctgtacgccaacacagtgctgtctggcggcaccaccatgtaccctggcattgccgacaggatgcagaaggagatcactgccctggcacccagcacaatgaagatcaagatcattgctcctcctgagcgcaagtactccgtgtggatcggcggctccatcctggcctcgctgtccaccttccagcagatgtggatcagcaagcaggagtatgacgagtccggcccctccatcgtccaccgcaaatgcttctaggcggactatgacttagttgcgttacaccctttcttgacaaaacctaacttgcgcagaaaacaagatgagattggcatggctttatttgttttttttgttttgttttggttttttttttttttttggcttgactcaggatttaaaaactggaacggtgaaggtgacagcagtcggttggagcgagcatcccccaaagttcacaatgtggccgaggactttgattgcacattgttgtttttttaatagtcattccaaatatgagatgcgttgttacaggaagtcccttgccatcctaaaagccaccccacttctctctaaggagaatggcccagtcctctcccaagtccacacaggggaggtgatagcattgctttcgtgtaaattatgtaatgcaaaatttttttaatcttcgccttaatacttttttattttgttttattttgaatgatgagccttcgtgcccccccttcccccttttttgtcccccaacttgagatgtatgaaggcttttggtctccctgggagtgggtggaggcagccagggcttacctgtacactgacttgagaccagttgaataaaagtgcacaccttaaaaatgaaaaaaaaaaaaaaaaaaaaaaaaaaaaaaaaaaaaaaaaa

SEQ ID NO: 1348 - DNA, 3743 bp, Homo Sapiens
  NM_001102
tctgccccttccccccgcccccgcccgcctcggctcccgcagcgctagtgtgtccgcctagttcagtgtgcgtggagattaggtccaagcgcccgcccagaggcaggcagtccgcgagcccagccgccgctgtcgccgccagtagcagccttcgccagcagcgccgcggcggaaccgggcgcaggggagcgagcccggccccgccagcccagcccagcccagccctactccctccccacgccagggcagcagccgttgctcagagagaaggtggaggaagaaatccagaccctagcacgcgcgcaccatcatggaccattatgattctcagcaaaccaacgattacatgcagccagaagaggactgggaccgggacctgctcctggacccggcctgggagaagcagcagagaaagacattcacggcatggtgtaactcccacctccggaaggcggggacacagatcgagaacatcgaagaggacttccgggatggcctgaagctcatgctgctgctggaggtcatctcaggtgaacgcttggccaagccagagcgaggcaagatgagagtgcacaagatctccaacgtcaacaaggccctggatttcatagccagcaaaggcgtcaaactggtgtccatcggagccgaagaaatcgtggatgggaatgtgaagatgaccctgggcatgatctggaccatcatcctgcgctttgccatccaggacatctccgtggaagagacttcagccaaggaagggctgctcctgtggtgtcagagaaagacagccccttacaaaaatgtcaacatccagaacttccacataagctggaaggatggcctcggcttctgtgctttgatccaccgacaccggcccgagctgattgactacgggaagctgcggaaggatgatccactcacaaatctgaatacggcttttgacgtggcagagaagtacctggacatccccaagatgctggatgccgaagacatcgttggaactgcccgaccggatgagaaagccatcatgacttacgtgtctagcttctaccacgccttctctggagcccagaaggcggagacagcagccaatcgcatctgcaaggtgttggccgtcaaccaggagaacgagcagcttatggaagactacgagaagctggccagtgatctgttggagtggatccgccgcacaatcccgtggctggagaaccgggtgcccgagaacaccatgcatgccatgcaacagaagctggaggacttccgggactaccggcgcctgcacaagccgcccaaggtgcaggagaagtgccagctggagatcaacttcaacacgctgcagaccaagctgcggctcagcaaccggcctgccttcatgccctctgagggcaggatggtctcggacatcaacaatgcctggggctgcctggagcaggtggagaagggctatgaggagtggttgctgaatgagatccggaggctggagcgactggaccacctggcagagaagttccggcagaaggcctccatccacgaggcctggactgacggcaaagaggccatgctgcgacagaaggactatgagaccgccaccctctcggagatcaaggccctgctcaagaagcatgaggccttcgagagtgacctggctgcccaccaggaccgtgtggagcagattgccgccatcgcacaggagctcaatgagctggactattatgactcacccagtgtcaacgcccgttgccaaaagatctgtgaccagtgggacaatctgggggccctaactcagaagcgaagggaagctctggagcggaccgagaaactgctggagaccattgaccagctgtacttggagtatgccaagcgggctgcacccttcaacaactggatggagggggccatggaggacctgcaggacaccttcattgtgcacaccattgaggagatccagggactgaccacagcccatgagcagttcaaggccaccctccctgatgccgacaaggagcgcctggccatcctgggcatccacaatgaggtgtccaagattgtccagacctaccacgtcaatatggcgggcaccaacccctacacaaccatcacgcctcaggagatcaatggcaaatgggaccacgtgcggcagctggtgcctcggagggaccaagctctgacggaggagcatgcccgacagcagcacaatgagaggctacgcaagcagtttggagcccaggccaatgtcatcgggccctggatccagaccaagatggaggagatcgggaggatctccattgagatgcatgggaccctggaggaccagctcagccacctgcggcagtatgagaagagcatcgtcaactacaagccaaagattgatcagctggagggcgaccaccagctcatccaggaggcgctcatcttcgacaacaagcacaccaactacaccatggagcacatccgtgtgggctgggagcagctgctcaccaccatcgccaggaccatcaatgaggtagagaaccagatcctgacccgggatgccaagggcatcagccaggagcagatgaatgagttccgggcctccttcaaccactttgaccgggatcactccggcacactgggtcccgaggagttcaaagcctgcctcatcagcttgggttatgatattggcaacgacccccagggagaagcagaatttgcccgcatcatgagcattgtggaccccaaccgcctgggggtagtgacattccaggccttcattgacttcatgtcccgcgagacagccgacacagatacagcagaccaagtcatggcttccttcaagatcctggctggggacaagaactacattaccatggacgagctgcgccgcgagctgccacccgaccaggctgagtactgcatcgcgcggatggccccctacaccggccccgactccgtgccaggtgctctggactacatgtccttctccacggcgctgtacggcgagagtgacctctaatccaccccgcccggccgccctcgtcttgtgcgccgtgccctgccttgcacctccgccgtcgcccatctcctgcctgggttcggtttcagctcccagcctccacccgggtgagctggggcccacgtggcatcgatcctccctgcccgcgaagtgacagtttacaaaattattttctgcaaaaaagaaaaaaaagttacgttaaaaaccaaaaaactacatattttattatagaaaaagtattttttctccaccagacaaatggaaaaaaagaggaaagattaactatttgcaccgaaatgtcttgttttgttgcgacataggaaaataaccaagcacaaagttatattccatcctttttactgatttttttttcttctatctgttccatctgctgtattcatttctccaatctcatgtccattttggtgtgggagtcggggtagggggtactcttgtcaaaaggcacattggtgcatgtgtgtttgctagctcacttgtccatgaaaatattttatgatattaaagaaaatcttttgaaatggctgttttttaaggaagagaatttatgtggcttctcatttttaaatcccctcagaggtgtgactagtctctttatcagcacacacttaaaaaatttttaatattgtctattaaaaataggacaaacttggagagtatggacaactttgatattgcttggcacagatggtattaaaaaaaccacactcctatgacaaaaaaaaaaaaaaaaaaa

SEQ ID NO: 1349 - DNA, 621 bp, Homo Sapiens
  NM_001107
cggaggtttgcgcgccttggtgagccgttggcgtggtggtcccggagtgatcctggcagccggtggggaagacaaggagggtttgagcatggcagaaggaaacaccctgatatcagtggattatgaaatttttgggaaggtgcaaggggtgtttttccgtaagcatactcaggctgagggtaaaaagctgggattggtaggctgggtccagaacactgaccggggcacagtgcaaggacaattgcaaggtcccatctccaaggtgcgtcatatgcaggaatggcttgaaacaagaggaagtcctaaatcacacatcgacaaagcaaacttcaacaatgaaaaagtcatcttgaagttggattactcagacttccaaattgtaaaataatggcctgaatttaagttttctaagataaactcagtggtttggtttttattattaatagagatagaactattgtgtgttaatattagcattagtcaataagttattttaatgtcagatttttgaatgttattatatattacctgtatgatggaaggattaccactgtacacaaatctaatcaataaaaacgttagaaccttctgcttagagtacttttaaaaaaaaaaaaaaaa

SEQ ID NO: 1350 - DNA, 3316 bp, Homo Sapiens
  NM_001109
gcggaaaagagcctcgggccaggagcgcaggaaccagaccgtgtcccgcggggctgtcacctccgcctctgctccccgacccggccatgcgcggcctcgggctctggctgctgggcgcgatgatgctgcctgcgattgcccccagccggccctgggccctcatggagcagtatgaggtcgtgttgccgtggcgtctgccaggcccccgagtccgccgagctctgccctcccacttgggcctgcacccagagagggtgagctacgtccttggggccacagggcacaacttcaccctccacctgcggaagaacagggacctgctgggctccggctacacagagacctatacggctgccaatggctccgaggtgacggagcagcctcgcgggcaggaccactgcttctaccagggccacgtagaggggtacccggactcagccgccagcctcagcacctgtgccggcctcaggggtttcttccaggtggggtcagacctgcacctgatcgagcccctggatgaaggtggcgagggcggacggcacgccgtgtaccaggctgagcacctgctgcagacggccgggacctgcggggtcagcgacgacagcctgggcagcctcctgggaccccggacggcagccgtcttcaggcctcggcccggggactctctgccatcccgagagacccgctacgtggagctgtatgtggtcgtggacaatgcagagttccagatgctggggagcgaagcagccgtgcgtcatcgggtgctggaggtggtgaatcacgtggacaagctatatcagaaactcaacttccgtgtggtcctggtgggcctggagatttggaatagtcaggacaggttccacgtcagccccgaccccagtgtcacactggagaacctcctgacctggcaggcacggcaacggacacggcggcacctgcatgacaacgtacagctcatcacgggtgtcgacttcaccgggactaccgtggggtttgccagggtgtccgccatgtgctcccacagctcaggggctgtgaaccaggaccacagcaagaaccccgtgggcgtggcctgtaccatggcccatgagatgggccacaacctgggcatggaccatgatgagaacgtccagggctgccgctgccaggaacgcttcgaggccggccgctgcatcatggcgggcagcattggctccagtttccccaggatgttcagtgactgcagccaggcctacctggagagctttttggagcggccgcagtcggtgtgcctcgccaacgcccctgacctcagccacctggtgggcggccccgtgtgtgggaacctgtttgtggagcgtggggagcagtgcgactgcggcccccccgaggactgccggaaccgctgctgcaactctaccacctgccagctggctgagggggcccagtgtgcgcacggtacctgctgccaggagtgcaaggtgaagccggctggtgagctgtgccgtcccaagaaggacatgtgtgacctcgaggagttctgtgacggccggcaccctgagtgcccggaagacgccttccaggagaacggcacgccctgctccgggggctactgctacaacggggcctgtcccacactggcccagcagtgccaggccttctgggggccaggtgggcaggctgccgaggagtcctgcttctcctatgacatcctaccaggctgcaaggccagccggtacagggctgacatgtgtggcgttctgcagtgcaagggtgggcagcagcccctggggcgtgccatctgcatcgtggatgtgtgccacgcgctcaccacagaggatggcactgcgtatgaaccagtgcccgagggcacccggtgtggaccagagaaggtttgctggaaaggacgttgccaggacttacacgtttacagatccagcaactgctctgcccagtgccacaaccatggggtgtgcaaccacaagcaggagtgccactgccacgcgggctgggccccgccccactgcgcgaagctgctgactgaggtgcacgcagcgtccgggagcctccccgtcttcgtggtggtggttctggtgctcctggcagttgtgctggtcaccctggcaggcatcatcgtctaccgcaaagcccggagccgcatcctgagcaggaacgtggctcccaagaccacaatggggcgctccaaccccctgttccaccaggctgccagccgcgtgccggccaagggcggggctccagccccatccaggggcccccaagagctggtccccaccacccacccgggccagcccgcccgacacccggcctcctcggtggctctgaagaggccgccccctgctcctccggtcactgtgtccagcccacccttcccagttcctgtctacacccggcaggcaccaaagcaggtcatcaagccaacgttcgcacccccagtgcccccagtcaaacccggggctggtgcggccaaccctggtccagctgagggtgctgttggcccaaaggttgccctgaagccccccatccagaggaagcaaggagccggagctcccacagcaccctaggggggcacctgcgcctgtgtggaaatttggagaagttgcggcagagaagccatgcgttccagcattccacggtccagctagtgccgctcagccctagaccctgactttgcaggctcagctgctgttctaacctcaggaatgcatctacctgagaggctcctgctgtccacgccctcagccaattccttctccccgccttggccacgtgtagccccagctgtctgcaggcaccaggctgggatgagctgtgtgcttgcgggtgcgtgtgtgtgtacgtgtctccaggtggccgctggtctcccgctgtgttcaggaggccacatatacagcccctcccagccacacctgcccctgctctggggcctgctgagccggctgccctgggcacccggttccaggcagcacagacgtggggcatccccagaaagactccatcccaggaccaggttcccctgcgtgctcttcgagagggtgtcagtgagcagactgcaccccaagctcccgactccaggtcccctgatcttggggcctgtttcccatgggattcaagagggacagccccagctttgtgtgtgtttaagcttaggaatcgcctttatggaaagggctatgtgggagagtcagctatcttgtctggttttcttgagacctcagatgtgtgttcagcagggctgaaagcttttattctttaataatgagaaatgtatattttactaataaattattgaccgagttctgtaaaaaaaaaaaaaaaa

SEQ ID NO: 1351 - DNA, 6924 bp, Homo Sapiens
  NM_001112
ctgaggcgctgaggcggccgtggcggcggcggcggcggcggcggcagcggcggccaagcggccaggttggcggccggggctccgggccgcgcgaggccacggccacgccgcgccgctgcgcacaaccaacgaggcagagcgccgcccggcgcgagactgcggccgaagcgtggggcgcgcgtgcggaggaccaggcgcggcgcggctgcggctgagagtggagcctttcaggctggcatggagagcttaaggggcaactgaaggagacacactggccaagcgcggagttctgcttacttcagtcctgctgagatactctctcagtccgctcgcaccgaaggaagctgccttgggatcagagcagacataaagctagaaaaatttcaagacagaaacagtctccgccagtcaagaaaccctcaaaagtattttgccatggatatagaagatgaagaaaacatgagttccagcagcactgatgtgaaggaaaaccgcaatctggacaacgtgtcccccaaggatggcagcacacctgggcctggcgagggctctcagctctccaatgggggtggtggtggccccggcagaaagcggcccctggaggagggcagcaatggccactccaagtaccgcctgaagaaaaggaggaaaacaccagggcccgtcctccccaagaacgccctgatgcagctgaatgagatcaagcctggtttgcagtacacactcctgtcccagactgggcccgtgcacgcgcctttgtttgtcatgtctgtggaggtgaatggccaggtttttgagggctctggtcccacaaagaaaaaggcaaaactccatgctgctgagaaggccttgaggtctttcgttcagtttcctaatgcctctgaggcccacctggccatggggaggaccctgtctgtcaacacggacttcacatctgaccaggccgacttccctgacacgctcttcaatggttttgaaactcctgacaaggcggagcctcccttttacgtgggctccaatggggatgactccttcagttccagcggggacctcagcttgtctgcttccccggtgcctgccagcctagcccagcctcctctccctgtcttaccaccattcccacccccgagtgggaagaatcccgtgatgatcttgaacgaactgcgcccaggactcaagtatgacttcctctccgagagcggggagagccatgccaagagcttcgtcatgtctgtggtcgtggatggtcagttctttgaaggctcggggagaaacaagaagcttgccaaggcccgggctgcgcagtctgccctggccgccatttttaacttgcacttggatcagacgccatctcgccagcctattcccagtgagggtcttcagctgcatttaccgcaggttttagctgacgctgtctcacgcctggtcctgggtaagtttggtgacctgaccgacaacttctcctcccctcacgctcgcagaaaagtgctggctggagtcgtcatgacaacaggcacagatgttaaagatgccaaggtgataagtgtttctacaggaacaaaatgtattaatggtgaatacatgagtgatcgtggccttgcattaaatgactgccatgcagaaataatatctcggagatccttgctcagatttctttatacacaacttgagctttacttaaataacaaagatgatcaaaaaagatccatctttcagaaatcagagcgaggggggtttaggctgaaggagaatgtccagtttcatctgtacatcagcacctctccctgtggagatgccagaatcttctcaccacatgagccaatcctggaagaaccagcagatagacacccaaatcgtaaagcaagaggacagctacggaccaaaatagagtctggtgaggggacgattccagtgcgctccaatgcgagcatccaaacgtgggacggggtgctgcaaggggagcggctgctcaccatgtcctgcagtgacaagattgcacgctggaacgtggtgggcatccagggatccctgctcagcattttcgtggagcccatttacttctcgagcatcatcctgggcagcctttaccacggggaccacctttccagggccatgtaccagcggatctccaacatagaggacctgccacctctctacaccctcaacaagcctttgctcagtggcatcagcaatgcagaagcacggcagccagggaaggcccccaacttcagtgtcaactggacggtaggcgactccgctattgaggtcatcaacgccacgactgggaaggatgagctgggccgcgcgtcccgcctgtgtaagcacgcgttgtactgtcgctggatgcgtgtgcacggcaaggttccctcccacttactacgctccaagattaccaagcccaacgtgtaccatgagtccaagctggcggcaaaggagtaccaggccgccaaggcgcgtctgttcacagccttcatcaaggcggggctgggggcctgggtggagaagcccaccgagcaggaccagttctcactcacgccctgacccgggcagacatgatggggggtgcagggggctgtgggcatccagcgtcatcctccagaacctcacatctgaactgggggcaggtgcataccttggggagggagtagggggacacgggggaccaccaggtgtccacggttgtccccagcatctcacatcagacctggggcaggtgcgcagtgtggggaggggatggggtgcgtcagggcccagcatcgccgcctggcatctctctgccgcagcatttccccttctgaaccgtccagtgactgctttcaatctcggtttacgtttagaaattgagttctactgagtagggcttccttaagtttaggaaaatagaaattactttgtgtgaaattcttgaataaataatttattcagagctaggaatgtggtttataaaataggaagtaattgtgtcaggtcacttttatgccacattattttaattgcaaaaaagcatctatatatggaggagggtgggaaaatagaggtaggaaatagtagcctaaaggaaatcgccacacgtctgtctaaacttaggtctcttttctccgtaggtacctccctgggtagttccacacactaggttgtaacagtctctccctgaggagcagactcccagcatggtgtagcgtggccctgtcatgcacatggggtcccgcagcagtgactgtgtgtcctgcagaggcgtgacccaggcccctgtagccctcagcctcctctagaagcttctgtactccttgtaggatcagatcatggaaaacttttctcagtttacttctaagtaatcacagataatacatggccagtaatcccaggctggccattcattcaggttttttaaaggatatttaacttttatggactagaaggaatcacgagggctactgcacaatacatggcctaagttccctctgttccttcctctgaatcgaatggatgtgggtgaccgcccgaaggccttcacaggatggaagtagaatgatttcagtagatactcattcttggaaaatgccatagttttaaattattgtttccagctttatcaaagacatgtttgaaaaataaaaagcatccaagtgagagctggtgagaccacgtgctgctggcgtagtgtaggccagacattgacagtcctgacgggagctcagggctgcccagcgcccagcgtgcacgggacggccccacgacagagggagtcagcccgggaggtcaggagcgcggcgggcgagggccctgtgtggaccacctccaccaagctcagagatttgcaccaggtgccttgttgcctccgctcaggatgaaagaggagctgagagaagtgctctgcctgccagtgcagtgcccagctccaaggctctagagggtgttcaggtgggtctcctggggccatggggagagattggtgcagaccttaccccacagcatacacctgccacagcgaaatccagggtgttggcacctgtgtgtccgtgatgagcctaggaaaccagagcaggggcagaggggcgtcatcctcccaccggacgctgggagctcagaccccaaaactgaaacaccgtggcttcggcggggggtgtgcctcctgatgtcaggagccccatccacgtgtgtccacacagatctcgtcgcagcacggcaggaaggggtgctgcttagggctcattgttggggacatgaccgggttcagcggctagaacatctgccccacagcagcctcctcctccaccgaagagggtagttgtctccctgaagcagtcacagcaggcgtctctgccgctccgtcaccacagtggggttttgttcaggcagatcgcgctggggttctgcacctgcagaaggagaggggtctgttgtcgctggctttcccccaagcaggctcttgcacactctagaaaaaacaccttgtaagtctgtgcatttttattgtcttgataaattgtatttttttctaatggggattgggagatggacttcgtttttaaaaatatgtggattttggttaccaagtttagtgttaatatattccatatacatacaaaactacccggtatgtctggcttttcccttctgtcaggtaatagctaaagtcagcatgattgctccctgtaccaccccaaataagtgagtgcctcaccttgtggggcctgagcagctaccttgagaccatgtgaggtggcacctttccggggtggactcgtgcggccttgaggacaggcacagggcaccctatcccaagccgtccaggcaggaggaaggcagccaaggcaactgggttctgggagccctgggtggggcagctgtggggaggaactgggttcggggagccctgggcggggcggctgttggggggaactgggttcggggtgccctgggcagggggctactggggggcggctgtgaggaggagttgggttcagggagccctgggcggggtggctgtcagggggaactgggttccgggagccctgggccggggcagggggcggctgtaggaaggaactggtttcggggagccctgggcggggcggctgtggggaggaaggtgacgtgcaggggaccagaggctctgcactgctcctaggacagctcatctgtaatcagaaaaaaaataaacaaaatacagaacgctgactcctccgtgagacagatcggggaccttagcactttaatccctcccttctgagcgctcggtgtgcacttttagactatagctgtttcattgacgtgtcactctccatccagtgtccttgatgtggcttttagagacttagcagaaaattcgacacaagcaggaacttgattttttaagaaaaaatattacattttgaggacattttgacaagtaggggaagagagggcttctgttgttttgttttgttttgttttgttaactaaacctgaagtattaattccacaaagacactgtccctcaggaccactcaggtacagctctgccagggacagagtcctgctagtgggaggtctcaggtggggcggtgtgttctgtgccatgaggcagcgacaggtccagatggatgtcgtcaccaccttcctcagctctcatcacctggtcgtacgccaggcccacctcttcccagcaagggacgccaaagaactgcagtttttattctgagtcttaatttaacttttcatcatcttttcctattttggagaattttttgtaattaaaagcaattattttaaaatgtgcaagccagtatctcacaaggcatggatttctgtggaatttatttttattcaaataaccatatttatctccaggctgtggaatcgccactttctttgtgaagacagtgtctctccttgtaatctcacacaggtacactgaggaggggacggctccgtcttcacattgtgcacagatctgaggatgggattagcgaagctgtggagactgcacatccggacctgcccatgtctcaaaacaaacacatgtacagtggctctttttccttctcaaacactttaccccagaagcaggtggtctgccccaggcataaagaaggaaaattggccatctttcccacctctaaattctgtaaaattatagacttgctcaaaagattcctttttatcatccccacgctgtgtaagtggaaagggcattgtgttccgtgtgtgtccagtttacagcgtctctgccccctagcgtgttttgtgacaatctccctgggtgaggagtgggtgcacccagccccgaggccagtggttgctcggggccttccgtgtgagttctagtgttcacttgatgccggggaatagaattagagaaaactctgacctgccgggttccagggactggtggaggtggatggcaggtccgactcgaccatgacttagttgtaagggtgtgtcggctttttcagtctcatgtgaaaatcctcctgtctctggcagcactgtctgcactttcttgtttactgtttgaagggacgagtaccaagccacaagaacacttcttttggccacagcataagctgatggtatgtaaggaaccgatgggccattaaacatgaactgaacggttaaaagcacagtctatggaacgctaatggagtcagcccctaaagctgtttgctttttcaggctttggattacatgcttttaatttgattttagaatctggacactttctatgaatgtaattcggctgagaaacatgttgctgagatgcaatcctcagtgttctctgtatgtaaatctgtgtatacaccacacgttacaactgcatgagcttcctctcgcacaagaccagctggaactgagcatgagacgctgtcaaatacagacaaaggatttgagatgttctcaataaaaagaaaatgtttcactactcaaaaaaaaaaaaaaaaa

SEQ ID NO: 1352 - DNA, 6138 bp, Homo Sapiens
  NM_001114
agctgaggaactgcgtgtggagtcagcccagtctggatgcacaggaggatgctggcggcacagtgagtgaggcctggtgccagagctgtgcggaccccttgttggccatggagcagcaggcccagaggccctctccccagccctgcttgcctgcctcggagaggacagaggcctaggcccacgggggagggtgttggcagacagatgccctccaggccctggggcctccttaacggccccttaacgacacgcgtgccaagggtggaggatgccagccaaggggcgctacttcctcaacgagggcgaggagggccctgaccaagatgcgctctacgagaagtaccagctcaccagccagcatgggccgctgctgctcacgctcctgctggtggccgccactgcctgcgtggccctcatcatcattgccttcagccagggggacccctccagacaccaggccattctgggcatggcgttcctggtgctggcggtgtttgcggccctctctgtgctgatgtacgtcgagtgtctcctgcggcgctggctcagggccttggcgctgctcacctgggcctgcttggtggcgctgggctatgtgctggtgttcgacgcatggacaaaggcggcctgtgcgtgggagcaggtgcccttcttcctgttcattgtcttcgtggtgtacacactactgcccttcagcatgcggggcgctgtcgccgttggggccgtctccactgcctcccacctcctggtgctcggttctttgatgggaggcttcacgacacccagtgtccgggtggggctgcagctgctggccaacgcagtcatcttcctgtgtgggaacctgacaggcgccttccacaagcaccaaatgcaggatgcatcccgggacctcttcacctacactgtgaagtgcatccagatccgccggaagctgcgcatcgagaagcgccagcaggagaacctgctgctgtcagtgcttccggcccacatctccatgggcatgaagctggccatcatcgaacggctcaaggagcatggtgaccgtcgctgcatgcctgacaacaacttccacagcctctacgtcaagaggcaccagaatgtcagcatcctctatgcggacatcgtgggcttcacgcagctggccagcgactgttctcccaaggagctggtggtggtgctgaatgagctctttggcaagttcgaccagatcgccaaggccaacgagtgcatgcgaatcaagatcctcggcgactgctactactgtgtatcgggcctgcccgtgtcgctgcctacccacgcccggaactgcgtgaagatggggctggacatgtgccaggccatcaagcaggtgcgggaggccacgggcgtggacatcaacatgcgtgtgggcatacactcggggaatgtgctgtgcggggtcatcgggctgcgcaagtggcagtatgacgtgtggtcccacgacgtgtccctggccaaccggatggaggcagccggagtacccggccgggtgcacatcacggaggccacgctaaagcacctggacaaggcgtacgaggtggaggatgggcacgggcagcagcgggacccctacctcaaggagatgaacatccgcacctacctggtcatcgacccccggagccagcagccacccccgcccagccaacacctccccaggcccaagggggacgcggccctgaagatgcgggcgtcagtgcgcatgacccggtacctcgagtcctggggggcggcacggccctttgcacatctcaaccaccgtgagagcgtgagcagtggtgagacccacgtccccaacgggcggaggcctaagagcgttccccagcgccaccgccggaccccagacagaagcatgtcccccaaggggcggtcggaggatgactcgtacgatgacgagatgctgtcagccattgaggggctcagctccacgaggccctgctgctccaagtccgatgacttctacacctttgggtccatcttcctggagaagggctttgagcgcgagtaccgcctggcacccatcccccgggcccgccacgactttgcctgcgccagcctgatcttcgtctgcatcctgctcgtccatgtcctgctcatgcccaggacggcggcactgggtgtgtccttcgggctggtggcctgtgtactggggctggtgctgggcctgtgctttgccaccaagttctcgaggtgctgcccagctcgggggacgctctgcactatctctgagagggtggagacacagcccctgctgaggctgaccctggccgtcctgaccatcggcagcctgctcactgtggccatcatcaacctgcccctgatgcctttccaagttccagagctgcctgttggcaatgagacaggcctactggccgcgagcagcaagacaagagccctgtgtgagcccctcccgtactacacctgcagctgtgtcctgggcttcatcgcctgctcggtcttcctgaggatgagcctggagccaaaggttgtgctgctgacagtggccctggtggcctacctggtgctcttcaacctctccccatgctggcagtgggactgctgcggccaaggcctgggcaacctcaccaagcccaacggcaccaccagtggcacccctagctgttcctggaaggacctgaagaccatgaccaatttctacctggtcctgttctacatcaccctgcttacactctccagacagattgactattactgccgcttggactgcctatggaagaagaagttcaagaaggagcacgaggagtttgagaccatggagaacgtgaaccgccttcttctggagaacgtcctgccagcccacgtggctgcccactttatcggtgacaagttaaacgaggactggtaccatcagtcctatgactgcgtctgtgtcatgtttgcctccgtgccggacttcaaagtgttctacacagagtgcgatgtcaacaaagaagggctggagtgcctacgcctgctcaatgagatcattgccgacttcgacgagctcctactgaagcccaagttcagcggcgtggagaagatcaagaccatcggcagcacgtacatggcagctgcagggctcagcgtcgcctcagggcacgagaaccaggagctggagcggcagcatgcccacattggtgtcatggtggagttcagcatcgccctgatgagtaagctggacggcatcaacaggcactccttcaactccttccgcctccgcgtcggcataaaccatgggcctgtgattgctggagtgattggggcccgaaaacctcagtatgacatctggggaaacactgtcaatgtggccagccgaatggaaagcactggagaacttgggaaaatccaggttaccgaggagacctgcaccatcctccagggcctcgggtactcttgtgaatgccgtggcctgatcaacgtcaaaggcaaaggcgagctgaggacttactttgtctgtacggacactgccaagtttcaggggctggggctgaactgagggctcctgctggattccgaaaaggccgggaagccagtctccttccctgaagcaagcccaggagaagactctccgccccacgccaatcccaaaggcatgcagatggctgtgcatgttggcttctttggacctgcactggaggatttctcagacacatgcaccagattctggctcgaagcagccactgagccataatgcgcaggggaggccagaagctctgtgcctggtctgtaacagtttccaggccagctggagaatgttcactggttcggggctgactttgagatctttgttccctgaggtgccaggcaggcaactttagcacatgatgaaaacagacttccacctcagtggcctgtgggcacgcacaagtgaggtctgtttttctagacaccaagggggagtaagctgagctgtctagcacggattggagactccctctccctggtgggcctggcaatgacagcatttctcacagaggcattctggtaaatgaagctgaaaggggtgttttacatctgtaaacggtttcaaacaggtagagagaaaaacaccacaattaacactgttactttttgccttgtctggcatgtttgttttaaatgaatacattaatggggtttttatccttttgaatgacttttcagacactagacataaatctcttccctccagtgtatgctctgcctttttaaccactgacatgtaaggaggactactgtctagcatcagcttatggggtcagctggctgtggggatagagtcctgaggaatgtggtcacagcaagaaggcggggagcagcagagccttgcctttgaatgaggcagcttgtgaggcaagcattctggagagaggtgctttgaaagtaaggtgcggcctttcacctcttccttgattactcacacatctttgcgttctcccctgccgtccttcaactgtatcttacttttcttaccagaaaggaatggagtctgtttagagacaacttggacaacctgtgagtgcatctcttctttcctttagtcttcacagctaactctggagagcttcaaaactagaaggatctactccgcatgggtgcatgcagaggctcctggatctgggaagcccgccccctcacaaatgctgagccgttcttgctctgaaactgcgtgagtcaaggcaaatgcaaaaagccaggttttggggatgtgtcttactgtgcttcaacttcccaaggaattgaaagtcaacctaactgtaacaacagggtgagaaatgaccaaactgcccgtgactttttctgaatggacttcataaccggaagacttaaccggtggcctcatcaccagagcatcgccaggatttctaatgcactcagtttccctacatagcagggattcttagctaggtgtccccatgaaccccgtaaagttctacacaaagtcttgcatacaggagcctttacaagatgattatacagggttgcagattgggtgactgaccagacttgttggggtcctgggatgagttgccccgggctgcaaattaagagtacagctaagtgcgggggtggcggtggagggaacgaaaattgaacctgtctgcctgtgctgtgtcgtgtggctttatcagcccgaggaagggcaggtgtattctaatttgcacaaaggtgctgggtagactagtggcagctctcatgtgctgcacataagtggaatcagtatgaatagaagaacttgctgtataaaggaatttcatggcaacaatgctggtaagggcaattagcctcgcttaagttgccttttttacacaccaaaactttttacatgaagggctggtttcacatgaatactatactgaaatctgtgctctcaagatctagcagtgaccagggctgcccggcgggggctctcctggcaagtcaggaaggtttctgttgctaatataacatagaaacacattagtgcactgggcctctctgaggtcagcatatttgtactcttggaatatttgtttttttcttcagtaacaacagaaaccccagttgggagtttaacaaataactgactaccactcactcatgcatttttatttccaattaaagcaaagcactgtgctgtgctcagataataatagtttgtaagtaaaagtttttagttttcagtgttcaggttatagaatataactgaccataaaaattacctgcaggtattttctttttatgaacttgtttttaaattaccaagtaattactggtgtcattttgttttatgacagacacacgtatctaacaaacaaacaaacagtgaccttctccatgggtcaaggacttccttacaatttctcctgagttaacttttgtgaaaataatacctaaggttttctggcttattgaggaaatttcctaacaaacaaacaaacaaacaaacagaagagaagatcattaaccactgtatactttgtgtatataataggtcagtgtaaagaaatatgatttgaggtggtgcatgcaagtaactagggtttattctatataatgaatatttatagatctgtaacatttgtttcaaaatgctgtttcatttttataaagtaccagtgtttagctgctttttatacattaaattagcaatttgaaaaactc

SEQ ID NO: 1353 - DNA, 7741 bp, Homo Sapiens
  NM_001116
gcggccgcggcgggagcggcggcgcactcggggggaagcaggccccactagacgggccgcgccgacgggctccgcgcactcgcagcccggggcgcccccacccccagcgcccgccgccgcgggcagggccggcccggagcgcggggggcggccggggagcgcgagccgggggcgcccgccgaagctcgctgctccgggtcggggtccgggcccggggccggccgcgcgccgcctttgacgcatcggagcgcggctcctgcaggatggagggctccgcgccgccagcggagttgtttgtgcgcaggcggctcgcggggctgggagcgctcaaggtctgaacttccctccggagccgcagctggaggaggcgagcgcgcgaggaggagaagccgcgcggcgcggaggccaccctcggggcgagaggcgcggaaggcgagcgagcaaagcggtcccggagccacggcggccacgcggcggggacccccgggcgttctaggtactggtgaccccggccggggcaggccccgggactcgacaacatggcttccccaccccaccagcagctgctgcatcaccacagcaccgaggtgagctgcgactccagcggggacagcaacagcgtgcgcgtcaagatcaaccccaagcagctgtcctccaacagccaccccaagcactgcaaatacagcatctcctctagctgcagcagctctggggactccgggggcgtcccccggcgagtgggcggcggaggccggctgcgcaggcagaagaagctgccccagctgttcgagagggcctccagccgctggtgggaccccaagttcgactcggtgaacctggaggaggcctgcctggagcgctgcttcccgcagacccagcgccggttccggtatgcgctcttctacatcggcttcgcctgccttctgtggagcatctattttgcggtccacatgagatccagactgatcgtcatggtcgcccccgcgctgtgcttcctcctggtgtgtgtgggcttctttctgtttaccttcaccaagctgtacgcccggcattacgcgtggacctcgctggctctcaccctgctggtgttcgccctgaccctggctgcgcagttccaggtcttgacgcctgtctcaggacgcggcgacagctccaaccttacggccacagcccggcccacagatacttgcttatctcaagtggggagcttctccatgtgcatcgaagtgctctttttgctctataccgtcatgcacttacctttgtacctgagtttgtgtctgggggtggcctactctgtccttttcgagacctttggctaccatttccgggatgaagcctgcttcccctcgcccggagccggggccctgcactgggagctgctgagcagggggctgctccacggctgcatccacgccatcggggtccacctgttcgtcatgtcccaggtgaggtccaggagcaccttcctcaaggtggggcaatccattatgcacgggaaggacctggaagtggaaaaagccctcaaagagaggatgattcattccgtgatgccaagaatcatagccgatgacttaatgaagcagggagatgaggagagtgagaattctgtcaagaggcatgccacctcgagccccaagaacaggaagaaaaagtcttccatccaaaaagctcctatagccttccgcccttttaagatgcagcagatcgaagaagtcagtattttatttgcagatatcgtgggcttcaccaagatgagtgccaacaagtctgcccacgccctggtgggtctcctgaacgatctgttcggtcgcttcgaccgcctgtgtgaggagaccaagtgtgagaaaatcagcaccctgggagactgttactactgcgtggcgggctgtcccgagccccgggccgaccatgcctactgctgcatcgagatgggcctgggcatgatcaaggccatcgagcagttctgccaggagaagaaggagatggtgaacatgagagtcggggtgcacacgggcaccgtcctttgcggcatcctgggcatgaggaggtttaaatttgacgtgtggtccaacgatgtgaacctggccaatctcatggagcagctgggagtggccggcaaagttcacatttctgaggccaccgcaaaatacttagatgaccggtacgaaatggaagatgggaaagttattgaacggctgggccagagcgtggttgctgaccagttgaaaggtttgaagacatacctgatatcgggtcagagagccaaggagtctcgctgcagctgtgcagaggccttgctttctggctttgaggtcattgacggctcacaggtgtcctcaggccctaggggacaggggacagcgtcatcagggaatgtcagtgacttggcgcagactgtcaaaacctttgataaccttaagacctgcccttcgtgcggaatcacatttgctcccaaatctgaagccggcgccgagggaggagcacctcaaaacggctgccaagacgagcataaaaacagcaccaaggcttctggaggacctaatcccaaaactcagaacgggctcctcagccctccccaagaggagaagctcaccaacagtcagacttctctgtgtgagatcttgcaggagaagggaaggtgggcaggggtgagcctggaccagtcggctctccttccgctgaggttcaagaacatccgggagaaaacggacgcccactttgtggacgttatcaaagaagacagcctgatgaaagattacttttttaagccgcccattaatcagttcagcctgaacttcctggatcaggagctggagcgatcctacaggaccagctatcaggaagaggtcataaagaactcccccgtgaagacgtttgctagtcccaccttcagctccctcctggatgtgtttctgtcgaccacagtgtttctgacgctgtccaccacctgcttcctgaagtacgaggcggccaccgtgcctcccccgcccgccgccctggcggtcttcagtgcagccctgctgctggaggtgctgtccctcgcggtgtccatcaggatggtgttcttcctggaggacgtcatggcctgcaccaagcgcctgctggagtggatcgccggctggctaccacgtcactgcatcggggccatcctggtgtcgcttcccgcactggccgtctactcccatgtcacctccgaatatgagaccaacatacacttcccagtgttcacaggctcggccgcgctgattgccgtcgtgcactactgtaacttctgccagctcagctcctggatgaggtcctccctcgccaccgtcgtgggggccgggccgctgctcctgctctacgtctccctgtgcccagacagttctgtattaacttcgccccttgacgcagtacagaatttcagttccgagaggaacccgtgcaatagttcggtgccgcgtgacctccggcggcccgccagcctcatcggccaggaggtggttctcgtcttctttctcctgctcttgttggtctggttcctgaatcgcgaatttgaagtcagctaccgcctccactaccacggagacgtggaagcggatcttcaccgcaccaagatccagagcatgcgggaccaggcagactggctgctgaggaacatcatcccctaccacgtggctgagcagctgaaggtgtcccagacctactccaagaaccatgacagcggaggggtgatcttcgccagcatcgtcaacttcagcgagttctacgaggagaactacgagggcggcaaggagtgctaccgggtcctcaacgagctcatcggggactttgacgagctcctaagcaagccggactacagcagcatcgagaagatcaagaccatcggagccacgtacatggcggcgtcagggctgaacaccgcgcaggcccaggacggcagccacccgcaggagcacctgcagatcctgttcgagttcgccaaggagatgatgcgcgtggtggacgacttcaacaacaacatgctgtggttcaacttcaagctccgcgtcggcttcaaccatgggcccctcacggccggggtcatcggcaccaccaagctgctgtacgacatctggggagacaccgtcaacatcgccagcaggatggacaccaccggcgtggagtgccgcatccaggtgagcgaagagagctaccgcgtcttgagcaagatgggctatgacttcgactacagagggaccgtgaatgtcaaggggaaaggccagatgaagacctacctgtacccaaagtgcacggatcacagggtcatcccacagcaccagctgtccatctccccagacatccgcgtccaggtggatggcagcatcggacggtctcccacagacgagattgccaacctggtgccttctgtccagtatgtggacaagacatctctgggttctgacagcagcacgcaggccaaggatgcccacctgtcccccaagagaccgtggaaggagcccgtcaaagccgaagaaaggggtcgatttggcaaagccatagagaaagacgactgtgacgaaacaggaatagaagaagccaacgaactcaccaagctcaacgtttcaaagagtgtgtgaggcggcgcccacccgctgcccgaggtgctctgtttgtcgaaacacagtaatatttgtatttggctgttgtgctttccaagcgccacagttgccctccccggacgtggtgttatgtggtcatttcagccctaacttctgtgtggatcacagttattcagggttcattttcatccattcttccctttcgctcccttccctggaaaccccgctgcctctgggtcatccgttcagcacgtggtggagaacaagtgccttcagggctggcctcggcctcgagtctcgggacagaggccgccagtggagatcatggctttgggtattatttgacttttagaacaaaagctgtggttaagatctcatttttattgctttttcccacgtcccacgagacactattttcggttctctggctaataccctgtttttgagtttattttgtttctgtctatgtcacagtgttcctctacgacccgacctctctatgtaagcacacatgcgcacacacacttgcattcatgaatctgatataaagtgccagtaatccgccaagagggggtgcgaagggggcatgtcacgacagctccgccaccccccattgcccacccgcactttcccgagcaccgcgccccgtgggctgtgggtgagccgcgctccctgcactgagcgggtttaggggctcgcccacatgcatgcaggccaagacagcaaatgccagccgggcacgacgcccgtgtgcccaggcctcgggggtctcagagccgcctctcacccccgaccctccacccaggggtctccccatcgggagtggaggtgttggtcctggaagctgactcatcggagagggaaataccaaataaacatccgaggttgcatttatttatttatttatttacccggaagcatgtgcgctcccgggaggggtgctgggtcctcagggtggggggtcatagccacaggggagggcagttcccaggaaggtaaccagatgtctcttttgtgttttggccacctggggccgcccccaacctccccaccccaagaggggtctgagtgggacctcaaagcatggccagtgcaattctgaggctaggggaataggagaagcccaccagctgcccctgccacccacgggggctcctccctgccggggtccagctcagaaccacgggggtctgtgccggcagcaccggtgccatcttggcttccacaaattccagaagtttcttggctgcctcccgctctcagatggcacagggcctatcagtggcaggatttaatctggggagcaaattccagctctgaaatggagttctcacaccgtatctagggacagaggcatctggatgcaaacgcggggtttgttaggggcggaatcccgagggtggtgtgggggagctccgtccgggcagttggctgctggtcctgtctgattatgttttgccatattgagtctgaagtttgtgtggaagtgagctcgcccgagttgtccggtcggagttgtagccagtctttcaggggaccccgggacgctgatgaggcccagggtgcactccttgtcagtcttgcccgttgtccctgtgcattttgctttccgctgtcaaatctcactgtctcgttttcacaccgcatcagtccccatcatcactactcctccccagagacatacagattgccctccccggcatgaagaagtcacaattctgacccgccacctctccaggggcggtgcctgggatggccacccatcaggacagccagagccagggtcccggcgtcctgagagtccagggcacctccccccattagctgtaaggtttcctgtcaggtgtgactgtcagtttgctggtcttccaataccgaagaaagggtggttgtgacaatacctcttgcttctaaagaatgtattataaaacaccgcagatttttttttttccttaaaaaacactacctgatgctttccttgttcgtggggattgtggtcacatgaagctctttctgcatcagtattaaggtgtatatttgaatgtcctcccctcccctttcccctccaggctgtgtagctttgaggggctgggcgtttgctcacgaccttgctgtctcgctcagaacatgctccgcaaagttctccgcacacacttcttccccatcaagcccatttccttccccaaccacaaaggtgtttgtgattcctcaccccgggaaaccaaggagctgcaaagtggagtctggttcagccccgtgcagactcacccagagcttaacgttgtctttcaaacaccctgagccttcctaaacagccagtgcagacgttctctctgggccacgaagcccctcgggtcctccccgtcccctgctccgatgcatacctcagtgcagaaccacagaatctctgcagcggaaacgccgtgcatctcttgtctgttggcagcgagcacatcgtgctggagacacgagtttctaagcagctggcacgagggctgctgacggcatgggtcgtgcttcagggtggcaatacctcttaggaacttagggcaggaagcaatacttcagcattgaatgtgtgtaaatagttgctttgagttgcaattgctattttcttctcagtcccagctcagatcgaattatatatccatatatatatatatatatatatatatatatatatatatatatatatggtaaacaagcacacacaattttatccaatgcaaacaaatgtagagcatcagttacaaaaccctcgaatagcttgagagccccacaggctctgccacacccgtgacttcatccacactgacgtcacccgcgggggctccccctgcacatttgcacacgatccggagagccgaaggccgcgtgcttcctgtcacatgggctgtaatcatttgtagtttccaaagacacgtctgcatttgaatttctagattttcgaggtaaggagttttttttaattggttgtttggaaaatcacatcatgcctagaatctgaaattgaattagcaagaaccgactgtttgcattttccatatatccttttatctgctctttttaaattgttaattctaataatttcaaaatgcattcactgaagaaatggacattaaaatattctaaaatttaaatataaaaaaaaaaaaaaa

SEQ ID NO: 1354 - DNA, 2288 bp, Homo Sapiens
  NM_001123
cggccatttttggggcgggcacccaatctctcgccctgtaaactgcggggtgacgggacgctgttactaggactcaagatggccaccgcgcccgctagtcatctcgctagcccgcgcgccagtgagctggcacgagacacgcggtggcccacggcgtctggggacgatctccagcccttcgcacggggcggagcgcccgccttccctccaatcagcacgccgggccggctagccaggggccgcccgcgcgcggggtgtgtgaggacgcgctcccagtcgctgagtgcctgagccgggaagcagttgctgtggtacctgctgctgcccgagcggacgtagagcatcggacgcgggcgccgtggcgctgggcaggagggcgaagccatgacgtcagtcagagaaaatattctctttggaatgggaaatcctctgcttgacatctctgctgtagtggacaaagatttccttgataagtattctctgaaaccaaatgaccaaatcttggctgaagacaaacacaaggaactgtttgatgaacttgtgaaaaaattcaaagtcgaatatcatgctggtggctctacccagaattcaattaaagtggctcagtggatgattcaacagccacacaaagcagcaacattttttggatgcattgggatagataaatttggggagatcctgaagagaaaagctgctgaagcccatgtggatgctcattactacgagcagaatgagcagccaacaggaacttgtgctgcatgcatcactggtgacaacaggtccctcatagctaatcttgctgctgccaattgttataaaaaggaaaaacatcttgatctggagaaaaactggatgttggtagaaaaagcaagagtttgttatatagcaggcttttttcttacagtttccccagagtcagtattaaaggtggctcaccatgcttctgaaaacaacaggattttcactttgaatctatctgcaccgtttattagccagttctacaaggaatcattgatgaaagttatgccttatgttgatatactttttggaaatgagacagaagctgccacttttgctagagagcaaggctttgagactaaagacattaaagagatagccaaaaagacacaagccctgccaaagatgaactcaaagaggcagcgaatcgtgatcttcacccaagggagagatgacactataatggctacagaaagtgaagtcactgcttttgctgtcttggatcaagaccagaaagaaattattgataccaatggagctggagatgcatttgttggaggttttctgtctcaactggtctctgacaagcctctgactgaatgtatccgtgctggccactatgcagcaagcatcataattagacggactggctgcacctttcctgagaagccagacttccactgatggaagagctgaaaacacaagcccaggagtgcagacactgccctaattgcttcctgagaattcccatattaataaagaagaaaattatctgccattttttcctactataataatgctgaatcttaatttagagggtacaagggtatggtaatgcttgtagaatctttattatctcaacaatctaaaaaatgatgtttatttccatagtttgatagtgccacttaaatgccaattaaacaagaatataacatttcaatagaaatttttatttcattttcaattactttgtaaattcgtgtgtatttagtacactgatttgtttttttacatttctgctttgaatgcagatgcaatttaatataatagattttttaatgaattaatcttaacatagtaatctttagctttttatacaaatatatttaatttaggagtatatgtgtgtctatacacacacatacataaatataccacatatacacctgatagtcaaataaggtacagaaattttatcttgtcaattatgccaaataatctctttaatgtgcactcaaacatgtaataaactttggataattaaataatgtgccaaatttaagttgtaccacaatattcaaatcatagtcttatggaactctgtaattggacacaaacaaaaacttgtcatataggaatttttttctgtcttttccctgtgtacagcaaactgaggaagaaagatcattatttaatactgggccctgaaatgacacccaatttgttaatggaattatgaagaacagcaatataatacactgaagaataacttagtatcagagaccaataaatcacttttttaaggatgacaaaatggtataaaaaaaaaa

SEQ ID NO: 1355 - DNA, 1449 bp, Homo Sapiens
  NM_001124
ctggatagaacagctcaagccttgccacttcgggcttctcactgcagctgggcttggacttcggagttttgccattgccagtgggacgtctgagactttctccttcaagtacttggcagatcactctcttagcagggtctgcgcttcgcagccgggatgaagctggtttccgtcgccctgatgtacctgggttcgctcgccttcctaggcgctgacaccgctcggttggatgtcgcgtcggagtttcgaaagaagtggaataagtgggctctgagtcgtgggaagagggaactgcggatgtccagcagctaccccaccgggctcgctgacgtgaaggccgggcctgcccagacccttattcggccccaggacatgaagggtgcctctcgaagccccgaagacagcagtccggatgccgcccgcatccgagtcaagcgctaccgccagagcatgaacaacttccagggcctccggagctttggctgccgcttcgggacgtgcacggtgcagaagctggcacaccagatctaccagttcacagataaggacaaggacaacgtcgcccccaggagcaagatcagcccccagggctacggccgccggcgccggcgctccctgcccgaggccggcccgggtcggactctggtgtcttctaagccacaagcacacggggctccagcccccccgagtggaagtgctccccactttctttaggatttaggcgcccatggtacaaggaatagtcgcgcaagcatcccgctggtgcctcccgggacgaaggacttcccgagcggtgtggggaccgggctctgacagccctgcggagaccctgagtccgggaggcaccgtccggcggcgagctctggctttgcaagggcccctccttctgggggcttcgcttccttagccttgctcaggtgcaagtgccccagggggcggggtgcagaagaatccgagtgtttgccaggcttaaggagaggagaaactgagaaatgaatgctgagacccccggagcaggggtctgagccacagccgtgctcgcccacaaactgatttctcacggcgtgtcaccccaccagggcgcaagcctcactattacttgaactttccaaaacctaaagaggaaaagtgcaatgcgtgttgtacatacagaggtaactatcaatatttaagtttgttgctgtcaagattttttttgtaacttcaaatatagagatatttttgtacgttatatattgtattaagggcattttaaaagcaattatattgtcctcccctattttaagacgtgaatgtctcagcgaggtgtaaagttgttcgccgcgtggaatgtgagtgtgtttgtgtgcatgaaagagaaagactgattacctcctgtgtggaagaaggaaacaccgagtctctgtataatctatttacataaaatgggtgatatgcgaacagcaaacc

SEQ ID NO: 1356 - DNA, 4125 bp, Homo Sapiens
  NM_001129
cggctatccgcgcgggagtgcgccacgcggggccggagcgcctattagccgccaggacctcggagcgccccgaccacccctgagcccctctggcttcggagccccccagcaccccttcccgggtcccctcgcccaccctaatccactctccctccctttcccggattccctcgctcaccccatcctctctcccgccccttcctggattccctcacccgtctcgatcccctctccgccctttcccagagacccagagcccctgaccccccgcgccctccccggagccccccgcgcgtgccgcggccatggcggccgtgcgcggggcgcccctgctcagctgcctcctggcgttgctggccctgtgccctggagggcgcccgcagacggtgctgaccgacgacgagatcgaggagttcctcgagggcttcctgtcagagctagaacctgagccccgggaggacgacgtggaggccccgccgcctcccgagcccaccccgcgggtccgaaaagcccaggcggggggcaagccagggaagcggccagggacggccgcagaagtgcctccggaaaagaccaaagacaaagggaagaaaggcaagaaagacaaaggccccaaggtgcccaaggagtccttggaggggtcccccaggccgcccaagaaggggaaggagaagccacccaaggccaccaagaagcccaaggagaagccacctaaggccaccaagaagcccaaggagaagccacccaaggccaccaagaagcccaaagagaagccacccaaggccaccaagaagcccccgtcagggaagaggccccccattctggctccctcagaaaccctggagtggccactgcccccaccccccagccctggccccgaggagctaccccaggagggaggggcgcccctctcaaataactggcagaatccaggagaggagacccatgtggaggcacgggagcaccagcctgagccggaggaggagaccgagcaacccacactggactacaatgaccagatcgagagggaggactatgaggactttgagtacattcggcgccagaagcaacccaggccacccccaagcagaaggaggaggcccgagcgggtctggccagagccccctgaggagaaggccccggccccagccccggaggagaggattgagcctcctgtgaagcctctgctgcccccgctgccccctgactatggtgatggttacgtgatccccaactacgatgacatggactattactttgggcctcctccgccccagaagcccgatgctgagcgccagacggacgaagagaaggaggagctgaagaaacccaaaaaggaggacagcagccccaaggaggagaccgacaagtgggcagtggagaagggcaaggaccacaaagagccccgaaagggcgaggagttggaggaggagtggacgcctacggagaaagtcaagtgtccccccattgggatggagtcacaccgtattgaggacaaccagatccgagcctcctccatgctgcgccacggcctgggggcacagcgcggccggctcaacatgcagaccggtgccactgaggacgactactatgatggtgcgtggtgtgccgaggacgatgccaggacccagtggatagaggtggacaccaggaggactacccggttcacaggcgtcatcacccagggcagagactccagcatccatgacgattttgtgaccaccttcttcgtgggcttcagcaatgacagccagacatgggtgatgtacaccaacggctatgaggaaatgacctttcatgggaacgtggacaaggacacacccgtgctgagtgagctcccagagccggtggtggctcgtttcatccgcatctacccactcacctggaatggcagcctgtgcatgcgcctggaggtgctggggtgctctgtggcccctgtctacagctactacgcacagaatgaggtggtggccaccgatgacctggatttccggcaccacagctacaaggacatgcgccagctcatgaaggtggtgaacgaggagtgccccaccatcacccgcacttacagcctgggcaagagctcacgaggcctcaagatctatgccatggagatctcagacaaccctggggagcatgaactgggggagcccgagttccgctacactgctgggatccatggcaacgaggtgctgggccgagagctgttgctgctgctcatgcagtacctgtgccgagagtaccgcgatgggaacccacgtgtgcgcagcctggtgcaggacacacgcatccacctggtgccctcactgaaccctgatggctacgaggtggcagcgcagatgggctcagagtttgggaactgggcgctgggactgtggactgaggagggctttgacatctttgaagatttcccggatctcaactctgtgctctggggagctgaggagaggaaatgggtcccctaccgggtccccaacaataacttgcccatccctgaacgctacctttcgccagatgccacggtatccacggaggtccgggccatcattgcctggatggagaagaaccccttcgtgctgggagcaaatctgaacggcggcgagcggctagtatcctacccctacgatatggcccgcacgcctacccaggagcagctgctggccgcagccatggcagcagcccggggggaggatgaggacgaggtctccgaggcccaggagactccagaccacgccatcttccggtggcttgccatctccttcgcctccgcacacctcaccttgaccgagccctaccgcggaggctgccaagcccaggactacaccggcggcatgggcatcgtcaacggggccaagtggaacccccggaccgggactatcaatgacttcagttacctgcataccaactgcctggagctctccttctacctgggctgtgacaagttccctcatgagagtgagctgccccgcgagtgggagaacaacaaggaggcgctgctcaccttcatggagcaggtgcaccgcggcattaagggggtggtgacggacgagcaaggcatccccattgccaacgccaccatctctgtgagtggcattaatcacggcgtgaagacagccagtggtggtgattactggcgaatcttgaacccgggtgagtaccgcgtgacagcccacgcggagggctacaccccgagcgccaagacctgcaatgttgactatgacatcggggccactcagtgcaacttcatcctggctcgctccaactggaagcgcatccgggagatcatggccatgaacgggaaccggcctatcccacacatagacccatcgcgccctatgaccccccaacagcgacgcctgcagcagcgacgcctacaacaccgcctgcggcttcgggcacagatgcggctgcggcgcctcaacgccaccaccaccctaggcccccacactgtgcctcccacgctgccccctgcccctgccaccaccctgagcactaccatagagccctggggcctcataccgccaaccaccgctggctgggaggagtcggagactgagacctacacagaggtggtgacagagtttgggaccgaggtggagcccgagtttgggaccaaggtggagcccgagtttgagacccagttggagcctgagtttgagacccagctggaacccgagtttgaggaagaggaggaggaggagaaagaggaggagatagccactggccaggcattccccttcacaacagtagagacctacacagtgaactttggggacttctgagatcagcgtcctaccaagaccccagcccaactcaagctacagcagcagcacttcccaagcctgctgaccacagtcacatcacccatcagcacatggaaggcccctggtatggacactgaaaggaagggctggtcctgcccctttgagggggtgcaaacatgactgggacctaagagccagaggctgtgtagaggctcctgctccacctgccagtctcgtaagagatggggttgctgcagtgttggagtaggggcagagggagggagccaaggtcactccaataaaacaagctcatggcaaaaaaaaaaaaaaaaaaaaaaaaaaaaaaaaaaaaaaaaaaaaa

SEQ ID NO: 1357 - DNA, 1687 bp, Homo Sapiens
  NM_001130
cgggcgcgcggggagggggcgcaggaagcgggcgaggccgggcgcgggaggcggcggcggccccgggagctgccgatcggcgccgggacaaaggcgcggccgcccggcgcccccagcagcccgagccggggcgcacagccggggcgcagcccgcgccccccgccgcgattgacatgatgtttccacaaagcaggcattcgggctcctcgcacctaccccagcaactcaaattcaccacctcggactcctgcgaccgcatcaaagacgaatttcagctactgcaagctcagtaccacagcctcaagctcgaatgtgacaagttggccagtgagaagtcagagatgcagcgtcactatgtgatgtactacgagatgtcctacggcttgaacatcgagatgcacaaacaggctgagatcgtcaaaaggctgaacgggatttgtgcccaggtcctgccctacctctcccaagagcaccagcagcaggtcttgggagccattgagagggccaagcaggtcaccgctcccgagctgaactctatcatccgacagcagctccaagcccaccagctgtcccagctgcaggccctggccctgcccttgaccccactacccgtggggctgcagccgccttcgctgccggcggtcagcgcaggcaccggcctcctctcgctgtccgcgctgggttcccaggcccacctctccaaggaagacaagaacgggcacgatggtgacacccaccaggaggatgatggcgagaagtcggattagcagggggccgggacagggaggttgggaggggggacagaggggagacagaggcacggagagaaaggaatgtttagcacaagacacagcggagctcgggattggctaaactcccatagtatttatggtggccgccggcgggggccccagcccagcttgcaggccacctctagctttcttcctaccccattcccggcttccctcctcctcccctgcagcctggttaggtggatacctgccctgacatgtgaggcaagctaaggcctggagggtcagatgggagaccaggtcccaagggagcaagacctcgcgaagcgcagcagccccggcccttcccccgttttgaacatgtgtaaccgacagtctgcctgggccacagccctctcaccctggtactgcatgcacgcaatgctagctgcccctttcccgtcctgggcaccccgagtctcccccgaccccgggtcccaggtatgctcccacctccacctgccccactcaccacctctgctagttccagacacctccacgcccacctggtcctctcccatcgcccacaaaagggggggcacgagggacgagcttagctgagctgggaggagcagggtgagggtgggcgacccaggattccccctccccttcccaaataaagatgagggtactaaagttgtcttggtttttattttattattatttttttctttttccagtatactagcttgtcttttaagaaaggggatattaaaaaaaaaaaaagacaaaagtgtttttaaaaaaaagcaacacccacacctgtgtctgtatatagtcagcttatctcgtgttcaatcgtctgatctctacagagagaagtggaaaatgctgtatcaagggtgggcttagctgtgcctttccaataaagatgtgagaagcttcaaaaaaaaaaa

SEQ ID NO: 1358 - DNA, 3594 bp, Homo Sapiens
  NM_001144
cgcgccggcaggggcagcagcgggagcagcgcggggcggagcggcgccagcagccaggagcggcccggcccggcccggcgcggcggcggcggcggcagcggcagcggcagcgacgccagagcccgtgggcgccgttcgcgaggccgccgcagaggcccggccgcagcgcagggaagcctgggggccagaggtcgccgctgccgccatgccgctgctcttcctcgagcgcttcccctggcccagcctccgcacctacacgggcctcagcggcctggccctgctgggcaccatcatcagcgcctaccgcgcgctcagccagcccgaggccggccccggcgagccggaccagctaacggcctcgctgcagcctgagccgccggcgcccgcccggccgagcgccgggggaccccgggcccgcgatgtggcccagtacctgctctcagacagcctcttcgtgtgggttctagtaaataccgcttgctgtgttttgatgttggtggctaagctcatccagtgtattgtgtttggccctcttcgagtgagtgagagacagcatctcaaagacaaattttggaattttattttctacaagttcattttcatctttggtgtgctgaatgtccagacagtggaagaggtggtcatgtggtgcctctggtttgccggacttgtctttctgcacctgatggttcagctctgcaaggatcgatttgaatatctttccttctcgcccaccacgccgatgagcagccacggtcgagtcctgtccctgttggttgccatgctgctttcctgctgtggactggcggccgtctgctccatcaccggctacacccacggaatgcacaccttggctttcatggctgcagagtctcttcttgtgacagtgaggactgctcatgtgattttacgatacgtaattcacctctgggacctcaaccacgaagggacgtgggaaggaaaggggacgtatgtctattacacagactttgtcatggagctcactctcctgtccctggacctcatgcaccatattcacatgttgttatttggcaacatctggttatccatggccagcctggtcatctttatgcagctgcgttacctgtttcatgaggtgcaacgtcgaattcgtcggcacaagaactatctacgtgtggttggaaacatggaggccaggtttgcagttgcaactccagaggagctggctgtcaacaatgacgactgtgccatctgttgggactccatgcaggctgcgcggaaactgccctgtggacatcttttccacaactcctgtcttcgttcctggctagaacaagacacctcctgtccaacatgcagaatgtctcttaatattgccgacaataatcgtgtcagggaagaacatcaaggagagaacttggatgagaatttggttcctgtagcagcagccgaagggagacctcgcttaaaccaacacaatcacttcttccatttcgatgggtctcggattgcgagctggctgccgagtttttcggttgaagtgatgcacaccaccaacattcttggcattacgcaggccagcaactcccagctcaatgcaatggctcatcagattcaagagatgtttccccaggttccataccatctggtactgcaggacctccagctgacacgctcagttgaaataacaacagacaatattttagaaggacggattcaagtaccttttcctacacagcggtcagatagcatcagacctgcattgaacagtcctgtggaaaggccaagcagtgaccaggaagagggagaaacttctgctcagaccgagcgtgtgccactggacctcagtcctcgcctggaggagacgctggacttcggcgaggtggaagtggagcccagtgaggtggaagacttcgaggctcgtgggagccgcttctccaagtctgctgatgagagacagcgcatgctggtgcagcgtaaggacgaactcctccagcaagctcgcaaacgtttcttgaacaaaagttctgaagatgatgcggcctcagagagcttcctcccctcggaaggtgcgtcctctgaccccgtgaccctgcgtcgaaggatgctggctgccgccgcggaacggaggcttcagaagcagcagacctcctagcgctcccttgccttcctcagctgcctcctgcgccctgtgcccgactgactggaggaggcctgtcccaattctgcccgctccatggaaaagcgggcttgactgcattgccgctgtataaagcatgtggtcttatagtgtttggacagctgataaatttaatccttctttgtaatactttctatgtgacatttctcttccccttagaaacactgcaaattttaactgtaggtatgatctcttctggtgttgactggactgcttggggtgggggacgatcaggaggaagtgagcagtcgcctgcctgcagcaggcagcttctactcctgcctcatgcgtacgtcccacaaatgcaggtgtcctgagcaccacacccagtgggaagagtgtgggggaggcgcacagtgtgagcccgcccccacgtcgtggggtaacatctgttatcaaactgctgtcgttgttgtggaagcatgtagactgtgccagaggccagacccacgggctcatgcacccctgagccagcagggcatcttggaaaaggaactcttggttcgatacctggagcagaggaggggaaagtccagggctatagggtgtgatgaagtcacccctttctgtcccactacatctgggactgactttccgagcctccagtccaaagccggcttgatttccgtgaactctggtgctcctgcatctcatgagtgtgccccatgggtcccctcccctctcagcatttccttgtcccgtctggacctggggagtggttaggcagcaagctttggtttatggttttcattcattggtgaagtaaattaggcagtgctaaagcctgtgggtttggtccttgaacaagatgtgggccttgcaagatgggagagtaaaccttgaagggctttattaaagaaataaaaaagaacttttgtatcttttatcctgggagcactgcgttttcctagctgtgttattcctggtttaattcagcagagaaggtaaggtgtgaacctacctgccttggagagggcccaggtcccaaatctcttcaaattcttcacatgtttaactttaaggatttgaaccatgaagtcataggttacagacctcagttttatgccccattggattactttttttttttttttttttttttttttttttactctttgaaagctttgttttgtggtagtccttttgggaagaatccagtattatccacaattattggcaaagtttaaatgtattttacataacggaaagtttttagaatgttgaaaagtaattgaaaaaggtgataggtaaatttttaggcaaagataatttatttcaataaatctttcaaaagccttaccttgaaatgctgttagtaaatttctgtgatttttttttttaatttgttttgctgagagcatagctatttgtttttattgtaaaacaataataataataaaaagcaaactcta

SEQ ID NO: 1359 - DNA, 4338 bp, Homo Sapiens
  NM_001146
ggggcacactcatgcattcctgtcaagtcatcttgtgaaaggctgcctgcttccagcttggcttggatgtgcaaccttaataaaactcactgaggtctgggagaaaatagcagatctgcagcagatagggtagaggaaagggtctagaatatgtacacgcagctgactcaggcaggctccatgctgaacggtcacacagagaggaaacaataaatctcagctactatgcaataaatatctcaagttttaacgaagaaaaacatcattgcagtgaaataaaaaattttaaaattttagaacaaagctaacaaatggctagttttctatgattcttcttcaaacgctttctttgagggggaaagagtcaaacaaacaagcagttttacctgaaataaagaactagttttagaggtcagaagaaaggagcaagttttgcgagaggcacggaaggagtgtgctggcagtacaatgacagttttcctttcctttgctttcctcgctgccattctgactcacatagggtgcagcaatcagcgccgaagtccagaaaacagtgggagaagatataaccggattcaacatgggcaatgtgcctacactttcattcttccagaacacgatggcaactgtcgtgagagtacgacagaccagtacaacacaaacgctctgcagagagatgctccacacgtggaaccggatttctcttcccagaaacttcaacatctggaacatgtgatggaaaattatactcagtggctgcaaaaacttgagaattacattgtggaaaacatgaagtcggagatggcccagatacagcagaatgcagttcagaaccacacggctaccatgctggagataggaaccagcctcctctctcagactgcagagcagaccagaaagctgacagatgttgagacccaggtactaaatcaaacttctcgacttgagatacagctgctggagaattcattatccacctacaagctagagaagcaacttcttcaacagacaaatgaaatcttgaagatccatgaaaaaaacagtttattagaacataaaatcttagaaatggaaggaaaacacaaggaagagttggacaccttaaaggaagagaaagagaaccttcaaggcttggttactcgtcaaacatatataatccaggagctggaaaagcaattaaacagagctaccaccaacaacagtgtccttcagaagcagcaactggagctgatggacacagtccacaaccttgtcaatctttgcactaaagaaggtgttttactaaagggaggaaaaagagaggaagagaaaccatttagagactgtgcagatgtatatcaagctggttttaataaaagtggaatctacactatttatattaataatatgccagaacccaaaaaggtgttttgcaatatggatgtcaatgggggaggttggactgtaatacaacatcgtgaagatggaagtctagatttccaaagaggctggaaggaatataaaatgggttttggaaatccctccggtgaatattggctggggaatgagtttatttttgccattaccagtcagaggcagtacatgctaagaattgagttaatggactgggaagggaaccgagcctattcacagtatgacagattccacataggaaatgaaaagcaaaactataggttgtatttaaaaggtcacactgggacagcaggaaaacagagcagcctgatcttacacggtgctgatttcagcactaaagatgctgataatgacaactgtatgtgcaaatgtgccctcatgttaacaggaggatggtggtttgatgcttgtggcccctccaatctaaatggaatgttctatactgcgggacaaaaccatggaaaactgaatgggataaagtggcactacttcaaagggcccagttactccttacgttccacaactatgatgattcgacctttagatttttgaaagcgcaatgtcagaagcgattatgaaagcaacaaagaaatccggagaagctgccaggtgagaaactgtttgaaaacttcagaagcaaacaatattgtctcccttccagcaataagtggtagttatgtgaagtcaccaaggttcttgaccgtgaatctggagccgtttgagttcacaagagtctctacttggggtgacagtgctcacgtggctcgactatagaaaactccactgactgtcgggctttaaaaagggaagaaactgctgagcttgctgtgcttcaaactactactggaccttattttggaactatggtagccagatgataaatatggttaatttcatgtaaaacagaaaaaaagagtgaaaaagagaatatacatgaagaatagaaacaagcctgccataatcctttggaaaagatgtattataccagtgaaaaggtgttatatctatgcaaacctactaacaaattatactgttgcacaattttgataaaaatttagaacagcattgtcctctgagttggttaaatgttaatggatttcagaagcctaattccagtatcatacttactagttgatttctgcttacccatcttcaaatgaaaattccatttttgtaagccataatgaactgtagtacatggacaataagtgtgtggtagaaacaaactccattactctgatttttgatacagttttcagaaaaagaaatgaacataatcaagtaaggatgtatgtggtgaaaacttaccacccccatactatggttttcatttactctaaaaactgattgaatgatatataaatatatttatagcctgagtaaagttaaaagaatgtaaaatatatcatcaagttcttaaaataatatacatgcatttaatatttcctttgatattatacaggaaagcaatattttggagtatgttaagttgaagtaaaagcaagtactctggagcagttcattttacagtatctacttgcatgtgtatacatacatgtaacttcattattttaaaaatatttttagaactccaatactcaccctgttatgtcttgctaatttaaattttgctaattaactgaaacatgcttaccagattcacactgttccagtgtctataaaagaaacactttgaagtctataaaaaataaaataattataaatatcattgtacatagcatgtttatatctgcaaaaaacctaatagctaattaatctggaatatgcaacattgtccttaattgatgcaaataacacaaatgctcaaagaaatctactatatcccttaatgaaatacatcattcttcatatatttctccttcagtccattcccttaggcaatttttaatttttaaaaattattatcaggggagaaaaattggcaaaactattatatgtaagggaaatatatacaaaaagaaaattaatcatagtcacctgactaagaaattctgactgctagttgccataaataactcaatggaaatattcctatgggataatgtattttaagtgaatttttggggtgcttgaagttactgcattattttatcaagaagtcttctctgcctgtaagtgtccaaggttatgacagtaaacagtttttattaaaacatgagtcactatgggatgagaaaattgaaataaagctactgggcctcctctcataaaagagacagttgttggcaaggtagcaataccagtttcaaacttggtgacttgatccactatgccttaatggtttcctccatttgagaaaataaagctattcacattgttaagaaaaatactttttaaagtttaccatcaagtcttttttatatttatgtgtctgtattctacccctttttgccttacaagtgatatttgcaggtattataccatttttctattcttggtggcttcttcatagcaggtaagcctctccttctaaaaacttctcaactgttttcatttaagggaaagaaaatgagtattttgtccttttgtgttcctacagacactttcttaaaccagtttttggataaagaatactatttccaaactcatattacaaaaacaaaataaaataataaaaaaagaaagcatgatatttactgttttgttgtctgggtttgagaaatgaaatattgtttccaattatttataataaatcagtataaaatgttttatgattgttatgtgtattatgtaatacgtacatgtttatggcaatttaacatgtgtattcttttaattgtttcagaataggataattaggtattcgaattttgtctttaaaattcatgtggtttctatgcaaagttcttcatatcatcacaacattatttgatttaaataaaattgaaagtaatatttgtgcaa

SEQ ID NO: 1360 - DNA, 3740 bp, Homo Sapiens
  NM_001150
gggacggcggcggcgcagctcggaacccgccagggtccagggtccaggttccagcgcccggcggcccaggcaccccccgagcccagctccacacaccgttcctggatctcctctccccaggcggagcgtgcccctgcccagtccagtgaccttcgcctgttggagccctggttaatttttgcccagtctgcctgttgtggggctcctcccctttggggatataagcccggcctggggctgctccgttctctgcctggcctgaggctccctgagccgcctccccaccatcaccatggccaagggcttctatatttccaagtccctgggcatcctggggatcctcctgggcgtggcagccgtgtgcacaatcatcgcactgtcagtggtgtactcccaggagaagaacaagaacgccaacagctcccccgtggcctccaccaccccgtccgcctcagccaccaccaaccccgcctcggccaccaccttggaccaaagtaaagcgtggaatcgttaccgcctccccaacacgctgaaacccgattcctaccgggtgacgctgagaccgtacctcacccccaatgacaggggcctgtacgtttttaagggctccagcaccgtccgtttcacctgcaaggaggccactgacgtcatcatcatccacagcaagaagctcaactacaccctcagccaggggcacagggtggtcctgcgtggtgtgggaggctcccagccccccgacattgacaagactgagctggtggagcccaccgagtacctggtggtgcacctcaagggctccctggtgaaggacagccagtatgagatggacagcgagttcgagggggagttggcagatgacctggcgggcttctaccgcagcgagtacatggagggcaatgtcagaaaggtggtggccactacacagatgcaggctgcagatgcccggaagtccttcccatgcttcgatgagccggccatgaaggccgagttcaacatcacgcttatccaccccaaggacctgacagccctgtccaacatgcttcccaaaggtcccagcaccccacttccagaagaccccaactggaatgtcactgagttccacaccacgcccaagatgtccacgtacttgctggccttcattgtcagtgagttcgactacgtggagaagcaggcatccaatggtgtcttgatccggatctgggcccggcccagtgccattgcggcgggccacggcgattatgccctgaacgtgacgggccccatccttaacttctttgctggtcattatgacacaccctacccactcccaaaatcagaccagattggcctgccagacttcaacgccggcgccatggagaactggggactggtgacctaccgggagaactccctgctgttcgaccccctgtcctcctccagcagcaacaaggagcgggtggtcactgtgattgctcatgagctggcccaccagtggttcgggaacctggtgaccatagagtggtggaatgacctgtggctgaacgagggcttcgcctcctacgtggagtacctgggtgctgactatgcggagcccacctggaacttgaaagacctcatggtgctgaatgatgtgtaccgcgtgatggcagtggatgcactggcctcctcccacccgctgtccacacccgcctcggagatcaacacgccggcccagatcagtgagctgtttgacgccatctcctacagcaagggcgcctcagtcctcaggatgctctccagcttcctgtccgaggacgtattcaagcagggcctggcgtcctacctccacacctttgcctaccagaacaccatctacctgaacctgtgggaccacctgcaggaggctgtgaacaaccggtccatccaactccccaccaccgtgcgggacatcatgaaccgctggaccctgcagatgggcttcccggtcatcacggtggataccagcacggggaccctttcccaggagcacttcctccttgaccccgattccaatgttacccgcccctcagaattcaactacgtgtggattgtgcccatcacatccatcagagatggcagacagcagcaggactactggctgatagatgtaagagcccagaacgatctcttcagcacatcaggcaatgagtgggtcctgctgaacctcaatgtgacgggctattaccgggtgaactacgacgaagagaactggaggaagattcagactcagctgcagagagaccactcggccatccctgtcatcaatcgggcacagatcattaatgacgccttcaacctggccagtgcccataaggtccctgtcactctggcgctgaacaacaccctcttcctgattgaagagagacagtacatgccctgggaggccgccctgagcagcctgagctacttcaagctcatgtttgaccgctccgaggtctatggccccatgaagaactacctgaagaagcaggtcacacccctcttcattcacttcagaaataataccaacaactggagggagatcccagaaaacctgatggaccagtacagcgaggttaatgccatcagcaccgcctgctccaacggagttccagagtgtgaggagatggtctctggccttttcaagcagtggatggagaaccccaataataacccgatccaccccaacctgcggtccaccgtctactgcaacgctatcgcccagggcggggaggaggagtgggacttcgcctgggagcagttccgaaatgccacactggtcaatgaggctgacaagctccgggcagccctggcctgcagcaaagagttgtggatcctgaacaggtacctgagctacaccctgaacccggacttaatccggaagcaggacgccacctctaccatcatcagcattaccaacaacgtcattgggcaaggtctggtctgggactttgtccagagcaactggaagaagctttttaacgattatggtggtggctcgttctccttctccaacctcatccaggcagtgacacgacgattctccaccgagtatgagctgcagcagctggagcagttcaagaaggacaacgaggaaacaggcttcggctcaggcacccgggccctggagcaagccctggagaagacgaaagccaacatcaagtgggtgaaggagaacaaggaggtggtgctccagtggttcacagaaaacagcaaatagtccccagcccttgaagtcacccggcccccatgcaaggtgcccacatgtgtccatcccagcggctggtgcagggcctccattcctggagcccgaggcaccagtgtcctcccctcaaggacaaagtctccagcccacgttctctctgcctgtgagccagtctagttcctgatgacccaggctgcctgagcacctcccagcccctgcccctcatgccaaccccgccctaggcctggcatggcacctgtcgcccagtgccctggggctgatctcagggaagcccagctccagggccagatgagcagaagctctcgatggacaatgaacggccttgctgggggccgccctgtaccctctttcacctttccctaaagaccctaaatctgaggaatcaacagggcagcagatctgtatatttttttctaagagaaaatgtaaataaaggatttctagatgaaaaaaaaaaaaaaaaaaaaaaaaaaaaaaaaaaaaaaaaaaaaaaaaaaaaaaaaaaaaaaaaaaaaaaaaaaaaaaaaaaaaaaaaaaa

SEQ ID NO: 1361 - DNA, 4420 bp, Homo Sapiens
  NM_001151
ggcggccccctagcgtcgcgcagggtcggggactgcgcggcggtgccaggccgggcgtgggcgagagcacgaacgggctgcctgcgggctgagagcgtcgagctgtcaccatgggtgatcacgcttggagcttcctaaaggacttcctggccgggggcgtcgccgctgccgtctccaagaccgcggtcgcccccatcgagagggtcaaactgctgctgcaggtccagcatgccagcaaacagatcagtgctgagaagcagtacaaagggatcattgattgtgtggtgagaatccctaaggagcagggcttcctctccttctggaggggtaacctggccaacgtgatccgttacttccccacccaagctctcaacttcgccttcaaggacaagtacaagcagctcttcttagggggtgtggatcggcataagcagttctggcgctactttgctggtaacctggcgtccggtggggccgctggggccacctccctttgctttgtctacccgctggactttgctaggaccaggttggctgctgatgtgggcaagggcgccgcccagcgtgagttccatggtctgggcgactgtatcatcaagatcttcaagtctgatggcctgagggggctctaccagggtttcaacgtctctgtccaaggcatcattatctatagagctgcctacttcggagtctatgatactgccaaggggatgctgcctgaccccaagaacgtgcacatttttgtgagctggatgattgcccagagtgtgacggcagtcgcagggctggtgtcctacccctttgacactgttcgtcgtagaatgatgatgcagtccggccggaaaggggccgatattatgtacacggggacagttgactgctggaggaagattgcaaaagacgaaggagccaaggccttcttcaaaggtgcctggtccaatgtgctgagaggcatgggcggtgcttttgtattggtgttgtatgatgagatcaaaaaatatgtctaatgtaattaaaacacaagttcacagatttacagtgaacttgatctacaagttcacagatccattgtgtggtttaatagactattcctaggggaagtaaaaagatctgggataaaaccagactgaaaggaatacctcagaagagatgcttcattgagtgttcattaaaccacacatgtattttgtatttattttacatttaaattcccacagcaaatagaaaataatttatcatacttgtacaattaactgaagaattgataataactgaatgtgaaacatcaataaagaccacttaatgcacgctttctattttattgaactcttattaactgtaaaatgcatttttaaaagatcaaaaatgcatattttctagcatgattcatgtatcagtcagcagccaagcttctaaatgccagatattatattgagaatgtattatatgagaacgtacaatgcttaaagttccggttttcaaacttaggcaggtcatattctatctatcttatccagcattactgtaggctagaaagtgataatggctttcataatcctgccttgtcttaggcactttcctgcagtctttagaaattctaagattctgctaaaagttttaaatcacaatctggagaattttctatgattaggaagtgctctgttttcatccctttagataactgtgacacctagaattttatgttaagtagagagtattcattgaaaatcaaggccaggtgcagtggctcacacctgtcaccccagcactttgggaggcagaggtgggcgtatcacttcaggccaggagtttgagaccagcctggccaaccgagcgaaaccccatctctaataaaaatacaaaaaattagctgggtgtggtggcgcacacctgtaatcccaactactcaggaggctgaggcatcagaatcacttgaacccgagaggcagaggttgcagtgagctgagatggcatgccaccacatccatcctaagcgacagggcaagactctgtctcaaaaaaaaaaaaaagaaagaaaatcagttgtcttagtttaagctactataacaaggtactgtagactgatggcttataagcaacagaaacttatttctcagttctgtagtctggaggtccaagatcaaggtgacactgtggtcaggttctgatgagggccctcttctgggttataaactacggacttcttgtatccttacatggcagaaagagcgacagagctctctgtagtcccttttataagctcactaatcccattcatgagggccctaccctcatgacccaattacctcccaaatgcccctcctccaaacaccaccactttgggggttaagatttcaacagatgaattttgaagggacacaaacattcagtccatagcatcacttatcaagctagtatttaatacctcttaggccccgtggaagggaaaatagataggaacctgccctgaaagatgcttcagttggggagaaaaggtgaaattccattgttagacaatttgtttaagacaatacatcttgcttgagaaggaatagaagggaaatgaaatggggggagggagtggtaggagatggaggctttgaaagaaaataaccagatttagaaacatgggtatagaaagcatcctccagtacttctgtaacaatttatcaagacctacaggaagtcagttttggatttgctcctccgagatttgcgagccagaggaaaatacttagactatcaggttggaaagttcacacttggaccaggaaaagaccaagcagttgctatagtctcctggattgtgactaatctggaggaagcaagtccctgtatccttggcaaagcttgaaaggcaggcaaatgtcttctctgtgttttctgacaggtggttgggtggtgggggttggtctctgtacctcctgttctttaccttgcttaccaagcccttccaccgactcactcctgcctccccagctaaaaattggctgtgttgcttttaccacagttaccaaggtctgagttttataaaatccaggatcacatctgacctcacctggtagatatctaggccaataaagtctaaagggctaaaaagaaggtacctctccatcctgtctcctcgaggccaggcagcacatgtgcagttaagaggcctcctggatccattgtcctcctgttgcttttcgttctaagtgatccaaactctattgctgatagggaataaaagcagggcaggctagtagtgggcaagtgctttgatggagcgtatctccaagcagggcccaagtttaggaggaggaagacctgatacaatgaatgaacagtgcgtcctcccaacccaaccaagaagtgtaattgtgttccgtctttaaccctggcatggaatggggagggaagaggcatggacatttattacatagtgcacattatctacattctctgcatgtgacccagatgtcagcccttccgcttcctgcgaaggttacctctaatgcacgttgccccaggccctgctgagctagttcctcaccgcagctacttaactcaccatgaattcctagaaccctcagcctctgagagtgctgggatctggcgggagaacaggcagtacttccctcactaacctacccgcacgccataccatcattgtgcaaagctgcctcatgctggaaggtctggtttacgtaaaagtgacaagttggaattgagcgtccgactctcgggtacctgccccaggcatttctcatcagccccatttcccacacagctctctcctaggcgcagccctccttcaccaccaccacccccaccccaatcacctttaggtattttctcccctaaagcctcacctgttggcattttacatctttttaagaccttattttgtattttaaatgtatgagaaaaattatggaggatgatgcaagatgagtgagtccataatggtaataattggacactaaaaacaatgaaaacttgtctcaagtatttgtgttgaaatctcaattaactgggcgactgctcccgttccattttattctgtaaaatatgtggcatcctttgtgttgaggcggcatttactaaacacccccaaggtgcaaggctgcaagagaatcgagcgccgcaaggcgagcttatcttccacacctggtacagtgcccaggacagagaaggtgtttagcaagtttctgctgaatggaagagtgagcgagaagggaaagtgcatctaaaaagcacagggaacctacaaaatatttgggaaagggtttcatcagttcgggtgaaatcttgaacgtgcaaagcaccatgggggtggctggacaggcttgttggagtcgtataatgcaatgaataaaaacttacggctgccttaaatgcaaatgtcaagcccttaaataaaatttaacaaagtcta

SEQ ID NO: 1362 - DNA, 1351 bp, Homo Sapiens
  NM_001152
agctccggctccccctatataaatcggccatttgcttcgctccgccccgcagcgccggagtcaaagccggttcccggcccagtcccgtcctgcagcagtctgcctcctctttcaacatgacagatgccgctgtgtccttcgccaaggacttcctggcaggtggagtggccgcagccatctccaagacggcggtagcgcccatcgagcgggtcaagctgctgctgcaggtgcagcatgccagcaagcagatcactgcagataagcaatacaaaggcattatagactgcgtggtccgtattcccaaggagcagggagttctgtccttctggcgcggtaacctggccaatgtcatcagatacttccccacccaggctcttaacttcgccttcaaagataaatacaagcagatcttcctgggtggtgtggacaagagaacccagttttggctctactttgcagggaatctggcatcgggtggtgccgcaggggccacatccctgtgttttgtgtaccctcttgattttgcccgtacccgtctagcagctgatgtgggtaaagctggagctgaaagggaattccgaggcctcggtgactgcctggttaagatctacaaatctgatgggattaagggcctgtaccaaggctttaacgtgtctgtgcagggtattatcatctaccgagccgcctacttcggtatctatgacactgcaaagggaatgcttccggatcccaagaacactcacatcgtcatcagctggatgatcgcacagactgtcactgctgttgccgggttgacttcctatccatttgacactgttcgccgccgcatgatgatgcagtcagggcgcaaaggaactgacatcatgtacacaggcacgcttgactgctggcggaagattgctcgtgatgaaggaggcaaagcttttttcaagggtgcatggtccaatgttctcagaggcatgggtggtgcttttgtgcttgtcttgtatgatgaaatcaagaagtacacataagttatttcctaggatttttccccctgtgaacaggcatgttgtattatataacatatcttgagcattcttgacagactcctggctgtcagtttctcagtggcaactatttactggttgaaaatgggaagcaataatattcatctgaccagttttctcttaaagccatttccatgatgatgatgatgggactcaattgtattttttatttcagtcactcctgataaataacaaatttggagaaataaaaatatctaaaataaattttgtctgcagtatattttcatataaaaatgcatatttgagtgctacattcgaataaatactacctttttagtgaa

SEQ ID NO: 1363 - DNA, 3002 bp, Homo Sapiens
  NM_001155
agaggggtggggtggaggagggaggcgggcgcgccggattggcctctgcgcgccacgtgtccggctcggagcccacggctgtcctcccggtccgccccgcgctgcggttgctgctgggctaacgggctccgatccagcgagcgctgcgtcctcgagtccctgcgcccgtgcgtccgtctgcgacccgaggcctccgctgcgcgtggattctgctgcgaaccggagaccatggccaaaccagcacagggtgccaagtaccggggctccatccatgacttcccaggctttgaccccaaccaggatgccgaggctctgtacactgccatgaagggctttggcagtgacaaggaggccatactggacataatcacctcacggagcaacaggcagaggcaggaggtctgccagagctacaagtccctctacggcaaggacctcattgctgatttaaagtatgaattgacgggcaagtttgaacggttgattgtgggcctgatgaggccacctgcctattgtgatgccaaagaaattaaagatgccatctcgggcattggcactgatgagaagtgcctcattgagatcttggcttcccggaccaatgagcagatgcaccagctggtggcagcatacaaagatgcctacgagcgggacctggaggctgacatcatcggcgacacctctggccacttccagaagatgcttgtggtcctgctccagggaaccagggaggaggatgacgtagtgagcgaggacctggtacaacaggatgtccaggacctatacgaggcaggggaactgaaatggggaacagatgaagcccagttcatttacatcttgggaaatcgcagcaagcagcatcttcggttggtgttcgatgagtatctgaagaccacagggaagccgattgaagccagcatccgaggggagctgtctggggactttgagaagctaatgctggccgtagtgaagtgtatccggagcaccccggaatattttgctgaaaggctcttcaaggctatgaagggcctggggactcgggacaacaccctgatccgcatcatggtctcccgtagtgagttggacatgctcgacattcgggagatcttccggaccaagtatgagaagtccctctacagcatgatcaagaatgacacctctggcgagtacaagaagactctgctgaagctgtctgggggagatgatgatgctgctggccagttcttcccggaggcagcgcaggtggcctatcagatgtgggaacttagtgcagtggcccgagtagagctgaagggaactgtgcgcccagccaatgacttcaaccctgacgcagatgccaaagcgctgcggaaagccatgaagggactcgggactgacgaagacacaatcatcgatatcatcacgcaccgcagcaatgtccagcggcagcagatccggcagaccttcaagtctcactttggccgggacttaatgactgacctgaagtctgagatctctggagacctggcaaggctgattctggggctcatgatgccaccggcccattacgatgccaagcagttgaagaaggccatggagggagccggcacagatgaaaaggctcttattgaaatcctggccactcggaccaatgctgaaatccgggccatcaatgaggcctataaggaggactatcacaagtccctggaggatgctctgagctcagacacatctggccacttcaggaggatcctcatttctctggccacggggcatcgtgaggagggaggagaaaacctggaccaggcacgggaagatgcccaggtggctgctgagatcttggaaatagcagacacacctagtggagacaaaacttccttggagacacgtttcatgacgatcctgtgtacccggagctatccgcacctccggagagtcttccaggagttcatcaagatgaccaactatgacgtggagcacaccatcaagaaggagatgtctggggatgtcagggatgcatttgtggccattgttcaaagtgtcaagaacaagcctctcttctttgccgacaaactttacaaatccatgaagggtgctggcacagatgagaagactctgaccaggatcatggtatcccgcagtgagattgacctgctcaacatccggagggaattcattgagaaatatgacaagtctctccaccaagccattgagggtgacacctccggagacttcctgaaggccttgctggctctctgtggtggtgaggactagggccacagctttggcgggcacttctgccaagaaatggttatcagcaccagccgccatggccaagcctgattgttccagctccagagactaaggaaggggcaggggtggggggaggggttgggttgggctcttatcttcagtggagcttaggaaacgctcccactcccacgggccatcgagggcccagcacggctgagcggctgaaaaaccgtagccatagatcctgtccacctccactcccctctgaccctcaggctttcccagcttcctccccttgctacagcctctgccctggtttgggctatgtcagatccaaaaacatcctgaacctctgtctgtaaaatgagtagtgtctgtactttgaatgagggggttggtggcaggggccagttgaatgtgctgggcggggtggtgggaaggatagtaaatgtgctggggcaaactgacaaatcttcccatccatttcaccacccatctccatccaggccgcgctagagtactggaccaggaatttggatgcctgggttcaaatctgcatctgccatgcacttgtttctgaccttaggccagcccctttccctccctgagtctctattttcttatctacaatgagacagttggacaaaaaaatcttggcttcccttctaacattaacttcctaaagtatgcctccgattcattcccttgacactttttatttctaaggaagaaataaaaagagatacacaaacacataaacacaaaaaaaaaaa

SEQ ID NO: 1364 - DNA, 5243 bp, Homo Sapiens
  NM_001165
agcgtgagactcgcgccctccggcacggaaaaggccaggcgacaggtgtcgcttgaaaagactgggcttgtccttgctggtgcatgcgtcgtcggcctctgggcagcaggtttacaaaggaggaaaacgacttcttctagatttttttttcagtttcttctataaatcaaaacatctcaaaatggagacctaaaatccttaaagggacttagtctaatctcgggaggtagttttgtgcatgggtaaacaaattaagtattaactggtgttttactatccaaagaatgctaattttataaacatgatcgagttatataaggtataccataatgagtttgattttgaatttgatttgtggaaataaaggaaaagtgattctagctggggcatattgttaaagcatttttttcagagttggccaggcagtctcctactggcacattctcccattatgtagaatagaaatagtacctgtgtttgggaaagattttaaaatgagtgacagttatttggaacaaagagctaataatcaatccactgcaaattaaagaaacatgcagatgaaagttttgacacattaaaatacttctacagtgacaaagaaaaatcaagaacaaagctttttgatatgtgcaacaaatttagaggaagtaaaaagataaatgtgatgattggtcaagaaattatccagttatttacaaggccactgatattttaaacgtccaaaagtttgtttaaatgggctgttaccgctgagaatgatgaggatgagaatgatggttgaaggttacattttaggaaatgaagaaacttagaaaattaatataaagacagtgatgaatacaaagaagatttttataacaatgtgtaaaatttttggccagggaaaggaatattgaagttagatacaattacttacctttgagggaaataattgttggtaatgagatgtgatgtttctcctgccacctggaaacaaagcattgaagtctgcagttgaaaagcccaacgtctgtgagatccaggaaaccatgcttgcaaaccactggtaaaaaaaaaaaaaaaaaaaaaaaaaagccacagtgacttgcttattggtcattgctagtattatcgactcagaacctctttactaatggctagtaaatcataattgagaaattctgaattttgacaaggtctctgctgttgaaatggtaaatttattattttttttgtcatgataaattctggttcaaggtatgctatccatgaaataatttctgaccaaaactaaattgatgcaatttgattatccatcttagcctacagatggcatctggtaacttttgactgttttaaaaaataaatccactatcagagtagatttgatgttggcttcagaaacatttagaaaaacaaaagttcaaaaatgttttcaggaggtgataagttgaataactctacaatgttagttctttgagggggacaaaaaatttaaaatctttgaaaggtcttattttacagccatatctaaattatcttaagaaaatttttaacaaagggaatgaaatatatatcatgattctgtttttccaaaagtaacctgaatatagcaatgaagttcagttttgttattggtagtttgggcagagtctctttttgcagcacctgttgtctaccataattacagaggacatttccatgttctagccaagtatactattagaataaaaaaacttaacattgagttgcttcaacagcatgaaactgagtccaaaagaccaaatgaacaaacacattaatctctgattatttattttaaatagaatatttaattgtgtaagatctaatagtatcattatacttaagcaatcatattcctgatgatctatgggaaataactattatttaattaatattgaaaccaggttttaagatgtgttagccagtcctgttactagtaaatctctttatttggagagaaattttagattgttttgttctccttattagaaggattgtagaaagaaaaaaatgactaattggagaaaaattggggatatatcatatttcactgaattcaaaatgtcttcagttgtaaatcttaccattattttacgtacctctaagaaataaaagtgcttctaattaaaatatgatgtcattaattatgaaatacttcttgataacagaagttttaaaatagccatcttagaatcagtgaaatatggtaatgtattattttcctcctttgagttaggtcttgtgcttttttttcctggccactaaatttcacaatttccaaaaagcaaaataaacatattctgaatatttttgctgtgaaacacttgacagcagagctttccaccatgaaaagaagcttcatgagtcacacattacatctttgggttgattgaatgccactgaaacattctagtagcctggagaagttgacctacctgtggagatgcctgccattaaatggcatcctgatggcttaatacacatcactcttctgtgaagggttttaattttcaacacagcttactctgtagcatcatgtttacattgtatgtataaagattatacaaaggtgcaattgtgtatttcttccttaaaatgtatcagtataggatttagaatctccatgttgaaactctaaatgcatagaaataaaaataataaaaaatttttcattttggcttttcagcctagtattaaaactgataaaagcaaagccatgcacaaaactacctccctagagaaaggctagtcccttttcttccccattcatttcattatgaacatagtagaaaacagcatattcttatcaaatttgatgaaaagcgccaacacgtttgaactgaaatacgacttgtcatgtgaactgtaccgaatgtctacgtattccacttttcctgctggggttcctgtctcagaaaggagtcttgctcgtgctggtttctattacactggtgtgaatgacaaggtcaaatgcttctgttgtggcctgatgctggataactggaaaagaggagacagtcctactgaaaagcataaaaagttgtatcctagctgcagattcgttcagagtctaaattccgttaacaacttggaagctacctctcagcctacttttccttcttcagtaacaaattccacacactcattacttccgggtacagaaaacagtggatatttccgtggctcttattcaaactctccatcaaatcctgtaaactccagagcaaatcaagatttttctgccttgatgagaagttcctaccactgtgcaatgaataacgaaaatgccagattacttacttttcagacatggccattgacttttctgtcgccaacagatctggcaaaagcaggcttttactacataggacctggagacagagtggcttgctttgcctgtggtggaaaattgagcaattgggaaccgaaggataatgctatgtcagaacacctgagacattttcccaaatgcccatttatagaaaatcagcttcaagacacttcaagatacacagtttctaatctgagcatgcagacacatgcagcccgctttaaaacattctttaactggccctctagtgttctagttaatcctgagcagcttgcaagtgcgggtttttattatgtgggtaacagtgatgatgtcaaatgcttttgctgtgatggtggactcaggtgttgggaatctggagatgatccatgggttcaacatgccaagtggtttccaaggtgtgagtacttgataagaattaaaggacaggagttcatccgtcaagttcaagccagttaccctcatctacttgaacagctgctatccacatcagacagcccaggagatgaaaatgcagagtcatcaattatccattttgaacctggagaagaccattcagaagatgcaatcatgatgaatactcctgtgattaatgctgccgtggaaatgggctttagtagaagcctggtaaaacagacagttcagagaaaaatcctagcaactggagagaattatagactagtcaatgatcttgtgttagacttactcaatgcagaagatgaaataagggaagaggagagagaaagagcaactgaggaaaaagaatcaaatgatttattattaatccggaagaatagaatggcactttttcaacatttgacttgtgtaattccaatcctggatagtctactaactgccggaattattaatgaacaagaacatgatgttattaaacagaagacacagacgtctttacaagcaagagaactgattgatacgattttagtaaaaggaaatattgcagccactgtattcagaaactctctgcaagaagctgaagctgtgttatatgagcatttatttgtgcaacaggacataaaatatattcccacagaagatgtttcagatctaccagtggaagaacaattgcggagactacaagaagaaagaacatgtaaagtgtgtatggacaaagaagtgtccatagtgtttattccttgtggtcatctagtagtatgcaaagattgtgctccttctttaagaaagtgtcctatttgtaggagtacaatcaagggtacagttcgtacatttctttcatgaagaagaaccaaaacatcgtctaaactttagaattaatttattaaatgtattataactttaacttttatcctaatttggtttccttaaaatttttatttatttacaactcaaaaaacattgttttgtgtaacatatttatatatgtatctaaaccatatgaacatatattttttagaaactaagagaatgataggcttttgttcttatgaacgaaaaagaggtagcactacaaacacaatattcaatcaaaatttcagcattattgaaattgtaagtgaagtaaaacttaagatatttgagttaacctttaagaattttaaatattttggcattgtactaataccgggaacatgaagccaggtgtggtggtatgtgcctgtagtcccaggctgaggcaagagaattacttgagcccaggagtttgaatccatcctgggcagcatactgagaccctgcctttaaaaacaaacagaacaaaaacaaaacaccagggacacatttctctgtcttttttgatcagtgtcctatacatcgaaggtgtgcatatatgttgaatgacattttagggacatggtgtttttataaagaattctgtgagaaaaaatttaataaagcaacaaaaattactcttaaaaaaaaaaaaaaa

SEQ ID NO: 1365 - DNA, 3753 bp, Homo Sapiens
  NM_001166
ggatggggcggcgggcttcgggagcgcccgggctgatccgagccgagcgggccgtatctccttgtcggcgccgctgattcccggctctgcggaggcctctaggcagccgcgcagcttccgtgtttgctgcgcccgcactgcgatttacaaccctgaagaatctccctatccctattttgtccccctgcagtaataaatcccattatggagatctcgaaactttataaagggatatagtttgaattctatggagtgtaattttgtgtatgaattatatttttaaaacattgaagagttttcagaaagaaggctagtagagttgattactgatactttatgctaagcagtacttttttggtagtacaatattttgttaggcgtttctgataacactagaaaggacaagttttatcttgtgataaattgattaatgtttacaacatgactgataattatagctgaatagtccttaaatgatgaacaggttatttagtttttaaatgcagtgtaaaaagtgtgctgtggaaattttatggctaactaagtttatggagaaaataccttcagttgatcaagaataatagtggtatacaaagttaggaagaaagtcaacatgatgctgcaggaaatggaaacaaatacaaatgatatttaacaaagatagagtttacagtttttgaactttaagccaaattcatttgacatcaagcactatagcaggcacaggttcaacaaagcttgtgggtattgacttcccccaaaagttgtcagctgaagtaatttagcccacttaagtaaatactatgatgataagctgtgtgaacttagcttttaaatagtgtgaccatatgaaggttttaattacttttgtttattggaataaaatgagattttttgggttgtcatgttaaagtgcttatagggaaagaagcctgcatataattttttaccttgtggcataatcagtaattggtctgttattcaggcttcatagcttgtaaccaaatataaataaaaggcataatttaggtattctatagttgcttagaattttgttaatataaatctctgtgaaaaatcaaggagttttaatattttcagaagtgcatccacctttcagggctttaagttagtattactcaagattatgaacaaatagcacttaggttacctgaaagagttactacaaccccaaagagttgtgttctaagtagtatcttggtaattcagagagatactcatcctacctgaatataaactgagataaatccagtaaagaaagtgtagtaaattctacataagagtctatcattgatttctttttgtggtaaaaatcttagttcatgtgaagaaatttcatgtgaatgttttagctatcaaacagtactgtcacctactcatgcacaaaactgcctcccaaagacttttcccaggtccctcgtatcaaaacattaagagtataatggaagatagcacgatcttgtcagattggacaaacagcaacaaacaaaaaatgaagtatgacttttcctgtgaactctacagaatgtctacatattcaactttccccgccggggtgcctgtctcagaaaggagtcttgctcgtgctggtttttattatactggtgtgaatgacaaggtcaaatgcttctgttgtggcctgatgctggataactggaaactaggagacagtcctattcaaaagcataaacagctatatcctagctgtagctttattcagaatctggtttcagctagtctgggatccacctctaagaatacgtctccaatgagaaacagttttgcacattcattatctcccaccttggaacatagtagcttgttcagtggttcttactccagcctttctccaaaccctcttaattctagagcagttgaagacatctcttcatcgaggactaacccctacagttatgcaatgagtactgaagaagccagatttcttacctaccatatgtggccattaacttttttgtcaccatcagaattggcaagagctggtttttattatataggacctggagatagggtagcctgctttgcctgtggtgggaagctcagtaactgggaaccaaaggatgatgctatgtcagaacaccggaggcattttcccaactgtccatttttggaaaattctctagaaactctgaggtttagcatttcaaatctgagcatgcagacacatgcagctcgaatgagaacatttatgtactggccatctagtgttccagttcagcctgagcagcttgcaagtgctggtttttattatgtgggtcgcaatgatgatgtcaaatgcttttgttgtgatggtggcttgaggtgttgggaatctggagatgatccatgggtagaacatgccaagtggtttccaaggtgtgagttcttgatacgaatgaaaggccaagagtttgttgatgagattcaaggtagatatcctcatcttcttgaacagctgttgtcaacttcagataccactggagaagaaaatgctgacccaccaattattcattttggacctggagaaagttcttcagaagatgctgtcatgatgaatacacctgtggttaaatctgccttggaaatgggctttaatagagacctggtgaaacaaacagttcaaagtaaaatcctgacaactggagagaactataaaacagttaatgatattgtgtcagcacttcttaatgctgaagatgaaaaaagagaagaggagaaggaaaaacaagctgaagaaatggcatcagatgatttgtcattaattcggaagaacagaatggctctctttcaacaattgacatgtgtgcttcctatcctggataatcttttaaaggccaatgtaattaataaacaggaacatgatattattaaacaaaaaacacagatacctttacaagcgagagaactgattgataccattttggttaaaggaaatgctgcggccaacatcttcaaaaactgtctaaaagaaattgactctacattgtataagaacttatttgtggataagaatatgaagtatattccaacagaagatgtttcaggtctgtcactggaagaacaattgaggaggttgcaagaagaacgaacttgtaaagtgtgtatggacaaagaagtttctgttgtatttattccttgtggtcatctggtagtatgccaggaatgtgccccttctctaagaaaatgccctatttgcaggggtataatcaagggtactgttcgtacatttctctcttaaagaaaaatagtctatattttaacctgcataaaaaggtctttaaaatattgttgaacacttgaagccatctaaagtaaaaagggaattatgagtttttcaattagtaacattcatgttctagtctgctttggtactaataatcttgtttctgaaaagatggtatcatatatttaatcttaatctgtttatttacaagggaagatttatgtttggtgaactatattagtatgtatgtgtacctaagggagtagtgtcactgcttgttatgcatcatttcaggagttactggatttgttgttctttcagaaagctttgaatactaaattatagtgtagaaaagaactggaaaccaggaactctggagttcatcagagttatggtgccgaattgtctttggtgcttttcacttgtgttttaaaataaggatttttctcttatttctccccctagtttgtgagaaacatctcaataaagtgctttaaaaagaaaaaaaaaaa

SEQ ID NO: 1366 - DNA, 2655 bp, Homo Sapiens
  NM_001168
cccagaaggccgcggggggtggaccgcctaagagggcgtgcgctcccgacatgccccgcggcgcgccattaaccgccagatttgaatcgcgggacccgttggcagaggtggcggcggcggcatgggtgccccgacgttgccccctgcctggcagccctttctcaaggaccaccgcatctctacattcaagaactggcccttcttggagggctgcgcctgcaccccggagcggatggccgaggctggcttcatccactgccccactgagaacgagccagacttggcccagtgtttcttctgcttcaaggagctggaaggctgggagccagatgacgaccccatagaggaacataaaaagcattcgtccggttgcgctttcctttctgtcaagaagcagtttgaagaattaacccttggtgaatttttgaaactggacagagaaagagccaagaacaaaattgcaaaggaaaccaacaataagaagaaagaatttgaggaaactgcggagaaagtgcgccgtgccatcgagcagctggctgccatggattgaggcctctggccggagctgcctggtcccagagtggctgcaccacttccagggtttattccctggtgccaccagccttcctgtgggccccttagcaatgtcttaggaaaggagatcaacattttcaaattagatgtttcaactgtgctcttgttttgtcttgaaagtggcaccagaggtgcttctgcctgtgcagcgggtgctgctggtaacagtggctgcttctctctctctctctcttttttgggggctcatttttgctgttttgattcccgggcttaccaggtgagaagtgagggaggaagaaggcagtgtcccttttgctagagctgacagctttgttcgcgtgggcagagccttccacagtgaatgtgtctggacctcatgttgttgaggctgtcacagtcctgagtgtggacttggcaggtgcctgttgaatctgagctgcaggttccttatctgtcacacctgtgcctcctcagaggacagtttttttgttgttgtgtttttttgtttttttttttttggtagatgcatgacttgtgtgtgatgagagaatggagacagagtccctggctcctctactgtttaacaacatggctttcttattttgtttgaattgttaattcacagaatagcacaaactacaattaaaactaagcacaaagccattctaagtcattggggaaacggggtgaacttcaggtggatgaggagacagaatagagtgataggaagcgtctggcagatactccttttgccactgctgtgtgattagacaggcccagtgagccgcggggcacatgctggccgctcctccctcagaaaaaggcagtggcctaaatcctttttaaatgacttggctcgatgctgtgggggactggctgggctgctgcaggccgtgtgtctgtcagcccaaccttcacatctgtcacgttctccacacgggggagagacgcagtccgcccaggtccccgctttctttggaggcagcagctcccgcagggctgaagtctggcgtaagatgatggatttgattcgccctcctccctgtcatagagctgcagggtggattgttacagcttcgctggaaacctctggaggtcatctcggctgttcctgagaaataaaaagcctgtcatttcaaacactgctgtggaccctactgggtttttaaaatattgtcagtttttcatcgtcgtccctagcctgccaacagccatctgcccagacagccgcagtgaggatgagcgtcctggcagagacgcagttgtctctgggcgcttgccagagccacgaaccccagacctgtttgtatcatccgggctccttccgggcagaaacaactgaaaatgcacttcagacccacttatttctgccacatctgagtcggcctgagatagacttttccctctaaactgggagaatatcacagtggtttttgttagcagaaaatgcactccagcctctgtactcatctaagctgcttatttttgatatttgtgtcagtctgtaaatggatacttcactttaataactgttgcttagtaattggctttgtagagaagctggaaaaaaatggttttgtcttcaactcctttgcatgccaggcggtgatgtggatctcggcttctgtgagcctgtgctgtgggcagggctgagctggagccgcccctctcagcccgcctgccacggcctttccttaaaggccatccttaaaaccagaccctcatggctaccagcacctgaaagcttcctcgacatctgttaataaagccgtaggcccttgtctaagtgcaaccgcctagactttctttcagatacatgtccacatgtccatttttcaggttctctaagttggagtggagtctgggaagggttgtgaatgaggcttctgggctatgggtgaggttccaatggcaggttagagcccctcgggccaactgccatcctggaaagtagagacagcagtgcccgctgcccagaagagaccagcaagccaaactggagcccccattgcaggctgtcgccatgtggaaagagtaactcacaattgccaataaagtctcatgtggttttatctaaaaaaaaaaaaaaaaaaaaaaaaa

SEQ ID NO: 1367 - DNA, 1981 bp, Homo Sapiens
  NM_001172
cacggggcgggcggacgctggcgcgggtaggtaagagcagcggcgggcggtggcgctcactcccggcttccaaccgcgcggagcctctgccttggagattctcagtgctgcggatcatgtccctaaggggcagcctctcgcgtctcctccagacgcgagtgcattccatcctgaagaaatccgtccactccgtggctgtgataggagccccgttctcacaagggcagaaaagaaaaggagtggagcatggtcccgctgccataagagaagctggcttgatgaaaaggctctccagtttgggctgccacctaaaagactttggagatttgagttttactccagtccccaaagatgatctctacaacaacctgatagtgaatccacgctcagtgggtcttgccaaccaggaactggctgaggtggttagcagagctgtgtcagatggctacagctgtgtcacactgggaggagaccacagcctggcaatcggtaccattagtggccatgcccgacactgcccagacctttgtgttgtctgggttgatgcccatgctgacatcaacacaccccttaccacttcatcaggaaatctccatggacagccagtttcatttctcctcagagaactacaggataaggtaccacaactcccaggattttcctggatcaaaccttgtatctcttctgcaagtattgtgtatattggtctgagagacgtggaccctcctgaacattttattttaaagaactatgatatccagtatttttccatgagagatattgatcgacttggtatccagaaggtcatggaacgaacatttgatctgctgattggcaagagacaaagaccaatccatttgagttttgatattgatgcatttgaccctacactggctccagccacaggaactcctgttgtcgggggactaacctatcgagaaggcatgtatattgctgaggaaatacacaatacagggttgctatcagcactggatcttgttgaagtcaatcctcagttggccacctcagaggaagaggcgaagactacagctaacctggcagtagatgtgattgcttcaagctttggtcagacaagagaaggagggcatattgtctatgaccaacttcctactcccagttcaccagatgaatcagaaaatcaagcacgtgtgagaatttaggagacactgtgcactgacatgtttcacaacaggcattccagaattatgaggcattgaggggatagatgaatactaaatggttgtctgggtcaatactgccttaatgagaacatttacacattctcacaattgtaaagtttcccctctattttggtgaccaatactactgtaaatgtatttggttttttgcagttcacagggtattaatatgctacagtactatgtaaatttaaagaagtcataaacagcatttattaccttggtatatcatactggtcttgttgctgttgttccttcacatttaagtggtttttcatctttcctccctcctcccacagcctggctatacagtgcatccttgaactgtcagcccacagcagcaatatgcttattctatccacatccctaacatcatgcattcacaaggtcaaagttctggtccacaaacccttccctatagaagttcaatggctgcgaaagaatttgtagtaaaccaggcctcccaggatggcgagctccagtaagatgataatggaaagcagcagcttgttggttgtcactctacaaagagaagcaaagtggggagtagtcagaagtttggataaccttccttctaaacattttggggttagacctgggaccacggctggatactctgaggctgtatgtttgatcacacagccacttagcaggaagtactcataaggttctttagctgtcacttagggataacactgtctacctcacagaaatgttaaactgagacaataaaaaccaaagcataaaaatggattctgaaa

SEQ ID NO: 1368 - DNA, 1216 bp, Homo Sapiens
  NM_001175
ctcattgacttccttcctgttctaactgccagtactcagaagtcagagttgagagacagaggcaccccggacagagacgtgaagcactgaataaatagatcagaatgactgaaaaagccccagagccacatgtggaggaggatgatgatgatgagctggacagcaagctcaattataagcctccaccacagaagtccctgaaagagctgcaggaaatggacaaagatgatgagagtctaattaagtacaagaaaacgctgctgggagatggtcctgtggtgacagatccgaaagcccccaatgtcgttgtcacccggctcaccctggtttgtgagagtgccccgggaccaatcaccatggaccttactggagatctggaagccctcaaaaaggaaaccattgtgttaaaggaaggttctgaatatagagtcaaaattcacttcaaagtgaacagggatattgtgtcaggcctgaaatacgttcagcacacctacaggactggggtgaaagtggataaagcaacatttatggttggcagctatggacctcggcctgaggagtatgagttcctcactccagttgaggaggctcccaagggcatgctggcgcgaggcacgtaccacaacaagtccttcttcaccgacgatgacaagcaagaccacctcagctgggagtggaacctgtcgattaagaaggagtggacagaatgaatgcatccacccctttccccacccttgccacctggaagaattctctcaggcgtgttcagcaccctgtccctcctccctgtccacagctgggtccctcttcaacactgccacatttccttattgatgcatcttttcccaccctgtcactcaacgtggtccctagaacaagaggcttaaaaccgggctttcacccaacctgctccctctgatcctccatcagggccagatcttccacgtctccatctcagtacacaatcatttaatatttccctgtcttacccctattcaagcaactagaggccagaaaatgggcaaattatcactaacaggtctttgactcaggttccagtagttcattctaatgcctagattcttttgtggttgttgctggcccaatgagtccctagtcacatcccctgccagagggagttcttcttttgtgagagacactgtaaacgacacaagagaacaagaataaaacaataactgtgtgtgttctggctgag

SEQ ID NO: 1369 - DNA, 3215 bp, Homo Sapiens
  NM_001177
gcagtcgcagctgaccctcgctcccgcccccgcctggagtccgacgtggaagttgctggctgactgggcttgcgaggaaaccgcctcggagctgcagccgaaggccaaggaatcactgaagatcggcgagggaggacagggggttcatcatgggtggctttttctcaagtatattttccagtctgtttggaactcgggaaatgagaattttaattttgggattagatggagcaggaaaaaccacaattttgtacagattacaagtgggagaagttgttactactatacctaccattggatttaatgtagagacggtgacgtacaaaaaccttaaattccaagtctgggatttaggaggacagacaagtatcaggccatactggagatgttactattcaaacacagatgcagtcatttatgtagtagacagttgtgaccgagaccgaattggcatttccaaatcagagttagttgccatgttggaggaagaagagctgagaaaagccattttagtggtgtttgcaaataaacaggacatggaacaggccatgacttcctcagagatggcaaattcacttgggttacctgccttgaaggaccgaaaatggcagatattcaaaacgtcagcaaccaaaggcaccggccttgatgaggcaatggaatggttagttgaaacattaaaaagcagacagtaattcagtccattcttctcccctgaaatgaagactacatcacctctctccctttggaaacagtcaagtgtacttcacactactagatgttaaaactatatgattattggcatatactgactgactgcaatatttgtagtaaatagggaaaataagtatttagttggagggataatttgatcgaatcacctgaatgttctatgtaatgtaaaatattcttttcttgctttcttgtgttaaggtatatattctatttgtatggaattcttattcaaatacagttctattaaagagtatactcctattggatgaaaaaaacctatttttgaatagtagttgcagcttgtttgtataaatactaaaaaatatcttaacagatttttttccccttaaaatgaattatctttccaaagattagactcagtatgagagtaggtgaggaacatagtttgtgtaatataatctttatttgcttacctgaccactttttattaagctgttttgtttaaaagcttttggttataggcatgaatattgttttgatggttaacttcactgacttatctgtaagtgtcattttatagtactttacagttgtcaaaaaaaatcttacatatattgatctagttgatcggtagaggaagcttgtgaagtaggtaggacaggttatgatgtcttcactgtatggacgtgaacccagggttctaataggttggcttgcccaaggtcacctgctagcttgtaaggtaggaatagggctcaaagtaaaacttttggttcagaagcttgactcataaactatactatatattcccaaaaatgtcagtattgacaacacagtctaactcttaaataaaattatgctaattagttacattcaaaataatgtttataaatttatttgtctatactagtagaagtgatcagtgacatactataaataatcctaaatggttatatttgatagaattcataacacattaaagagaaaatttcacattaaaggaaggtttaaaaatctattttcagattataaaaggtgtctttactggttttcattccttttatctacatgtaattggacatgtaaacttgttaaaaatcaaaatcttactgattgtacagggagaaattaagcattctgttttaaaaattaggcttattgctagactgtaagtttaaaaacaattcatgttcaaaggagcttttcaaattacccagtccaccacagaatcagctaatgtgacagaagtaaatatagtgcgtcataattgctaaaaacagggtgaatttctttcacttaagttggaaaaccagcctctaaaaaattaggtgctggtaatgagagcttaataccatggttccctgcaggtctcagaaacattagtagttcctttcttggccctcactgtccttccagtgttggcctctggcctcttcccctcacatttatgttcattctccgggcttatattcattctctgctgctttctcccttcacccgtgggactctcacccttcttgctcattctccagcacccattcctactttagtctctttgaaatcttttttggagattttccttcagctacaaatgttccagtacaaccaatattactcctgaggggcaaagactttttcatatttatgtccctagtatctggtatggcgcctggcatatggcatttcagaatatgttcatagttgaaacagtaggatagatatttgtcatcttgacaagtagccctttgcaatttatacttgagttcactcctggtcaatggcacatggctggaaaatgcagaaagcaagttcacttacagcctgaggcttataaagcttgtacagctgcctcccggcagtccaggaaaactgcaaaaaatgggaagtaaggtcctggcaggcagacccggcatgtagccgctggccatcttgaatcctagggcatgaagttgccccaaagttcagcacttggttaagcctgatccctctggtttatcacaaagaataggatgggataaagaaagtggacacttaaataagctataaattatatggtccttgtctagcaggagacaactgcacaggtatactaccagcgtttggatattgatatatacatggcaaatctgaatattgttttatgagaggcctggcaatgggtaaaacaccaaacttgaaatcagaacataggtgcaaatggccactcctgtagtttcttttctgtaaaatgggatctggacgaatgataccaaacgtttctttctaacattgtattttataactctggcctatgattgtgttgtgtcttgcattaaaaaaaaaaatttgagagtggtagaattacttctgttatctgaaatacctgagatgcactttaaactgttgaaatgtaagctctgagggcagggaccgtatcttatttactgttagtatccgttgcatctagtgtggtgcacctggcacacagtaggcactcaataaatatgtattgattaaaaacaaagacgtcttcaaaaaaa

SEQ ID NO: 1370 - DNA, 2109 bp, Homo Sapiens
  NM_001183
gggggcaacggtcacctgatctgcggctgtcgaggccgctgaggcagtggaggctgaggctatgatggcggccatggcgacggctcgagtgcggatggggccgcgatgcgcccaggcgctctggcgcatgccgtggctgccggtgtttttgtcgttggcggcggcggcggcggcggcagcggcggagcagcaggtcccgctggtgctgtggtcgagtgaccgggacttgtgggctcctgcggccgacactcatgaaggccacatcaccagcgacttgcagctctctacctacttagatcccgccctggagctgggtcccaggaatgtgctgctgttcctgcaggacaagctgagcattgaggatttcacagcatatggcggtgtgtttggaaacaagcaggacagcgccttttctaacctagagaatgccctggacctggccccctcctcactggtgcttcctgccgtcgactggtatgcagtcagcactctgaccacttacctgcaggagaagctcggggccagccccttgcatgtggacctggccaccctgcgggagctgaagctcaatgccagcctccctgctctgctgctcattcgcctgccctacacagccagctctggtctgatggcacccagggaagtcctcacaggcaacgatgaggtcatcgggcaggtcctgagcacactcaagtccgaagatgtcccatacacagcggccctcacagcggtccgcccttccagggtggcccgtgatgtagccgtggtggccggagggctaggtcgccagctgctacaaaaacagccagtatcacctgtgatccatcctcctgtgagttacaatgacaccgctccccggatcctgttctgggcccaaaacttctctgtggcgtacaaggaccagtgggaggacctgactcccctcacctttggggtgcaggaactcaacctgactggctccttctggaatgactcctttgccaggctctcactgacctatgaacgactctttggtaccacagtgacattcaagttcattctggccaaccgcctctacccagtgtctgcccggcactggtttaccatggagcgcctcgaagtccacagcaatggctccgtcgcctacttcaatgcttcccaggtcacagggcccagcatctactccttccactgcgagtatgtcagcagcctgagcaagaagggtagtctcctcgtggcccgcacgcagccctctccctggcagatgatgcttcaggacttccagatccaggctttcaacgtaatgggggagcagttctcctacgccagcgactgtgccagcttcttctcccccggcatctggatggggctgctcacctccctgttcatgctcttcatcttcacctatggcctgcacatgatcctcagcctcaagaccatggatcgctttgatgaccacaagggccccactatttctttgacccagattgtgtgaccctgtgccagtgggggggttgagggtgggacggtgtccgtgttgttgctttcccaccctgcagcgcactggactgaagagcttccctcttcctactgcagcatgaactgcaagctcccctcagcccatcttgctccctcttcagcccgctgaggagctttcttgggctgcccccatctctcccaacaaggtgtacatattctgcgtagatgctagaccaaccagcttcccagggttcgtcgctgtgaggcgtaagggacatgaattctagggtctcctttctccttatttattcttgtggctacatcatccctggctgtggatagtgcttttgtgtagcaaatgctccctccttaaggttatagggctccctgagtttgggagtgtggaagtactacttaactgtctgtcctgcttggctgtcgttatcgttttctggtgatgttgtgctaacaataagaagtacacgggtttatttctgtggcctgagaaggaagggacctccacgacaggtgggctgggtgcgatcgccggctgtttggcatgttcccaccgggagtgccgggcaggagcatggggtgcttggttgtttccttcctaataaaataaacgcgggtcgccatgcaaaaaaaaaa

SEQ ID NO: 1371 - DNA, 8258 bp, Homo Sapiens
  NM_001184
ttccgggaggagttttggcctccacacggctccgtcgggcgccgcgctcttccggcagcggtagctttggagacgccgggaacccgcgttggcgtggttgactagtgcctcgcagcctcagcatgggggaacatggcctggagctggcttccatgatccccgccctgcgggagctgggcagtgccacaccagaggaatataatacagttgtacagaagccaagacaaattctgtgtcaattcattgaccggatacttacagatgtaaatgttgttgctgtagaacttgtaaagaaaactgactctcagccaacctccgtgatgttgcttgatttcatccagcatatcatgaaatcctccccacttatgtttgtaaatgtgagtggaagccatgaggccaaaggcagttgtattgaattcagtaattggatcataacgagacttctgcggattgcagcaactccctcctgtcatttgttacacaagaaaatctgtgaagtcatctgttcattattatttctttttaaaagcaagagtcctgctatttttggggtactcacaaaagaattattacaactttttgaagacttggtttacctccatagaagaaatgtgatgggtcatgctgtggaatggccagtggtcatgagccgatttttaagtcaattagatgaacacatgggatatttacaatcagctcctttgcagttgatgagtatgcaaaatttagaatttattgaagtcactttattaatggttcttactcgtattattgcaattgtgttttttagaaggcaagaactcttactttggcagataggttgtgttctgctagagtatggtagtccaaaaattaaatccctagcaattagctttttaacagaactttttcagcttggaggactaccagcacaaccagctagcacttttttcagctcatttttggaattattaaaacaccttgtagaaatggatactgaccaattgaaactctatgaagagccattatcaaagctgataaagacactatttccctttgaagcagaagcttatagaaatattgaacctgtctatttaaatatgctgctggaaaaactctgtgtcatgtttgaagacggtgtgctcatgcggcttaagtctgatttgctaaaagcagctttgtgccatttactgcagtatttccttaaatttgtgccagctgggtatgaatctgctttacaagtcaggaaggtctatgtgagaaatatttgtaaagctcttttggatgtgcttggaattgaggtagatgcagagtacttgttgggcccactttatgcagctttgaaaatggaaagtatggaaatcattgaggagattcaatgccaaactcaacaggaaaacctcagcagtaatagtgatggaatatcacccaaaaggcgtcgtctcagctcgtctctaaacccttctaaaagagcaccaaaacagactgaggaaattaaacatgtggacatgaaccaaaagagcatattatggagtgcactgaaacagaaagctgaatcccttcagatttcccttgaatacagtggcctaaagaatcctgttattgagatgttagaaggaattgctgttgtcttacaactgactgctctgtgtactgttcattgttctcatcaaaacatgaactgccgtactttcaaggactgtcaacataaatccaagaagaaaccttctgtagtgataacttggatgtcattggatttttacacaaaagtgcttaagagctgtagaagtttgttagaatctgttcagaaactggacctggaggcaaccattgataaggtggtgaaaatttatgatgctttgatttatatgcaagtaaacagttcatttgaagatcatatcctggaagatttatgtggtatgctctcacttccatggatttattcccattctgatgatggctgtttaaagttgaccacatttgccgctaatcttctaacattaagctgtaggatttcagatagctattcaccacaggcacaatcacgatgtgtgtttcttctgactctgtttccaagaagaatattccttgagtggagaacagcagtttacaactgggccctgcagagctcccatgaagtaatccgggctagttgtgttagtggattttttatcttattgcagcagcagaattcttgtaacagagttcccaagattcttatagataaagtcaaagatgattctgacattgtcaagaaagaatttgcttctatacttggtcaacttgtctgtactcttcacggcatgttttatctgacaagttctttaacagaacctttctctgaacacggacatgtggacctcttctgtaggaacttgaaagccacttctcaacatgaatgttcatcttctcaactaaaagcttctgtctgcaagccattccttttcctactgaaaaaaaaaatacctagtccagtaaaacttgctttcatagataatctacatcatctttgtaagcatcttgattttagagaagatgaaacagatgtaaaagcagttcttggaactttattaaatttaatggaagatccagacaaagatgttagagtggcttttagtggaaatatcaagcacatattggaatccttggactctgaagatggatttataaaggagctttttgtcttaagaatgaaggaagcatatacacatgcccaaatatcaagaaataatgagctgaaggataccttgattcttacaacaggggatattggaagggccgcaaaaggagatttggtaccatttgcactcttacacttattgcattgtttgttatccaagtcagcatctgtctctggagcagcatacacagaaattagagctctggttgcagctaaaagtgttaaactgcaaagttttttcagccagtataagaaacccatctgtcagtttttggtagaatcccttcactctagtcagatgacagcacttccgaatactccatgccagaatgctgacgtgcgaaaacaagatgtggctcaccagagagaaatggctttaaatacgttgtctgaaattgccaacgttttcgactttcctgatcttaatcgttttcttactaggacattacaagttctactacctgatcttgctgccaaagcaagccctgcagcttctgctctcattcgaactttaggaaaacaattaaatgtcaatcgtagagagattttaataaacaacttcaaatatattttttctcatttggtctgttcttgttccaaagatgaattagaacgtgcccttcattatctgaagaatgaaacagaaattgaactggggagcctgttgagacaagatttccaaggattgcataatgaattattgctgcgtattggagaacactatcaacaggtttttaatggtttgtcaatacttgcctcatttgcatccagtgatgatccatatcagggcccgagagatatcatatcacctgaactgatggctgattatttacaacccaaattgttgggcattttggctttttttaacatgcagttactgagctctagtgttggcattgaagataagaaaatggccttgaacagtttgatgtctttgatgaagttaatgggacccaaacatgtcagttctgtgagggtgaagatgatgaccacactgagaactggccttcgattcaaggatgattttcctgaattgtgttgcagagcttgggactgctttgttcgctgcctggatcatgcttgtctgggctcccttctcagtcatgtaatagtagctttgttacctcttatacacatccagcctaaagaaactgcagctatcttccactacctcataattgaaaacagggatgctgtgcaagattttcttcatgaaatatattttttacctgatcatccagaattaaaaaagataaaagccgttctccaggaatacagaaaggagacctctgagagcactgatcttcagacaactcttcagctctctatgaaggccattcaacatgaaaatgtcgatgttcgtattcatgctcttacaagcttgaaggaaaccttgtataaaaatcaggaaaaactgataaagtatgcaacagacagtgaaacagtagaacctattatctcacagttggtgacagtgcttttgaaaggttgccaagatgcaaactctcaagctcggttgctctgtggggaatgtttaggggaattgggggcgatagatccaggtcgattagatttctcaacaactgaaactcaaggaaaagattttacatttgtgactggagtagaagattcaagctttgcctatggattattgatggagctaacaagagcttaccttgcgtatgctgataatagccgagctcaagattcagctgcctatgccattcaggagttgctttctatttatgactgtagagagatggagaccaacggcccaggtcaccaattgtggaggagatttcctgagcatgttcgggaaatactagaacctcatctaaataccagatacaagagttctcagaagtcaaccgattggtctggagtaaagaagccaatttacttaagtaaattgggtagtaactttgcagaatggtcagcatcttgggcaggttatcttattacaaaggttcgacatgatcttgccagtaaaattttcacctgctgtagcattatgatgaagcatgatttcaaagtgaccatctatcttcttccacatattctggtgtatgtcttactgggttgtaatcaagaagatcagcaggaggtttatgcagaaattatggcagttctaaagcatgacgatcagcataccataaatacccaagacattgcatctgatctgtgtcaactcagtacacagactgtgttctccatgcttgaccatctcacacagtgggcaaggcacaaatttcaggcactgaaagctgagaaatgtccacacagcaaatcaaacagaaataaggtagactcaatggtatctactgtggattatgaagactatcagagtgtaacccgttttctagacctcataccccaggatactctggcagtagcttcctttcgctccaaagcatacacacgagctgtaatgcactttgaatcatttattacagaaaagaagcaaaatattcaggaacatcttggatttttacagaaattgtatgctgctatgcatgaacctgatggagtggccggagtcagtgcaattagaaaggcagaaccatctctaaaagaacagatccttgaacatgaaagccttggcttgctgagggatgccactgcttgttatgacagggctattcagctagaaccagaccagatcattcattatcatggtgtagtaaagtccatgttaggtcttggtcagctgtctactgttatcactcaggtgaatggagtgcatgctaacaggtccgagtggacagatgaattaaacacgtacagagtggaagcagcttggaaattgtcacagtgggatttggtggaaaactatttggcagcagatggaaaatctacaacatggagtgtcagactgggacagctattattatcagccaaaaaaagagatatcacagctttttatgactcactgaaactagtgagagcagaacaaattgtacctctttcagctgcaagctttgaaagaggctcctaccaacgaggatatgaatatattgtgagattgcacatgttatgtgagttggagcatagcatcaaaccacttttccagcattctccaggtgacagttctcaagaagattctctaaactgggtagctcgactagaaatgacccagaattcctacagagccaaggagcctatcctggctctccggagggctttactaagcctcaacaaaagaccagattacaatgaaatggttggagaatgctggctgcagagtgccagggtagctagaaaggctggtcaccaccagacagcctacaatgctctccttaatgcaggggaatcacgactcgctgaactgtacgtggaaagggcaaagtggctctggtccaagggtgatgttcaccaggcactaattgttcttcaaaaaggtgttgaattatgttttcctgaaaatgaaaccccacctgagggtaagaacatgttaatccatggtcgagctatgctactagtgggccgatttatggaagaaacagctaactttgaaagcaatgcaattatgaaaaaatataaggatgtgaccgcgtgcctgccagaatgggaggatgggcatttttaccttgccaagtactatgacaaattgatgcccatggtcacagacaacaaaatggaaaagcaaggtgatctcatccggtatatagttcttcattttggcagatctctacaatatggaaatcagttcatatatcagtcaatgccacgaatgttaactctatggcttgattatggtacaaaggcatatgaatgggaaaaagctggccgctccgatcgtgtacaaatgaggaatgatttgggtaaaataaacaaggttatcacagagcatacaaactatttagctccatatcaatttttgactgctttttcacaattgatctctcgaatttgtcattctcacgatgaagtttttgttgtcttgatggaaataatagccaaagtatttctagcctatcctcaacaagcaatgtggatgatgacagctgtgtcaaagtcatcttatcccatgcgtgtgaacagatgcaaggaaatcctcaataaagctattcatatgaaaaaatccttagagaagtttgttggagatgcaactcgcctaacagataagcttctagaattgtgcaataaaccggttgatggaagtagttccacattaagcatgagcactcattttaaaatgcttaaaaagctggtagaagaagcaacatttagtgaaatcctcattcctctacaatcagtcatgatacctacacttccatcaattctgggtacccatgctaaccatgctagccatgaaccatttcctggacattgggcctatattgcagggtttgatgatatggtggaaattcttgcttctcttcagaaaccaaagaagatttctttaaaaggctcagatggaaagttctacatcatgatgtgtaagccaaaagatgacctgagaaaggattgtagactaatggaattcaattccttgattaataagtgcttaagaaaagatgcagagtctcgtagaagagaacttcatattcgaacatatgcagttattccactaaatgatgaatgtgggattattgaatgggtgaacaacactgctggtttgagacctattctgaccaaactatataaagaaaagggagtgtatatgacaggaaaagaacttcgccagtgtatgctaccaaagtcagcagctttatctgaaaaactcaaagtattccgagaatttctcctgcccaggcatcctcctatttttcatgagtggtttctgagaacattccctgatcctacatcatggtacagtagtagatcagcttactgccgttccactgcagtaatgtcaatggttggttatattctggggcttggagaccgtcatggtgaaaatattctctttgattctttgactggtgaatgcgtacatgtagatttcaattgtcttttcaataagggagaaacctttgaagttccagaaattgtgccatttcgcctgactcataatatggttaatggaatgggtcctatgggaacagagggtctttttcgaagagcatgtgaagttacaatgaggctgatgcgtgatcagcgagagcctttaatgagtgtcttaaagacttttctacatgatcctcttgtggaatggagtaaaccagtgaaagggcattccaaagcgccactgaatgaaactggagaagttgtcaatgaaaaggccaagacccatgttcttgacattgagcagcgactacaaggtgtaatcaagactcgaaatagagtgacaggactgccgttatctattgaaggacatgtgcattaccttatacaggaagctactgatgaaaacttactatgccagatgtatcttggttggactccatatatgtgaaatgaaattatgtaaaagaatatgttaataatctaaaagtaatgcatttggtatgaatctgtggttgtatctgttcaattctaaagtacaacataaatttacgttctcagcaactgttatttctctctgatcattaattatatgtaaaataatatacattcagttattaagaaataaactgctttcttaatacaaaaaaaa

SEQ ID NO: 1372 - DNA, 1616 bp, Homo Sapiens
  NM_001190
aacgtctctcttcggagccgcgccccgggcgggcacagttacgcgccgcacggatcatggccgcagccgctctggggcagatctgggcacgaaagcttctctctgtcccttggcttctgtgtggtcccagaagatatgcctcctccagtttcaaggctgcagacctgcagctggaaatgacacagaagcctcataagaagcctggccccggcgagcccctggtgtttgggaagacatttaccgaccacatgctgatggtggaatggaatgacaagggctggggccagccccgaatccagcccttccagaacctcacgctgcacccagcctcctccagcctccactactccctgcagctgtttgagggcatgaaggcgttcaaaggcaaagaccagcaggtgcgcctcttccgcccctggctcaacatggaccggatgctgcgctcagccatgcgcctgtgcctgccgagtttcgacaagctggagttgctggagtgcatccgccggctcatcgaagtggacaaggactgggtccccgatgccgccggcaccagcctctatgtgcggcctgtgctcattgggaacgagccctcgctgggtgtcagccagcccacgcgcgcgctcctgttcgtcattctctgcccagtgggtgcctacttccctggaggctccgtgaccccggtctccctcctggccgacccagccttcatccgggcctgggtgggcggggtcggcaactacaagttaggtgggaattatgggcccaccgtgttagtgcaacaggaggcactcaagcggggctgtgaacaggtcctctggctgtatgggcccgaccaccagctcaccgaggtgggaaccatgaacatctttgtctactggacccacgaagatggggtgctggagctggtgacgcccccgctgaatggtgttatcctgcctggagtggtcagacagagtctactggacatggctcagacctggggtgagttccgggtggtggagcgcacgatcaccatgaagcagttgctgcgggccctggaggagggccgcgtgcgggaagtctttggctcgggcaccgcttgccaggtctgcccagtgcaccgaatcctgtacaaagacaggaacctccacattcccaccatggaaaatgggcctgagctgatcctccgcttccagaaggagctgaaggagatccagtacggaatcagagcccacgagtggatgttcccggtgtgaagctgcaggctgtgctccagatccaccgacccgtagcatctcgtcacgccagcactcgcctccctaccaatgactcacctgaagtgcaatacgaaataaaaggccagcgggcggcgtctgggtctctggcgcccccatgtggttgcgacactcccaaagccgtaagggccgacccaggcatcttggcccccagcccctcgtcgcgggttcaggtccgcccattactccttgtcgtgcggtcaaggatacaccttggccccgattccggatctctccgttctcaggccagacccctggtgctgccgttgatttttttttctctgtctttgctgcaattttgaaataaaatgccaaagaacacacaaaaaaaaaaaaaaaaaa

SEQ ID NO: 1373 - DNA, 963 bp, Homo Sapiens
  NM_001197
gacacgaagcctcccgggtggcttacagacgctgccagcatcgccgccgccagaggagaaatgtctgaagtaagacccctctccagagacatcttgatggagaccctcctgtatgagcagctcctggaacccccgaccatggaggttcttggcatgactgactctgaagaggacctggaccctatggaggacttcgattctttggaatgcatggagggcagtgacgcattggccctgcggctggcctgcatcggggacgagatggacgtgagcctcagggccccgcgcctggcccagctctccgaggtggccatgcacagcctgggtctggctttcatctacgaccagactgaggacatcagggatgttcttagaagtttcatggacggtttcaccacacttaaggagaacataatgaggttctggagatccccgaaccccgggtcctgggtgtcctgcgaacaggtgctgctggcgctgctgctgctgctggcgctgctgctgccgctgctcagcgggggcctgcacctgctgctcaagtgaggccccggcggctcagggcggggctggccccacccccatgaccactgccctggaggtggcggcctgctgctgttatctttttaactgttttctcatgatgcctttttatatttaaaccccgagatagtgctggaacactgctgaggttttatactcaggttttttgttttttttttattccagttttcgttttttctaaaagatgaattcctatggctctgcaattgtcaccggttaactgtggcctgtgcccaggaagagccattcactcctgcccctgcccacacggcaggtagcagggggagtgctggtcacacccctgtgtgatatgtgatgccctcggcaaagaatctactggaatagattccgaggagcaggagtgctcaataaaatgttggtttccagcaaaaaaaaaaaaaa

SEQ ID NO: 1374 - DNA, 5165 bp, Homo Sapiens
  NM_001198
gggaagccagacggttaacacagacaaagtgctgccgtgacactcggccctccagtgttgcggagaggcaagagcagcgaccgcggcacctgtccgcccggagctgggacgcgggcgcccgggcggccggacgaagcgaggagggaccgccgaggtgcgcgtctgtgcggctcagcctggcgggggacgcggggagaatgtggactgggtagagatgaacgagacttttctcagatgttggatatttgcttggaaaaacgtgtgggtacgaccttggctgcccccaagtgtaactccagcactgtgaggtttcagggattggcagaggggaccaaggggaccatgaaaatggacatggaggatgcggatatgactctgtggacagaggctgagtttgaagagaagtgtacatacattgtgaacgaccacccctgggattctggtgctgatggcggtacttcggttcaggcggaggcatccttaccaaggaatctgcttttcaagtatgccaccaacagtgaagaggttattggagtgatgagtaaagaatacataccaaagggcacacgttttggacccctaataggtgaaatctacaccaatgacacagttcctaagaacgccaacaggaaatatttttggaggatctattccagaggggagcttcaccacttcattgacggctttaatgaagagaaaagcaactggatgcgctatgtgaatccagcacactctccccgggagcaaaacctggctgcgtgtcagaacgggatgaacatctacttctacaccattaagcccatccctgccaaccaggaacttcttgtgtggtattgtcgggactttgcagaaaggcttcactacccttatcccggagagctgacaatgatgaatctcacacaaacacagagcagtctaaagcaaccgagcactgagaaaaatgaactctgcccaaagaatgtcccaaagagagagtacagcgtgaaagaaatcctaaaattggactccaacccctccaaaggaaaggacctctaccgttctaacatttcacccctcacatcagaaaaggacctcgatgactttagaagacgtgggagccccgaaatgcccttctaccctcgggtcgtttaccccatccgggcccctctgccagaagactttttgaaagcttccctggcctacgggatcgagagacccacgtacatcactcgctcccccattccatcctccaccactccaagcccctctgcaagaagcagccccgaccaaagcctcaagagctccagccctcacagcagccctgggaatacggtgtcccctgtgggccccggctctcaagagcaccgggactcctacgcttacttgaacgcgtcctacggcacggaaggtttgggctcctaccctggctacgcacccctgccccacctcccgccagctttcatcccctcgtacaacgctcactaccccaagttcctcttgcccccctacggcatgaattgtaatggcctgagcgctgtgagcagcatgaatggcatcaacaactttggcctcttcccgaggctgtgccctgtctacagcaatctcctcggtgggggcagcctgccccaccccatgctcaaccccacttctctcccgagctcgctgccctcagatggagcccggaggttgctccagccggagcatcccagggaggtgcttgtcccggcgccccacagtgccttctcctttaccggggccgccgccagcatgaaggacaaggcctgtagccccacaagcgggtctcccacggcgggaacagccgccacggcagaacatgtggtgcagcccaaagctacctcagcagcgatggcagcccccagcagcgacgaagccatgaatctcattaaaaacaaaagaaacatgaccggctacaagacccttccctacccgctgaagaagcagaacggcaagatcaagtacgaatgcaacgtttgcgccaagactttcggccagctctccaatctgaaggtccacctgagagtgcacagtggagaacggcctttcaaatgtcagacttgcaacaagggctttactcagctcgcccacctgcagaaacactacctggtacacacgggagaaaagccacatgaatgccaggtctgccacaagagatttagcagcaccagcaatctcaagacccacctgcgactccattctggagagaaaccataccaatgcaaggtgtgccctgccaagttcacccagtttgtgcacctgaaactgcacaagcgtctgcacacccgggagcggccccacaagtgctcccagtgccacaagaactacatccatctctgtagcctcaaggttcacctgaaagggaactgcgctgcggccccggcgcctgggctgcccttggaagatctgacccgaatcaatgaagaaatcgagaagtttgacatcagtgacaatgctgaccggctcgaggacgtggaggatgacatcagtgtgatctctgtagtggagaaggaaattctggccgtggtcagaaaagagaaagaagaaactggcctgaaagtgtctttgcaaagaaacatggggaatggactcctctcctcagggtgcagcctttatgagtcatcagatctacccctcatgaagttgcctcccagcaacccactacctctggtacctgtaaaggtcaaacaagaaacagttgaaccaatggatccttaagattttcagaaaacacttattttgtttcttaagttatgacttggtgagtcagggtgcctgtaggaagtggcttgtacataatcccagctctgcaaagctctctcgacagcaaatggtttcccctcacctctggaattaaagaaggaactccaaagttactgaaatctcagggcatgaacaaggcaaaggccatatatatatatatatatatatctgtatacatattatatatacttatttacacctgtgtctatatatttgcccctgtgtattttgaatatttgtgtggacatgtttgcatagccttcccattactaagactattacctagtcataattattttttcaatgataatccttcataatttattatacaatttatcattcagaaagcaataattaaaaaagtttacaatgactggaaagattccttgtaatttgagtataaatgtatttttgtcttgtggccattctttgtagataatttctgcacatctgtataagtacctaagatttagttaaacaaatatatgacttcagtcaacctctctctctaataatggtttgaaaatgaggtttgggtaattgccaatgttggacagttgatgtgttcattcctgggatcctatcatttgaacagcattgtacataacttgggggtatgtgtgcaggattacccaagaataacttaagtagaagaaacaagaaagggaatcttgtatatttttgttgatagttcatgtttttcccccagccacaattttaccggaagggtgacaggaaggctttaccaacctgtctctccctccaaaagagcagaatcctcccaccgccctgccctccccaccgagtcctgtggccattcagagcggccacatgacttttgcatccattgtattatcagaaaatgtgaagaagaaaaaaatgccatgttttaaaaccactgcgaaaatttccccaaagcataggtggctttgtgtgtgtgcgatttgggggcttgagtctgggtggtgttttgttgttggtttttgttgctttttttttttttttttttttaatgtcaaaattgcacaaacatggtgctctaccaggaaggattcgaggtagataggctcaggccacactttaaaaacaaacacacaaacaacaaaaaacgggtattctagtcatcttggggtaaaagcgggtaatgaacattcctatccccaacacatcaattgtattttttctgtaaaactcagattttcctcagtatttgtgtttttacattttatggttaatttaatggaagatgaaagggcattgcaaagttgttcaacaacagttacctcattgagtgtgtccagtagtgcaggaaatgatgtcttatctaatgatttgcttctctagaggagaaaccgagtaaatgtgctccagcaagatagactttgtgttattctatcttttattctgctaagcccaaagattacatgttggtgttcaaagtgtagcaaaaaatgatgtatatttataaatctatttataccactatatcatatgtatatatatttataaccacttaaattgtgagccaagccatgtaaaagatctactttttctaagggcaaaaaaaaaaaaaaaaaaaaaagaacactcctttctgagactttgcttaatacttggtgacctcacaatcacgtcggtatgattgggcacccttgcctactgtaagagaccctaaaaccttggtgcagtggtggggaccacaaaacaaccagggaggaagagatacatcattttttagtattaaggaccatctaagacagctctattttttttttgccactttatgattatgtggtcacacccaagtcacagaaataaaaaactgactttaccgctgcaatttttctgttttcctccttactaaatactgatacattactccaatctattttataattatatttgacattttgttcacatcaactaatgttcacctgtagaagagaacaaatttcgaataatccagggaaacccaagagccttactggtcttctgtaacttccaagactgacagctttttatgtatcagtgtttgataaacacagtccttaactgaaggtaaaccaaagcatcacgttgacattagaccaaatacttttgattcccaactactcgtttgttctttttctccttttgtgctttcccatagtgagaatttttataaagacttcttgcttctctcaccatccatccttctcttttctgcctcttacatgtgaatgttgagcccacaatcaacagtggttttattttttcctctactcaaagttaaaactgaccaaagttactggctttttactttgctagaacaacaaactatcttatgtttacatactggtttacaatgttatttatgtgcaaattgtcaaaatgtaaattaaatataaatgttcatgctttaccaaaat

SEQ ID NO: 1375 - DNA, 1163 bp, Homo Sapiens
  NM_001212
ccggcggcgcctcaggtcgcggggcgcctaggcctgggttgtcctttgcatctgcacgtgttcgcagtcgtttccgcgatgctgcctctgctgcgctgcgtgccccgtgtgctgggctcctccgtcgccggcctccgcgctgccgcgcccgcctcgcctttccggcagctcctgcagccggcaccccggctgtgcacccggcccttcgggctgctcagcgtgcgcgcaggttccgagcggcggccgggcctcctgcggcctcgcggaccctgcgcctgtggctgtggctgcggctcgctgcacaccgacggagacaaagcttttgttgatttcctgagtgatgaaattaaggaggaaagaaaaattcagaagcataaaaccctccctaagatgtctggaggttgggagctggaactgaatgggacagaagcgaaattagtgcggaaagttgccggggaaaaaatcacggtcactttcaacattaacaacagcatcccaccaacatttgatggtgaggaggaaccctcgcaagggcagaaggttgaagaacaggagcctgaactgacatcaactcccaatttcgtggttgaagttataaagaatgatgatggcaagaaggcccttgtgttggactgtcattatccagaggatgaggttggacaagaagacgaggctgagagtgacatcttctctatcagggaagttagctttcagtccactggcgagtctgaatggaaggatactaattatacactcaacacagattccttggactgggccttatatgaccacctaatggatttccttgccgaccgaggggtggacaacacttttgcagatgagctggtggagctcagcacagccctggagcaccaggagtacattacttttcttgaagacctcaagagttttgtcaagagccagtagagcagacagatgctgaaagccatagtttcatggcaggctttggccagtgaacaaatcctactctgaagctagacatgtgctttgaaatgattatcatcctaatatcatgggggaaaaaataccaaatttaaattatatgttttgtgttctcatttattatcatttttttctgtacaaatctattatttctagatttttgtataacatgatagacataaaattggtttatctcctcc

SEQ ID NO: 1376 - DNA, 1686 bp, Homo Sapiens
  NM_001217
aagggacaagagagaagagagactgaaacagggagaagaggcaggagaggaggaggtggggagagcacgaagctggaggccgacactgagggagggcgggaggaggtgaagaaggagagaggggagaagaggcaggagctggaaaggagagagggaggaggaggaggagatgcgggatggagacctggagttaggtggcttgggagagcttaatgaaaagagaacggagaggaggtgtgggttaggaaccaagaggtagccctgggggcagcagaaggctgagaggagtaggaagatcaggagctagagggagactggagggttccgggaaaagagcagaggaaagaggaaagacacagagagacgggagagagaagaagagtgggtttgaagggcggatctcagtccctggctgctttggcatttggggaactgggactccctgtggggaggagaggaaagctggaagtcctggagggacagggtcccagaaggaggggacagaggagctgagagaggggggcagggcgttgggcaggggtccctcggaggcctcctggggatgggggctgcagctcgtctgagcgcccctcgagcgctggtactctgggctgcactgggggcagcagctcacatcggaccagcacctgaccccgaggactggtggagctacaaggataatctccagggaaacttcgtgccagggcctcctttctggggcctggtgaatgcagcgtggagtctgtgtgctgtggggaagcggcagagccccgtggatgtggagctgaagagggttctttatgacccctttctgcccccattaaggctcagcactggaggagagaagctccggggaaccttgtacaacaccggccgacatgtctccttcctgcctgcaccccgacctgtggtcaatgtgtctggaggtcccctcctttacagccaccgactcagtgaactgcggctgctgtttggagctcgcgacggagccggctcggaacatcagatcaaccaccagggcttctctgctgaggtgcagctcattcacttcaaccaggaactctacgggaatttcagcgctgcctcccgcggccccaatggcctggccattctcagcctctttgtcaacgttgccagtacctctaacccattcctcagtcgcctccttaaccgcgacaccatcactcgcatctcctacaagaatgatgcctactttcttcaagacctgagcctggagctcctgttccctgaatccttcggcttcatcacctatcagggctctctcagcaccccgccctgctccgagactgtcacctggatcctcattgaccgggccctcaatatcacctcccttcagatgcactccctgagactcctgagccagaatcctccatctcagatcttccagagcctcagcggtaacagccggcccctgcagcccttggcccacagggcactgaggggcaacagggacccccggcaccccgagaggcgctgccgaggccccaactaccgcctgcatgtggatggtgtcccccatggtcgctgagactccccttcgaggattgcacccgcccgtcctaagcctccccacaaggcgaggggagttacccctaaaacaaagctattaaagggacagaatacttcctgtttaaaaaaaaaaaaaaaaaaaaaaaaaaaaaaaaa

SEQ ID NO: 1377 - DNA, 5872 bp, Homo Sapiens
  NM_001221
aaaggagggagtgcgagagatccacgaagggacaggcttggagtcgctagagggaggtgtgggaccagcgaggagggggcttcgccagggagggggtgctggcaggcggagggagcggcgggaggaggcgccggaggaggagacggaggcctggggacggcagaagaggcttcgcctgagccgagcgctctttctctcgccgcgccgtcttgaagccgcgcgggctcgtgagcagcgcgaggccgccaaggtgcctcgcttcgccggagccgctgccgcccgccggagggaagccggcctcgggcgcgcacgctcgtcggagccccggcgcgccccgcgcctgagcctgctgacagcggccgctgggctcaggctgtccgctctgggctccgcggcctcggccccgctgcactccacctccgccccctcggactccctcccctctgcttctactcctcctgctccagtgcggatcgtttcgcaactgcttgccactcgtcccgtgcctggctgtttttccatttcccggccccctcttcttgagtactttaccccctgcatttggggacagggactggaaaaggggcgggtggagcgtccagtggagaagaaggaagcgaggcccgcaggaggaggaggatcggcggactgtggggaggagaccccacgccaccctttctggtcatctcccctcccgccccgcccctgcgcacactccctcgcgggcgagctactttcggaccaggaaagtaagagcggccctgggtgacagcgccgcggggccagtcccggggttagccgcgcgtctgctcgcttctggtccgtcgcgctcccagccagggcacagcccggaccgaggatggcttcgaccacaacctgcaccaggttcacggacgagtatcagcttttcgaggagcttggaaagggggcattctcagtggtgagaagatgtatgaaaattcctactggacaagaatatgctgccaaaattatcaacaccaaaaagctttctgctagggatcatcagaaactagaaagagaagctagaatctgccgtcttttgaagcaccctaatattgtgcgacttcatgatagcatatcagaagagggctttcactacttggtgtttgatttagttactggaggtgaactgtttgaagacatagtggcaagagaatactacagtgaagctgatgccagtcattgtatacagcagattctagaaagtgttaatcattgtcacctaaatggcatagttcacagggacctgaagcctgagaatttgcttttagctagcaaatccaagggagcagctgtgaaattggcagactttggcttagccatagaagttcaaggggaccagcaggcgtggtttggttttgctggcacacctggatatctttctccagaagttttacgtaaagatccttatggaaagccagtggatatgtgggcatgtggtgtcattctctatattctacttgtggggtatccacccttctgggatgaagaccaacacagactctatcagcagatcaaggctggagcttatgattttccatcaccagaatgggacacggtgactcctgaagccaaagacctcatcaataaaatgcttactatcaaccctgccaaacgcatcacagcctcagaggcactgaagcacccatggatctgtcaacgttctactgttgcttccatgatgcacagacaggagactgtagactgcttgaagaaatttaatgctagaagaaaactaaagggtgccatcttgacaactatgctggctacaaggaatttctcagcagccaagagtttgttgaagaaaccagatggagtaaaggagtcaactgagagttcaaatacaacaattgaggatgaagatgtgaaagcacgaaagcaagagattatcaaagtcactgaacaactgatcgaagctatcaacaatggggactttgaagcctacacaaaaatctgtgacccaggccttactgcttttgaacctgaagctttgggtaatttagtggaagggatggattttcaccgattctactttgaaaatgctttgtccaaaagcaataaaccaatccacactattattctaaaccctcatgtacatctggtaggggatgatgccgcctgcatagcatatattaggctcacacagtacatggatggcagtggaatgccaaagacaatgcagtcagaagagactcgtgtgtggcaccgccgggatggaaagtggcagaatgttcattttcatcgctcggggtcaccaacagtacccatcaagccaccctgtattccaaatgggaaagaaaacttctcaggaggcacctctttgtggcaaaacatctaaggcctgaaaaccattcacatatgggtcttctaaatttcaacagtgccacttctgcattctctgttctcaaggcacctggatggtgaccctgggccgtcctctcctcctcttcatgcatgtttctgagtgcatgaagttgtgaaggtcctacatgtaatgcatatgtgatgcatcatcttatcatatattccttcctatacattgtttacacttcaactacggggatgttccacacaaacttaaattactgttggcaaaacaatagggggagattagacaaaaaaaaaaatccacaatattccaagtacaactcttcatcaagtttctctgttaatgccaagatttaacagacttaagaactattgttctctgaatgacagttgtaagagaaatgtaaattttttagaactctttgctgttaatctgttttggtttgtttggtttttttttttttttttaaggtaaaaaaaaaatacaccttcagtttcctggtgtgatcctggttaaaatggatgatttttcattgaaagttttgctgattaacaattaaagtgggatgatatgtgggcaaaatcacttatgaaagtagaagcaagaatcagttggtttgctaccacataaagccatgctgtttttggtcaaactgtgtaaactggaaaaattcacatcatttctgagtttaatcactttaggatatattcacattgttttggtgaatttgctgaattgaattgtttttctttctcaaatctgtgatctcttttctttatcctgtttctttgttcctttcgtttgctttcttatttttcttttgttccattcttttcttacttttttcccttttccttttttggggaggctggctagtagtgtgtgagaaaagaatagaagtgaaatttgcataatgaatgtaaaagggaaataaaagtcttttgaaggtagctatactagcacttttgatcatcttcagggcccacaaaaatgttgtcaagattttaaaggtttataattctgcttaagctctagtttggacttaggtatcctaactatgttggaggtatttgcattgtttaaagttaggataaaagcaagttcctcctgtgactgcaacgtcttactgattgggacagttgccaggaggataccaacttgatagcagagggggttttatgcaaacgcactcacctccgccttggggaatgaaagggtcacttctgcatcatcactagctagttttctagtgttagagaggcttacaaatgtttgccattctcataagtgttttgaacttgatctttgtgacttgtgcttttttagcttctctcttgaatcagagtatcattgtcttcctccaaggagttagaatttcccagtttaaaacaaaaagggaaatgtcctaggttttctttgtgcttctcatttttcctttgttgattcaattcctgtgatttttgttctcttccctgaagtgctttacagtgcatggaatctccatcattgttattttaacgatagtaattcacagtcctcagaagcctatttttaaagcagaagcaaaaaagaaaaacaaaataacaaaaacaacccttcctcttttctctcatctcacctctctgtgttgattactaatcatcttagatattattgctagtggatgtatggtagatgggttgaagcttttctgataattattacacaatttaaaacaacatatatatttaaaataaatatatacagtaaatatattgagccatgttaacctgccaatgagatctgtgaaaaaataatggcctcatttttctctttttaatttcttttacccttttgtgaagcagctatacgtggcatacatgtatttaaagaaaaaaaaatagatgtagagtgttttttttacacttttaacttagcatgtggtgttgaagtattactgtagatcaagtttgtcttccgcactaagatgtgaggaaattgtgatttgttctctccaccacaaatgaattacacatttattatcttctatcattttgaaacactgcagtttaccatgggacactgtatatatttcttgccataatggtaaaggactgattgatatatttaagagttaataaatttgtgatttctgctgacagtgcgtccatctttatttcttcagaagaggtactgtatgtatgcctgcatagtgctggccagtgtcaagggcagtgtgtcctactctggtctcatttagtacataacaatttgcacttggtgagaatggcaagttaattgttctctgtgagcaaaacaatggtctcttctgggaaaatgttgctgagaacaatatagttaacaactaagactcctaaaagcttctctaaactgtaccctccaatccagccttcacatggctgctttttttttttttttttaatacgaacctgtccttgtaacactttgatgttatcatttctgggatacaggcaagcaccccagctcctgctactccccagcttgaacttgagcatacatggatgctcagcttcttttgatttgctaaaaacatcacacttgctcacatgcctgtttatgctgttcatgttgtttatgtttcttacctagaataaatagtctcttcccctacttcttttcccgacttcttactttttcctaagattcagtgtacagcatcatgctccacagcaaaccttcctaggccctattctgggcttgccttccctctcaaaacctacataatagattgtatttacctctcctgtcaaccacattgttttgaaaatatatttctatttgtgtctcctctactgcagtataatgtctccatgggcaagaactgtgtattcatcattgcattcctaaacccaaaccaaggccaggaatggagatatcattgataaatagttgttgaattgaggccaagcccttttgataacagaagcctcaaggggtacccagatagtccttgttttaatgatgggttctctcaccactgtcttgatgctctgagcaagttacctcttccctctgaccctcagtttccatatttgtaaaatgagaataaacataccaacttaataaagatattgtgaggattaatgggtacagagtgactagaatgatatttgatagaaattaaatggtagcagtataactattctgatcactgacattaatattcctattgttattattctttgctcacgagggtatacaactcttgttttgctgttgggctgccctctttatgtaggtttactgttaatgctgaggatatactcggactcaaatgtctcagcagaaggctgagagacaccaaatgaagtggtcatctagctgaatgtaggaaaaatgaaatgtagtagcaaatcagtatattctaaggaaattttcaaggaatattaatcttcacccaaattttgaatttttatgtaaaaaattataatttaagggtaaacatagatgacacagctttcgagtgatttcattgaataaaattctactgacttctatgaa

SEQ ID NO: 1378 - DNA, 3638 bp, Homo Sapiens
  NM_001222
agtctcgcggtgctgccgggctcagccccgtctcctcctcttgctccctcggccgggcggcggtgactgtgcaccgacgtcggcgcgggctgcaccgccgcgtccgcccgcccgccagcatggccaccaccgccacctgcacccgtttcaccgacgactaccagctcttcgaggagcttggcaagggtgctttctctgtggtccgcaggtgtgtgaagaaaacctccacgcaggagtacgcagcaaaaatcatcaataccaagaagttgtctgcccgggatcaccagaaactagaacgtgaggctcggatatgtcgacttctgaaacatccaaacatcgtgcgcctccatgacagtatttctgaagaagggtttcactacctcgtgtttgaccttgttaccggcggggagctgtttgaagacattgtggccagagagtactacagtgaagcagatgccagccactgtatacatcagattctggagagtgttaaccacatccaccagcatgacatcgtccacagggacctgaagcctgagaacctgctgctggcgagtaaatgcaagggtgccgccgtcaagctggctgattttggcctagccatcgaagtacagggagagcagcaggcttggtttggttttgctggcaccccaggttacttgtcccctgaggtcttgaggaaagatccctatggaaaacctgtggatatctgggcctgcggggtcatcctgtatatcctcctggtgggctatcctcccttctgggatgaggatcagcacaagctgtatcagcagatcaaggctggagcctatgatttcccatcaccagaatgggacacggtaactcctgaagccaagaacttgatcaaccagatgctgaccataaacccagcaaagcgcatcacggctgaccaggctctcaagcacccgtgggtctgtcaacgatccacggtggcatccatgatgcatcgtcaggagactgtggagtgtttgcgcaagttcaatgcccggagaaaactgaagggtgccatcctcacgaccatgcttgtctccaggaacttctcagctgccaaaagcctattgaacaagaagtcggatggcggtgtcaaggagccacaaaccactgtggtacacaacgctacagatgggatcaagggctccacagagagctgcaacaccaccacagaagatgaggacctcaaagtgcgaaaacaggagatcattaagattacagaacagctgattgaagccatcaacaatggggactttgaggcctacacgaagatttgtgatccaggcctcacttcctttgagcctgaggcccttggtaacctcgtggaggggatggatttccataagttttactttgagaatctcctgtccaagaacagcaagcctatccataccaccatcctaaacccacacgtccacgtgattggggaggacgcagcgtgcatcgcctacatccgcctcacccagtacatcgacgggcagggtcggcctcgcaccagccagtcagaagagacccgggtctggcaccgtcgggatggcaagtggctcaatgtccactatcactgctcaggggcccctgccgcaccgctgcagtgagctcagccacaggggctttaggagattccagccggaggtccaaccttcgcagccagtggctctggagggcctgagtgacagcggcagtcctgtttgtttgaggtttaaaacaattcaattacaaaagcggcagcagccaatgcacgcccctgcatgcagccctcccgcccgcccttcgtgtctgtctctgctgtaccgaggtgttttttacatttaagaaaaaaaaaaaagaaaaaaagattgtttaaaaaaaaaaggaatccataccatgatgcgttttaaaaccaccgacagcccttgggttggcaagaaggcaggagtatgtatgaggtccatcctggcatgagcagtggctcacccaccggccttgaagaggtgagcttggcctctctggtccccatggacttagggggaccaggcaagaactctgacagagctttgggggccgtgatgtgattgcagctcctgaggtggcctgcttaccccaggtctaggaatgaacttctttggaacttgcataggcgcctagaatggggctgatgagaacatcgtgaccatcagacctacttgggagagaacgcagagctcccagcctgctgtggaggcagctgagaagtggtggcctcaggactgagagcccggacgttgctgtactgtcttgtttagtgtagaagggaagagaattggtgctgcagaagtgtacccgccatgaagccgatgagaaacctcgtgttagtctgacatgcactcactcatccatttctataggatgcacaatgcatgtgggccctaatattgaggccttatccctgcagctaggagggggaggggttgttgctgctttgcttcgtgttttcttctaacctggcaaggagagagccaggccctggtcagggctcccgtgccgcctttggcggttctgtttctgtgctgatctggaccatctttgtcttgccttttcacggtagtggtccccatgctgaccctcatctgggcctgggccctctgccaagtgcccctgtgggatgggaggagtgaggcagtgggagaagaggtggtggtcgtttctatgcattcaggctgcctttggggctgcctcccttcttattcttccttgctgcacgtccatctcttttcctgtctttgagattgacctgactgctctggcaagaagaagaggtgtccttacagaggcctctttactgaccaactgaagtatagacttactgctggacaatctgcatgggcatcacccctccccgcatgtaacccaaaagaggtgtccagagccaaggcttctaccttcattgtccctctctgtgctcaaggagttccattccaggaggaagagatctataccctaagcagatagcaaagaagataatggaggagcaattggtcatggccttggtttccctcaaaacaacgctgcagatttatctgcacaaacatctccacttttgggggaaaggtgggtagattccagttccctggactaccttcaggaggcacgagagctgggagaagaggcaaagctacaggtttacttgggagccagctgagaagagagcagactcacaggtgctggtgcttggatttagccaggctcctccgagcacctcatgcatgtcccagcccctgggccctagccctttcctgccctgcagtctgcagtgccagcacgcaaatcccttcaccacagggtttcgttttgctggcttgaagacaaatggtcttagaattcattgagacccatagcttcatatggctgctccagccccacttcttagcattcttactcctcttctggggctaatgtcagcatctatagacaatagactattaaaaaatcaccttttaaacaagaaacggaaggcatttgatgcagaatttttgcatgacaacatagaaataatttaaaaatagtgtttgttctgaatgttggtagacccttcatagctttgttacaatgaaaccttgaactgaaaatatttaataaaataacctttaaacagtcaaaaaaaaaaaaaa

SEQ ID NO: 1379 - DNA, 1319 bp, Homo Sapiens
  NM_001225
atacatagtttactttcatttttgactctgaggctctttccaacgctgtaaaaaaggacagaggctgttccctatggcagaaggcaaccacagaaaaaagccacttaaggtgttggaatccctgggcaaagatttcctcactggtgttttggataacttggtggaacaaaatgtactgaactggaaggaagaggaaaaaaagaaatattacgatgctaaaactgaagacaaagttcgggtcatggcagactctatgcaagagaagcaacgtatggcaggacaaatgcttcttcaaaccttttttaacatagaccaaatatcccccaataaaaaagctcatccgaatatggaggctggaccacctgagtcaggagaatctacagatgccctcaagctttgtcctcatgaagaattcctgagactatgtaaagaaagagctgaagagatctatccaataaaggagagaaacaaccgcacacgcctggctctcatcatatgcaatacagagtttgaccatctgcctccgaggaatggagctgactttgacatcacagggatgaaggagctacttgagggtctggactatagtgtagatgtagaagagaatctgacagccagggatatggagtcagcgctgagggcatttgctaccagaccagagcacaagtcctctgacagcacattcttggtactcatgtctcatggcatcctggagggaatctgcggaactgtgcatgatgagaaaaaaccagatgtgctgctttatgacaccatcttccagatattcaacaaccgcaactgcctcagtctgaaggacaaacccaaggtcatcattgtccaggcctgcagaggtgcaaaccgtggggaactgtgggtcagagactctccagcatccttggaagtggcctcttcacagtcatctgagaacctagaggaagatgctgtttacaagacccacgtggagaaggacttcattgctttctgctcttcaacgccacacaacgtgtcctggagagacagcacaatgggctctatcttcatcacacaactcatcacatgcttccagaaatattcttggtgctgccacctagaggaagtatttcggaaggtacagcaatcatttgaaactccaagggccaaagctcaaatgcccaccatagaacgactgtccatgacaagatatttctacctctttcctggcaattgaaaatggaagccacaagcagcccagccctccttaatcaacttcaaggagcaccttcattagtacagcttgcatatttaacattttgtatttcaataaaagtgaagacaaacga

SEQ ID NO: 1380 - DNA, 2208 bp, Homo Sapiens
  NM_001235
tctttggctttttttggcggagctggggcgccctccggaagcgtttccaactttccagaagtttctcgggacgggcaggagggggtggggactgccatatatagatcccgggagcaggggagcgggctaagagtagaatcgtgtcgcggctcgagagcgagagtcacgtcccggcgctagcccagcccgacccaggcccaccgtggtgcacgcaaaccacttcctggccatgcgctccctcctgcttctcagcgccttctgcctcctggaggcggccctggccgccgaggtgaagaaacctgcagccgcagcagctcctggcactgcggagaagttgagccccaaggcggccacgcttgccgagcgcagcgccggcctggccttcagcttgtaccaggccatggccaaggaccaggcagtggagaacatcctggtgtcacccgtggtggtggcctcgtcgctagggctcgtgtcgctgggcggcaaggcgaccacggcgtcgcaggccaaggcagtgctgagcgccgagcagctgcgcgacgaggaggtgcacgccggcctgggcgagctgctgcgctcactcagcaactccacggcgcgcaacgtgacctggaagctgggcagccgactgtacggacccagctcagtgagcttcgctgatgacttcgtgcgcagcagcaagcagcactacaactgcgagcactccaagatcaacttccgcgacaagcgcagcgcgctgcagtccatcaacgagtgggccgcgcagaccaccgacggcaagctgcccgaggtcaccaaggacgtggagcgcacggacggcgccctgctagtcaacgccatgttcttcaagccacactgggatgagaaattccaccacaagatggtggacaaccgtggcttcatggtgactcggtcctataccgtgggtgtcatgatgatgcaccggacaggcctctacaactactacgacgacgagaaggaaaagctgcaaatcgtggagatgcccctggcccacaagctctccagcctcatcatcctcatgccccatcacgtggagcctctcgagcgccttgaaaagctgctaaccaaagagcagctgaagatctggatggggaagatgcagaagaaggctgttgccatctccttgcccaagggtgtggtggaggtgacccatgacctgcagaaacacctggctgggctgggcctgactgaggccattgacaagaacaaggccgacttgtcacgcatgtcaggcaagaaggacctgtacctggccagcgtgttccacgccaccgcctttgagttggacacagatggcaacccctttgaccaggacatctacgggcgcgaggagctgcgcagccccaagctgttctacgccgaccaccccttcatcttcctagtgcgggacacccaaagcggctccctgctattcattgggcgcctggtccggcctaagggtgacaagatgcgagacgagttatagggcctcagggtgcacacaggatggcaggaggcatccaaaggctcctgagacacatgggtgctattggggttgggggggaggtgaggtaccagccttggatactccatggggtgggggtggaaaaacagaccggggttcccgtgtgcctgagcggaccttcccagctagaattcactccacttggacatgggccccagataccatgatgctgagcccggaaactccacatcctgtgggacctgggccatagtcattctgcctgccctgaaagtcccagatcaagcctgcctcaatcagtattcatatttatagccaggtaccttctcacctgtgagaccaaattgagctaggggggtcagccagccctcttctgacactaaaacacctcagctgcctccccagctctatcccaacctctcccaactataaaactaggtgctgcagcccctgggaccaggcacccccagaatgacctggccgcagtgaggcggattgagaaggagctcccaggaggggcttctgggcagactctggtcaagaagcatcgtgtctggcgttgtggggatgaactttttgttttgtttcttccttttttagttcttcaaagatagggagggaagggggaacatgagcctttgttgctatcaatccaagaacttatttgtacattttttttttcaataaaacttttccaatgacattttgttggagcgtggaaaaaa

SEQ ID NO: 1381 - DNA, 1128 bp, Homo Sapiens
  NM_001236
gcgtgggcagggggcgggcccgggagttggaacagagggcacagacggcccctcctcggaggggagggaccggagccggggcctttttctttaagactcgcagcactggatcccagaacttagtctgcgcggcggcattgacactagctgggctcctcggggcgcgccccaggtggtccgaagcccggtccgccctccacgcaggtgccccgcgctccccgctcagccatgtcgtcctgcagccgcgtggcgctggtgaccggggccaacaggggcatcggcttggccatcgcgcgcgaactgtgccgacagttctctggggatgtggtgctcaccgcgcgggacgtggcgcggggccaggcggccgtgcagcagctgcaggcggagggcctgagcccgcgcttccaccaactggacatcgacgacttgcagagcatccgcgccctgcgcgacttcctgcgcaaggagtacggggggctcaacgtactggtcaacaacgcggccgtcgccttcaagagtgatgatccaatgccctttgacattaaagctgagatgacactgaagacaaatttttttgccactagaaacatgtgcaacgagttactgccgataatgaaacctcatgggagagtggtgaatatcagtagtttgcagtgtttaagggcttttgaaaactgcagtgaagatctgcaggaaaggttccacagtgagacactcacagaaggagacctggtggatctcatgaaaaagtttgtggaggacacaaaaaatgaggtgcatgagagggaaggctggcccaactcaccttatggggtgtccaagttgggggtcacggtcttatcgaggatcctggccaggcgtctggatgagaagaggaaagctgacaggattctggtgaatgcgtgctgcccaggaccagtgaagacagacatggatgggaaagacagcatcaggactgtggaggagggggctgagacccctgtctacttggccctcttgcctccagatgccactgagccacaaggccagttggtccatgacaaagttgtgcaaaactggtaaacgtctgcttcggagcttgctgcttaataaatgttggtggaatgaatgaaaaaaaaaaaaaaaaaa

SEQ ID NO: 1382 - DNA, 2811 bp, Homo Sapiens
  NM_001237
ccatttcaatagtcgcgggatacttgaactgcaagaacagccgccgctccggcgggctgctcgctgcatctctgggcgtctttggctcgccacgctgggcagtgcctgcctgcgcctttcgcaacctcctcggccctgcgtggtctcgagctgggtgagcgagcgggcgggctggtaggctggcctgggctgcgaccggcggctacgactattctttggccgggtcggtgcgagtggtcggctgggcagagtgcacgctgcttggcgccgcaggctgatcccgccgtccactcccgggagcagtgatgttgggcaactctgcgccggggcctgcgacccgcgaggcgggctcggcgctgctagcattgcagcagacggcgctccaagaggaccaggagaatatcaacccggaaaaggcagcgcccgtccaacaaccgcggacccgggccgcgctggcggtactgaagtccgggaacccgcggggtctagcgcagcagcagaggccgaagacgagacgggttgcaccccttaaggatcttcctgtaaatgatgagcatgtcaccgttcctccttggaaagcaaacagtaaacagcctgcgttcaccattcatgtggatgaagcagaaaaagaagctcagaagaagccagctgaatctcaaaaaatagagcgtgaagatgccctggcttttaattcagccattagtttacctggacccagaaaaccattggtccctcttgattatccaatggatggtagttttgagtcaccacatactatggacatgtcaattgtattagaagatgaaaagccagtgagtgttaatgaagtaccagactaccatgaggatattcacacataccttagggaaatggaggttaaatgtaaacctaaagtgggttacatgaagaaacagccagacatcactaacagtatgagagctatcctcgtggactggttagttgaagtaggagaagaatataaactacagaatgagaccctgcatttggctgtgaactacattgataggttcctgtcttccatgtcagtgctgagaggaaaacttcagcttgtgggcactgctgctatgctgttagcctcaaagtttgaagaaatataccccccagaagtagcagagtttgtgtacattacagatgatacctacaccaagaaacaagttctgagaatggagcatctagttttgaaagtccttacttttgacttagctgctccaacagtaaatcagtttcttacccaatactttctgcatcagcagcctgcaaactgcaaagttgaaagtttagcaatgtttttgggagaattaagtttgatagatgctgacccatacctcaagtatttgccatcagttattgctggagctgcctttcatttagcactctacacagtcacgggacaaagctggcctgaatcattaatacgaaagactggatataccctggaaagtcttaagccttgtctcatggaccttcaccagacctacctcaaagcaccacagcatgcacaacagtcaataagagaaaagtacaaaaattcaaagtatcatggtgtttctctcctcaacccaccagagacactaaatctgtaacaatgaaagactgcctttgttttctaagatgtaaatcactcaaagtatatggtgtacagtttttaacttaggttttaattttacaatcatttctgaatacagaagttgtggccaagtacaaattatggtatctattactttttaaatggttttaatttgtatatcttttgtatatgtatctgtcttagatatttggctaattttaagtggttttgttaaagtattaatgatgccagctgtcaggataataaattgatttggaaaactttgcaagtcaaatttaacttcttcaggattttgcttagtaaagaagtttacttggtttactatataatgggaagtgaaaagccttcctctaaaattaaagtaggtttaggaaaacagaccctcaaattctgacattcattttcctaagcaactggatcaatttgctgacttgggcataatctaatctaagcatatctgaatacagtattcagagatagatacagtagagattccccagactttttcgctctttgtaaaacctgtttgtttaggttttgcgaggtaaactcaacagaggttgggagtggaagagggtgggaagcttatatgcaaattaacagacgagaaatgctccagaaggtttattattttaaagcacattaaaaacaaaaaactatttttaaaatcctgctagattttataatggatttgtgaataaaaaatacccagggttctcagaatggaataaatatcccttttaatagttatatatacagatatacaactgttagctttaattggcagctctcttcttttttcttcttttcactggctttttacttggtgctttttcttgttttgcactggtggtctgtgttctgtgaataaagcaaagtaagaatttactaagagtatgttaagttttggattattgaaataagaggcatttcttagttttccagtaggatctaaaatgtgtcagctatgagtaagactggcatccaagaagtttatattatagatttaggtcctaatttttataaatcacaaggtaaaaaaatcacagaacagatggatctctaatgaaaaagggatgtctttttgtttatagtcatgtggcaagatgagagtaaaaccagagagcaaacctctataagtgttgagtatatgtatacatttgaaataaaccagaaatttgttaccttaaaaaaaaaaaaaa

SEQ ID NO: 1383 - DNA, 1403 bp, Homo Sapiens
  NM_001239
acttacgtctcagtgggcgccctaacgaacccgggatacggtctgttcctagtccgctccggaaatgcaactgcgtacgggctggccgcgtaatcgtgacgacagcgcgccagcgccggctagccggacgccctaggcttccgcgagatcttcggtgggggtacgggtgttttacgccaggacgctgatgcgtttgggttctcgtctgcagaccctctggacctggtcacgattccataatgtaccacaacagtagtcagaagcggcactggaccttctccagcgaggagcagctggcaagactgcgggctgacgccaaccgcaaattcagatgcaaagccgtggccaacgggaaggttcttccgaatgatccagtctttcttgagcctcatgaagaaatgacactctgcaaatactatgagaaaaggttattggaattctgttcggtgtttaagccagcaatgccaagatctgttgtgggtacggcttgtatgtatttcaaacgtttttatcttaataactcagtaatggaatatcaccccaggataataatgctcacttgtgcatttttggcctgcaaagtagatgaattcaatgtatctagtcctcagtttgttggaaacctccgggagagtcctcttggacaggagaaggcacttgaacagatactggaatatgaactacttcttatacagcaacttaatttccaccttattgtccacaatccttacagaccatttgagggcttcctcatcgacttaaagacccgctatcccatattggagaatccagagattttgaggaaaacagctgatgactttcttaatagaattgcattgacggatgcttaccttttatacacaccttcccaaattgccctgactgccattttatctagtgcctccagggctggaattactatggaaagttatttatcagagagtctgatgctgaaagagaacagaacttgcctgtcacagttactagatataatgaaaagcatgagaaacttagtaaagaagtatgaaccacccagatctgaagaagttgctgttctgaaacagaagttggagcgatgtcattctgctgagcttgcacttaacgtaatcacgaagaagaggaaaggctatgaagatgatgattacgtctcaaagaaatccaaacatgaggaggaagaatggactgatgacgacctggtagaatctctctaaccatttgaagttgatttctcaatgctaactaatcaagagaagtaggaagcatatcaaacgtttaactttatttaaaaagtataatgtgaaaacataaaatatattaaaacttttctattgttttctttccctttcacagtaactttatgtaaaataaaccatcttcaaaagagctagaatagcaaaaaaaaa

SEQ ID NO: 1384 - DNA, 1320 bp, Homo Sapiens
  NM_001242
cggaaggggaagggggtggaggttgctgctatgagagagaaaaaaaaaacagccacaatagagattctgccttcaaaggttggcttgccacctgaagcagccactgcccagggggtgcaaagaagagacagcagcgcccagcttggaggtgctaactccagaggccagcatcagcaactgggcacagaaaggagccgcctgggcagggaccatggcacggccacatccctggtggctgtgcgttctggggaccctggtggggctctcagctactccagcccccaagagctgcccagagaggcactactgggctcagggaaagctgtgctgccagatgtgtgagccaggaacattcctcgtgaaggactgtgaccagcatagaaaggctgctcagtgtgatccttgcataccgggggtctccttctctcctgaccaccacacccggccccactgtgagagctgtcggcactgtaactctggtcttctcgttcgcaactgcaccatcactgccaatgctgagtgtgcctgtcgcaatggctggcagtgcagggacaaggagtgcaccgagtgtgatcctcttccaaacccttcgctgaccgctcggtcgtctcaggccctgagcccacaccctcagcccacccacttaccttatgtcagtgagatgctggaggccaggacagctgggcacatgcagactctggctgacttcaggcagctgcctgcccggactctctctacccactggccaccccaaagatccctgtgcagctccgattttattcgcatccttgtgatcttctctggaatgttccttgttttcaccctggccggggccctgttcctccatcaacgaaggaaatatagatcaaacaaaggagaaagtcctgtggagcctgcagagccttgtcgttacagctgccccagggaggaggagggcagcaccatccccatccaggaggattaccgaaaaccggagcctgcctgctccccctgagccagcacctgcgggagctgcactacagccctggcctccacccccaccccgccgaccatccaagggagagtgagacctggcagccacaactgcagtcccatcctcttgtcagggccctttcctgtgtacacgtgacagagtgccttttcgagactggcagggacgaggacaaatatggatgaggtggagagtgggaagcaggagcccagccagctgcgcctgcgctgcaggagggcgggggctctggttgtaaaacacacttcctgctgcgaaagacccacatgctacaagacgggcaaaataaagtgacagatgaccaccctgca

SEQ ID NO: 1385 - DNA, 1979 bp, Homo Sapiens
  NM_001244
cccttgctgccgcctctcgcctcacgcccccagagaagagtttctccaccaggcagcaggtgaaggtttttttccaagtcacatgattcaggattcagggggagaatccttcttggaacagagatgggcccagaactgaatcagatgaagagagataaggtgtgatgtggggaagactatataaagaatggacccagggctgcagcaagcactcaacggaatggcccctcctggagacacagccatgcatgtgccggcgggctccgtggccagccacctggggaccacgagccgcagctatttctatttgaccacagccactctggctctgtgccttgtcttcacggtggccactattatggtgttggtcgttcagaggacggactccattcccaactcacctgacaacgtccccctcaaaggaggaaattgctcagaagacctcttatgtatcctgaaaagggctccattcaagaagtcatgggcctacctccaagtggcaaagcatctaaacaaaaccaagttgtcttggaacaaagatggcattctccatggagtcagatatcaggatgggaatctggtgatccaattccctggtttgtacttcatcatttgccaactgcagtttcttgtacaatgcccaaataattctgtcgatctgaagttggagcttctcatcaacaagcatatcaaaaaacaggccctggtgacagtgtgtgagtctggaatgcaaacgaaacacgtataccagaatctctctcaattcttgctggattacctgcaggtcaacaccaccatatcagtcaatgtggatacattccagtacatagatacaagcacctttcctcttgagaatgtgttgtccatcttcttatacagtaattcagactgaacagtttctcttggccttcaggaagaaagcgcctctctaccatacagtatttcatccctccaaacacttgggcaaaaagaaaactttagaccaagacaaactacacagggtattaaatagtatacttctccttctgtctcttggaaagatacagctccagggttaaaaagagagtttttagtgaagtatctttcagatagcaggcagggaagcaatgtagtgtggtgggcagagccccacacagaatcagaagggatgaatggatgtcccagcccaacctctaattcactgtatggtcttgatctatttcttctgttttgagagcctccagttaaaatggggcttcagtaccagagcagctagcaactctgccctaatgggaaatgaaggggagctgggtgtgagtgtttacactgtgcccttcacgggatacttcttttatctgcagatggcctaatacttagttgtccaagtcgcgatcaaggactctctcacacaggaaacttccctatactggcagatacacttgtgactgaaccatgcccagtttatgcctgtctgactgtcactctggcactaggaggctgatcttgtactccatatgaccccacccctaggaacccccagggaaaaccaggctgggacagccccctgttcctgagatggaaagcacaaatttaatacaccaccacaatggaaaacaagttcaaagacttttacttacagatcctggacagaaagggcataatgagtctgaagggcagtcctccttctctaggttacatgaggcaggaataagaagtcagacagagacagcaagacagttaacaatgtaggtaaagaaatagggtgtggtcactctcaattcactggcaaatgcctgaatggtctgtctgaaggaagcaacagagaagtggggaatccagtctgctaggcaggaaagatgcctctaagttcttgtctctggccagaggtgtggtatagaaccagaaacccatatcaagggtgactaagcccggcttctggtatgagaaattaaacttgtatacaaaatggttgccaaggcaacataaaattataagaattc

SEQ ID NO: 1386 - DNA, 2787 bp, Homo Sapiens
  NM_001247
gtgcatggggcggagcccaggccctagggaatcgtggggtcgtatcccgcgggtggaggccggggtggcgccggccggggcgggggagcccaaaagaccggctgccgcctgctccccggaaaagggcactcgtctccgtgggtgtggcggagcgcgcggtgcatggaatgggctatgtgaatgaaaaaaggtatccgttatgaaacttccagaaaaacgagctacatttttcagcagccgcagcacggtccttggcaaacaaggatgagaaaaatatccaaccacgggagcctgcgggtggcgaaggtggcataccccctggggctgtgtgtgggcgtgttcatctatgttgcctacatcaagtggcaccgggccaccgccacccaggccttcttcagcatcaccagggcagccccgggggcccggtggggtcagcaggcccacagccccctggggacagctgcagacgggcacgaggtcttctacgggatcatgtttgatgcaggaagcactggcacccgagtacacgtcttccagttcacccggccccccagagaaactcccacgttaacccacgaaaccttcaaagcactgaagccaggtctttctgcctatgctgatgatgttgaaaagagcgctcagggaatccgggaactactggatgttgctaaacaggacattccgttcgacttctggaaggccacccctctggtcctcaaggccacagctggcttacgcctgttacctggagaaaaggcccagaagttactgcagaaggtgaaagaagtatttaaagcatcgcctttccttgtaggggatgactgtgtttccatcatgaacggaacagatgaaggcgtttcggcgtggatcaccatcaacttcctgacaggcagcttgaaaactccaggagggagcagcgtgggcatgctggacttgggcggaggatccactcagatcgccttcctgccacgcgtggagggcaccctgcaggcctccccacccggctacctgacggcactgcggatgtttaacaggacctacaagctctattcctacagctacctcgggctcgggctgatgtcggcacgcctggcgatcctgggcggcgtggaggggcagcctgctaaggatggaaaggagttggtcagcccttgcttgtctcccagtttcaaaggagagtgggaacacgcagaagtcacgtacagggtttcagggcagaaagcagcggcaagcctgcacgagctgtgtgctgccagagtgtcagaggtccttcaaaacagagtgcacaggacggaggaagtgaagcatgtggacttctatgctttctcctactattacgaccttgcagctggtgtgggcctcatagatgcggagaagggaggcagcctggtggtgggggacttcgagatcgcagccaagtacgtgtgtcggaccctggagacacagccgcagagcagccccttctcatgcatggacctcacctacgtcagcctgctactccaggagttcggctttcccaggagcaaagtgctgaagctcactcggaaaattgacaatgttgagaccagctgggctctgggggccatttttcattacatcgactccctgaacagacagaagagtccagcctcatagtggccgagccatccctgtccccgtcagcagtgtctgtgtgtctgcataaaccctcctgtcctggacgtgacttcatcctgaggagccacagcacaggccgtgctggcactttctgcacactggctctgggacttgcagaaggcctggtgctgccctggcatcagcctcttccagtcacatctggccagagggctgtctggacctgggccctgctcaatgccacctgtctgcctgggctccaagtgggcaggaccaggacagaaccacaggcacacactgagggggcagtgtggctccctgcctgtcccatccccatgccccgtccgcggggctgtggctgctgctgtgcatgtccctgcgatgggagtcttgtctcccagcctgtcagtttcctccccagggcagagctccccttcctgcaagagtctgggaggcggtgcaggctgtcctggctgctctggggaagccgagggacagccataacacccccgggacagtaggtctgggcggcaccactgggaactctggacttgagtgtgtttgcctcttccttgggtatgaatgtgtgagttcacccagaggcctgctctcctcacacattgtgtggtttggggttaatgatggagggagacacctcctcatagacggcaggtgcccacctttcagggagtctcccagcatgggcggatgccgggcatgagctgctgtaaactatttgtggctgtgctgcttgagtgacgtctctgtcgtgtgggtgccaagtgcttgtgtagaaactgtgttctgagcccccttttctggacaccaactgtgtcctgtgaatgtatcgctactgtgagctgttcccgcctagccagggccatgtcttaggtgcagctgtgccacgggtcagctgagccacagtcccagaaccaagctctcggtgtctcgggccaccatccgcccacctcgggctgaccccacctcctccatggacagtgtgagccccgggccgtgcatcctgctcagtgtggcgtcagtgtcggggctgagccccttgagctgcttcagtgaatgtacagtgcccggcacgagctgaacctcatgtgttccactcccaataaaaggttgacaggggcttctccttcaaaaaaaaaaaaaaaaaaaaaaaaa

SEQ ID NO: 1387 - DNA, 1616 bp, Homo Sapiens
  NM_001250
gccaaggctggggcaggggagtcagcagaggcctcgctcgggcgcccagtggtcctgccgcctggtctcacctcgctatggttcgtctgcctctgcagtgcgtcctctggggctgcttgctgaccgctgtccatccagaaccacccactgcatgcagagaaaaacagtacctaataaacagtcagtgctgttctttgtgccagccaggacagaaactggtgagtgactgcacagagttcactgaaacggaatgccttccttgcggtgaaagcgaattcctagacacctggaacagagagacacactgccaccagcacaaatactgcgaccccaacctagggcttcgggtccagcagaagggcacctcagaaacagacaccatctgcacctgtgaagaaggctggcactgtacgagtgaggcctgtgagagctgtgtcctgcaccgctcatgctcgcccggctttggggtcaagcagattgctacaggggtttctgataccatctgcgagccctgcccagtcggcttcttctccaatgtgtcatctgctttcgaaaaatgtcacccttggacaagctgtgagaccaaagacctggttgtgcaacaggcaggcacaaacaagactgatgttgtctgtggtccccaggatcggctgagagccctggtggtgatccccatcatcttcgggatcctgtttgccatcctcttggtgctggtctttatcaaaaaggtggccaagaagccaaccaataaggccccccaccccaagcaggaaccccaggagatcaattttcccgacgatcttcctggctccaacactgctgctccagtgcaggagactttacatggatgccaaccggtcacccaggaggatggcaaagagagtcgcatctcagtgcaggagagacagtgaggctgcacccacccaggagtgtggccacgtgggcaaacaggcagttggccagagagcctggtgctgctgctgctgtggcgtgagggtgaggggctggcactgactgggcatagctccccgcttctgcctgcacccctgcagtttgagacaggagacctggcactggatgcagaaacagttcaccttgaagaacctctcacttcaccctggagcccatccagtctcccaacttgtattaaagacagaggcagaagtttggtggtggtggtgttggggtatggtttagtaatatccaccagaccttccgatccagcagtttggtgcccagagaggcatcatggtggcttccctgcgcccaggaagccatatacacagatgcccattgcagcattgtttgtgatagtgaacaactggaagctgcttaactgtccatcagcaggagactggctaaataaaattagaatatatttatacaacagaatctcaaaaacactgttgagtaaggaaaaaaaggcatgctgctgaatgatgggtatggaactttttaaaaaagtacatgcttttatgtatgtatattgcctatggatatatgtataaatacaatatgcatcatatattgatataacaagggttctggaagggtacacagaaaacccacagctcgaagagtggtgacgtctggggtggggaagaagggtctggggg

SEQ ID NO: 1388 - DNA, 1872 bp, Homo Sapiens
  NM_001251
ttaattacaaaaactaatgactaagagagaggtggctagagctgaggcccctgagtcaggctgtgggtgggatcatctccagtacaggaagtgagactttcatttcctcctttccaagagagggctgagggagcagggttgagcaactggtgcagacagcctagctggactttgggtgaggcggttcagccatgaggctggctgtgcttttctcgggggccctgctggggctactggcagcccaggggacagggaatgactgtcctcacaaaaaatcagctactttgctgccatccttcacggtgacacccacggttacagagagcactggaacaaccagccacaggactaccaagagccacaaaaccaccactcacaggacaaccaccacaggcaccaccagccacggacccacgactgccactcacaaccccaccaccaccagccatggaaacgtcacagttcatccaacaagcaatagcactgccaccagccagggaccctcaactgccactcacagtcctgccaccactagtcatggaaatgccacggttcatccaacaagcaacagcactgccaccagcccaggattcaccagttctgcccacccagaaccacctccaccctctccgagtcctagcccaacctccaaggagaccattggagactacacgtggaccaatggttcccagccctgtgtccacctccaagcccagattcagattcgagtcatgtacacaacccagggtggaggagaggcctggggcatctctgtactgaaccccaacaaaaccaaggtccagggaagctgtgagggtgcccatccccacctgcttctctcattcccctatggacacctcagctttggattcatgcaggacctccagcagaaggttgtctacctgagctacatggcggtggagtacaatgtgtccttcccccacgcagcacagtggacattctcggctcagaatgcatcccttcgagatctccaagcacccctggggcagagcttcagttgcagcaactcgagcatcattctttcaccagctgtccacctcgacctgctctccctgaggctccaggctgctcagctgccccacacaggggtctttgggcaaagtttctcctgccccagtgaccggtccatcttgctgcctctcatcatcggcctgatccttcttggcctcctcgccctggtgcttattgctttctgcatcatccggagacgcccatccgcctaccaggccctctgagcatttgcttcaaaccccagggcactgagggggttggggtgtggtgggggggtacccttatttcctcgacacgcaactggctcaaagacaatgttattttccttccctttcttgaagaacaaaaagaaagccgggcatgacggctcatgcctgtaatcccagcactttgggaggctgaggcaggtggatcactggaggtcaggagtttgagaccagcctggccaacatggtgaaaccctgtctctactaaaaatacaattagccaggtgtggcggcgtaatcccagctggcctgtaatcccagctacttgggaggctgaggcagaactgcttgaacccaggaggtggaggttgcagtgagccgtcatcgcgccactaagccaagatcgcgccactgcactccagcctgggcgacagagccagactgtctcaaataaataaatatgagataatgcagtcgggagaagggagggagagaattttattaaatgtgacgaactgccccccccccccccccagcaggagagcagcaaaatttatgcaaatctttgacggggttttccttgtcctgccaggattaaaagccatgagtttcttgtcaaaaaaaaaaaaaaaaa

SEQ ID NO: 1389 - DNA, 1697 bp, Homo Sapiens
  NM_001255
gaggcgtaagccaggcgtgttaaagccggtcggaactgctccggagggcacgggctccgtaggcaccaactgcaaggacccctccccctgcgggcgctcccatggcacagttcgcgttcgagagtgacctgcactcgctgcttcagctggatgcacccatccccaatgcaccccctgcgcgctggcagcgcaaagccaaggaagccgcaggcccggccccctcacccatgcgggccgccaaccgatcccacagcgccggcaggactccgggccgaactcctggcaaatccagttccaaggttcagaccactcctagcaaacctggcggtgaccgctatatcccccatcgcagtgctgcccagatggaggtggccagcttcctcctgagcaaggagaaccagcctgaaaacagccagacgcccaccaagaaggaacatcagaaagcctgggctttgaacctgaacggttttgatgtagaggaagccaagatccttcggctcagtggaaaaccacaaaatgcgccagagggttatcagaacagactgaaagtactctacagccaaaaggccactcctggctccagccggaagacctgccgttacattccttccctgccagaccgtatcctggatgcgcctgaaatccgaaatgactattacctgaaccttgtggattggagttctgggaatgtactggccgtggcactggacaacagtgtgtacctgtggagtgcaagctctggtgacatcctgcagcttttgcaaatggagcagcctggggaatatatatcctctgtggcctggatcaaagagggcaactacttggctgtgggcaccagcagtgctgaggtgcagctatgggatgtgcagcagcagaaacggcttcgaaatatgaccagtcactctgcccgagtgggctccctaagctggaacagctatatcctgtccagtggttcacgttctggccacatccaccaccatgatgttcgggtagcagaacaccatgtggccacactgagtggccacagccaggaagtgtgtgggctgcgctgggccccagatggacgacatttggccagtggtggtaatgataacttggtcaatgtgtggcctagtgctcctggagagggtggctgggttcctctgcagacattcacccagcatcaaggggctgtcaaggccgtagcatggtgtccctggcagtccaatgtcctggcaacaggagggggcaccagtgatcgacacattcgcatctggaatgtgtgctctggggcctgtctgagtgccgtggatgcccattcccaggtgtgctccatcctctggtctccccattacaaggagctcatctcaggccatggctttgcacagaaccagctagttatttggaagtacccaaccatggccaaggtggctgaactcaaaggtcacacatcccgggtcctgagtctgaccatgagcccagatggggccacagtggcatccgcagcagcagatgagaccctgaggctatggcgctgttttgagttggaccctgcgcggcggcgggagcgggagaaggccagtgcagccaaaagcagcctcatccaccaaggcatccgctgaagaccaacccatcacctcagttgttttttatttttctaataaagtcatgtctcccttcatgttttttttttaaaaaaaaaaaaaaaaaaaaaaaaa

SEQ ID NO: 1390 - DNA, 1584 bp, Homo Sapiens
  NM_001258
gcccttcctggccgccatgtgtacccagagcctgggactggctgggctgggcagtgacccaggcagctctgtggccatggatatgttccagaaggtagagaagatcggagagggcacctatggggtggtgtacaaggccaagaacagggagacagggcagctggtggccctgaagaagatcagactggatttggagatggagggggtcccaagcactgccatcagggagatctcgctgctcaaggaactgaagcaccccaacatcgtccgactgctggacgtggtgcacaacgagaggaagctctatctggtgtttgagttcctcagccaggacctgaagaagtacatggactccaccccaggctcagagctccccctgcacctcatcaagagctacctcttccagctgctgcagggggtgagtttctgccactcacatcgggtcatccaccgagacctgaagccccagaacctgctcatcaatgagttgggtgccatcaagctggctgacttcggcctggctcgcgccttcggggtgcccctgcgcacctacacccatgaggtggtgacactgtggtatcgcgcccccgagattctcttgggcagcaagttctataccacagctgtggatatctggagcattggttgcatctttgcagagatggtgactcgaaaagccctgtttcctggtgactctgagattgaccagctctttcgtatctttcgtatgctggggacacccagcgaagacacatggcccggggtcacccagctgcctgactataagggcagcttccctaagtggaccaggaagggactggaagagattgtgcccaatctggagccagagggcagggacctgctcatgcaactcctgcagtatgaccccagccagcggatcacagccaagactgccctggcccacccgtacttctcatcccctgagccctccccagctgcccgccagtatgtgctgcagcgattccgccattgagaatgtcaaggccacactcagatcctttctcgagcagctgctgccccagctgcctcctacccattgccaagagaggatgcatctggggagagcaaagcactaaggaattcagcatcagcctgcagagggctgagtctgggttagtcctgcccgcaggttagcgagatcctgtgttgttttttgggttggacggtgccgtttcaaaatagaggcacagatgctccatgcacgaggggtccccgggcactggaacaagtgccaagttgaaggcagggggcctgccagagctgggtgtgggtattcaggccctcacctgccctgcctgcagggccagaccctgaggaaagggcgccccctgctggtctttttggatttaaaatgtttgggggaagagttgagttccagttcagtcccaagttaaacaggagggagtgagggagaggagagagggcgttccccggatcccaggagagctgggctatgactgcaataaggagttgttccttcacctgagatgtgcttcttttggttcatttctggcttgacaacaataaataaacgtggtatgttcctgagaaaaaaaaaaaaaa

SEQ ID NO: 1391 - DNA, 11628 bp, Homo Sapiens
  NM_001259
aacctctccgcgcgaagacggcttcagccctgcagggaaagaaaagtgcaatgattctggactgagacgcgcttgggcagaggctatgtaatcgtgtctgtgttgaggacttcgcttcgaggagggaagaggagggatcggctcgctcctccggcggcggcggcggcggcgactctgcaggcggagtttcgcggcggcggcaccagggttacgccagccccgcggggaggtctctccatccagcttctgcagcggcgaaagccccagcgcccgagcgcctgagccggcggggagcaagtaaagctagaccgatctccggggagccccggagtaggcgagcggcggccgccagctagttgagcgcaccccccgcccgccccagcggcgccgcggcgggcggcgtccaggcggcatggagaaggacggcctgtgccgcgctgaccagcagtacgaatgcgtggcggagatcggggagggcgcctatgggaaggtgttcaaggcccgcgacttgaagaacggaggccgtttcgtggcgttgaagcgcgtgcgggtgcagaccggcgaggagggcatgccgctctccaccatccgcgaggtggcggtgctgaggcacctggagaccttcgagcaccccaacgtggtcaggttgtttgatgtgtgcacagtgtcacgaacagacagagaaaccaaactaactttagtgtttgaacatgtcgatcaagacttgaccacttacttggataaagttccagagcctggagtgcccactgaaaccataaaggatatgatgtttcagcttctccgaggtctggactttcttcattcacaccgagtagtgcatcgcgatctaaaaccacagaacattctggtgaccagcagcggacaaataaaactcgctgacttcggccttgcccgcatctatagtttccagatggctctaacctcagtggtcgtcacgctgtggtacagagcacccgaagtcttgctccagtccagctacgccacccccgtggatctctggagtgttggctgcatatttgcagaaatgtttcgtagaaagcctctttttcgtggaagttcagatgttgatcaactaggaaaaatcttggacgtgattggactcccaggagaagaagactggcctagagatgttgcccttcccaggcaggcttttcattcaaaatctgcccaaccaattgagaagtttgtaacagatatcgatgaactaggcaaagacctacttctgaagtgtttgacatttaacccagccaaaagaatatctgcctacagtgccctgtctcacccatacttccaggacctggaaaggtgcaaagaaaacctggattcccacctgccgcccagccagaacacctcggagctgaatacagcctgaggcctcagcagccgccttaagctgatcctgcggagaacacccttggtggcttatgggtccccctcagcaagccctacagagctgtggaggattgctatctggaggccttccagctgctgtcttctggacaggctctgcttctccaaggaaaccgcctagtttactgttttgaaatcaatgcaagagtgattgcagctttatgttcatttgtttgtttgtttgtctgtttgtttcaagaacctggaaaaattccagaagaagagaagctgctgaccaattgtgctgccatttgatttttctaaccttgaatgctgccagtgtggagtgggtaatccaggcacagctgagttatgatgtaatctctctgcagctgccgggcctgatttggtacttttgagtgtgtgtgtgcatgtgtgtgtgtgtgtgtgtgtgtgtgtgtgtgtatgtgagagattctgtgatcttttaaagtgttactttttgtaaacgacaagaataattcaattttaaagactcaaggtggtcagtaaataacaggcatttgttcactgaaggtgattcaccaaaatagtcttctcaaattagaaagttaaccccatgtcctcagcatttcttttctggccaaaagcagtaaatttgctagcagtaaaagatgaagttttatacacacagcaaaaaggagaaaaaattctagtatattttaagagatgtgcatgcattctatttagtcttcagaatgctgaatttacttgttgtaagtctattttaaccttctgtatgacatcatgctttatcatttcttttggaaaatagcctgtaagctttttattacttgctataggtttagggagtgtacctcagatagattttaaaaaaaagaatagaaagcctttatttcctggtttgaaattcctttcttccctttttttgttgttgttattgttgtttgttgttgttattttgtttttgtttttaggaatttgtcagaaactctttcctgttttggtttggagagtagttctctctaactagagacaggagtggccttgaaattttcctcatctattacactgtactttctgccacacactgccttgttggcaaagtatccatcttgtctatctcccggcacttctgaaatatattgctaccattgtataactaataacagattgcttaagctgttcccatgcaccacctgtttgcttgctttcaatgaacctttcataaattcgcagtctcagcttatggtttatggcctcgattctgcaaacctaacagggtcacatatgttctctaatgcagtccttctacctggtgtttacttttgttacctaaataatgagtaggatcttgttttgttttatcaccagcacacagattgctataaactgttactttgtgaattacatttttatagaagatattttcagtgtctttacctgagggtatgtctttagctatgttttagggccatacatttactctatcaaatgatcttttctccatcccccaggctgtgcttatttctagtgccttgtgctcactcctgctctctacagagccagcctggcctgggcattgtaaacagcttttcctttttctcttactgttttctctacagtcctttatatttcataccatctctgccttataagtggtttagtgctcagttggctctagtaaccagaggacacagaaagtatcttttggaaagtttagccacctgtgctttctgactcagagtgcatgcaacagttagatcatgcaacagttagattatgtttagggttaggattttcaaagaatggaggttgctgcactcagaaaataattcagatcatgtttatgcattattaagttgtactgaattctttgcagcttaatgtgatatatgactatcttgaacaagagaaaaaactaggagatgtttctcctgaagagcttttggggttgggaactattcttttttaattgctgtactacttaacattgttctaattcagtagcttgaggaacaggaacattgttttctagagcaagataataaaggagatgggccatacaaatgttttctactttcgttgtgacaacattgattaggtgttgtcagtactataaatgcttgagatataatgaatccacagcattcaaggtcaggtctactcaaagtctcacatggaaaagtgagttctgcctttcctttgatcgagggtcaaaatacaaagacatttttgctagggcctacaaattgaatttaaaaactcactgcactgattcatctgagctttttggttagtattcatggctagagtgaacatagctttagtttttgctgttgtaaaagtgttttcataagttcactcaagaaaaatgcagctgttctgaactggaatttttcagcattctttagaattttaaatgagtagagagctcaacttttattcctagcatctgcttttgactcatttctaggcagtgcttatgaagaaaaattaaagcacaaacattctggcattcaatcgttggcagattatcttctgatgacacagaatgaaagggcatctcagcctctctgaactttgtaaaaatctgtccccagttcttccatcggtgtagttgttgcatttgagtgaatactctcttgatttatgtattttatgtccagattcgccatttctgaaatccagatccaacacaagcagtcttgccgttagggcattttgaagcagatagtagagtaagaacttagtgactacagcttattcttctgtaacatatggtttcaaacatctttgccaaaagctaagcagtggtgaactgaaaagggcatattgccccaaggttacactgaagcagctcatagcaagttaaaatattgtgacagatttgaaatcatgtttgaatttcatagtaggaccagtacaagaatgtccctgctagtttctgtttgatgtttggttctggcggctcaggcattttgggaactgttgcacagggtggagtcaaaacaacctacatataaaaagagaaaaagagaaacttgtccatttagctttcataagaaatcccatggcaaagggtaataaaaaggacctaatcttaaaaatacaatttctaagcacttgtaagaacccagtgggttggagcctcccactttgtccctcctttgaagtggatgggaactcaaggtgcaaagaacctgttttggaagaaagcttggggccatttcagccccctgtattctcatgattttctctcaggaagcacacactgtgaatggcagacttttcatttagccccaggtgacttactaaaaatagttgaaaattattcacctaagaatagaatctcagcattgtgttaaataaaaatgaaagctttagaaggcatgagatgttcctatcttaaataaagcatgtttcttttctatagagaaatgtatagtttgactctccagaatgtactatccatcttgatgagaaaactcttaaatagtaccaaacattttgaactttaaattatgtatttaaagtgagtgtttaagaaactgtagctgcttcttttacaagtggtgcctattaaagtcagtaatggccattattgttccattgtggaaattaaattatgtaagcttcctaatatcataaacatattaaaattcttctaaaatattgcttttcttttaagtgacaatttgactattcttatgataagcacatgagagtgtcttacattttccaaaagcaggctttaattgcatagttgagtctaggaaaaaataatgttaaaagtgaatatgccaccataattacttaattatgttagtatagaaactacagaatatttaccctggaaagaaaatattggaatgttattataaactcttagatatttatataattcaaaagaatgcatgtttcacattgtgacagataaagatgtatgatttctaaggctttaaaaattattcataaaacagtgggcaatagataaaggaaattctggagaaaatgaaggtatttaaagggtagtttcaaagctatatatattttgaaggatatattctttatgaacaaatatattgtaaaaatttatactaaggtcatctggtaactgtgggattaatatggtcgaaaacaaatgttatggagaagctgtcccaagcaaactaaattacctgtacttttttcccatttcaagggaagaggcaaccacatgaagcaatacttcttacacatgcctaagaacgttcattgaaaaaataaatttttaaaaggcatgtgtttcctatgccaccaatacttttgaaaaattgtgaaccttacccaaaaccatttatcatgtccattaagtatatttgggtatataattaggaagatatttacatgttccatctccacagtggaaaaacttattgaggctaccaaagtgtgccaagaaatgtaagtccttagagtaattagaaatgctgttttcctcaaaagcatgagaaactagcattttcatttcttatttactccctttctatatcaatgcaattcacaacccaattttaatacatccctatatctcaagcatttctatcttgtactttttcagaaaataaaccaaaaataatcctttggtctctctatcttctgacctttgtaagcaacagaaatgtaaaaacagaaggggtccaatttttacacgtttttttctcaagtagcctttctggggatttttattttcttaatgaagtgccaatcagcttttcaaaatgttttctatttctcagcatttccaggaagtgataacgtttagctaaatgagtagaagtggacttccttcaacatattgttaccttgtctagccttaggaagaaaacaagagccacctgaaaataaatacaggctcttttcgagcatctgctgaaatactgttacagcaatttgaagttgatgtggtaggaaaggaaggtgacttttcttgcaaaagtctttctaaacattcacactgtcctaagagatgagctttcttgttttattccggtatattccacaaggtggcacttttagagaaaaacaaatctgatgaagactaaagaggtacttctaaaagagatttcattctaactttatttttctgcgcatatttaactctttcctagcacttgttttttgggatgattaatagtctctataatgttctgtaacttcaatattttacttgttacctaggttctgaacaattgtctgcaaataaattgttcttaaggatggataatacacccattttgatcatttaagtaaagaaagcctagtcattcattcagtcaagaaaaaatttttgaagtacccagttaccttacttttctagattaaaacaggcttagttactaaaaaggcagtcctcatctgtgaacaggatagtttcgttagaagtataaaactcctttagtggccccagttaaaacacacataccctctctgctgctttcaaattccctagcatggtggcctttcaacattgattaaattttaaaatcctaatttaaagatcaggtgagcaaaatgagtagcacatcagtaattcagtagacaaaacttttgtctgaaaaattgctgtattgaaacagagccctaaaataccaaaagaccaggtaattttaacatttgtggaatcacaaatgtaaattcataagaagctctaattaaaaaaaaaaagtctgaagtatatgagcataacaacttaggagtgtgtctacatacttaacttttgaagttttttggcaactttatatactttttttaaatttacaagtctacttaaagacttcttataccccaaatgattaagttaattttagaggtcacctttctcacagcagtgtcacttgaaatttagtagggaaggatattgcagtatttttcagtttccttagcacagcaccacagaaagcagcttattccttttgagtggcagacactcgacggtgcctgcccaactttcctcctgagtggcaagcagatgagtctcagtaattcatactgaaccaaaatgccacatacactaggggcagtcagaaactggctgagaaatcccccgcctcattcgcccctctgctcccaggaactagagtccagttaaagcccctatgcgaaaggccgaattccaccccagggtttgttataacagtggccagtctgaaccccatttgctcgtgctcaaaacttgattcccacttgaaagccttccgggcgcgctgcctcgttgccccgcccctttggcaggagagaggcagtgggcgaggccgggctggggccccgcctcccactcacctgccggtgcctgaaattatgtgcggccccgcgggctgctttccgaggtcagagtgccctgctgctgtctcagaggcatctgttctgcaaatcttaggaagaaaaatgtccctagtagcaaacgggtgtcttctgtgcataaataagtacaacacaattctccgaaagttcgggtaaaaagagatgcggtagcagctgccctgtgtgaagctgtctaccccgcatctctcaggcgctaagctcagtttttgtttttgtttttgtttttttaaagaaaagatgtataattgcaggaatttttttttatttttttattttccatcattctatatatgtgatggtgaaagatatgcctggaaaagttttgttttgaaaagtttattttctgcttcgtcttcagttggcaaaagctctcaattctttagcttccagtttcttttctctctttttctttgttaggtaattaaaggtatgtaaacaaattatctcatgtagcaggggattttcatgttgagaggaatcttccgtgtgagttgtttggtcacacaaataaccctttctcaattttaggagtttggattgtcaaatgtaggtttttctcaaagggggcatataactacatattgactgccaagaactatgactgtagcactaatcagcacacatagagccacacaattatttaatttctaactctctgtggtccctagaaaaattccgttgatgtgcttaggttaaagttctgaagatacccgttgtacccttacttgaaagtttctaatcttaagttttatgaaatgcaataatatgtatcagctagcaatatttctgtgatcaccaacaactctcagtttgatcttaaagtctgaataataaaacaaatcccagcagtaatacatttcttaaacctcacagtgcatgatatatcttttcattctgatcctgtgtttgcaaaaatatacacatgtatatcatagttcctcactttttattcatttgttttcctattacctgtagtaaatatattagttagtacatggaatttatagcatcagctacccccaggaacagcacctgacaggcgggggattttttttcaagttgttctacatttgcataaattatttctattattattcatgtatgttatttatttctgaatcacactagtcctgtgaaagtacaactgaaggcagaaagtgttaggattttgcatctaatgttcattatcatggtattgatggacctaagaaaataaaaattagactaagcccccaaataagctgcatgcatttgtaacatgattagtagatttgaatatatagatgtagtattttgggtatctaggtgttttatcattatgtaaaggaattaaagtaaaggactttgtagttgtttttattaaatatgcatatagtagagtgcaaaaatatagcaaaaataaaaactaaaggtagaaaagcattttagatatgccttaatttagaaactgtgccaggtggccctcggaatagatgccaggcagagaccagtgcctgggtggtgcctcctcttgtctgccctcatgaagaagcttccctcacgtgatgtagtgccctcgtaggtgtcatgtggagtagtgggaacaggcagtactgttgagaggagagcagtgtgagagtttttctgtagaagcagaactgtcagcttgtgccttgaggcttccagaacgtgtcagatggagaagtccaagtttccatgcttcaggcaacttagctgtgtacagaagcaatccagtgtggtaataaaaagcaaggattgcctgtataatttattataaaataaaagggattttaacaaccaacaattcccaacacctcaaaagcttgttgcattttttggtatttgaggtttttatctgaaggttaaagggcaagtgtttggtatagaagagcagtatgtgttaagaaaagaaaaatattggttcacgtagagtgcaaattagaactagaaagttttatacgattatcattttgagatgtgttaaagtaggttttcactgtaaaatgtattagtgtttctgcattgccatagggcctggttaaaactttctcttaggtttcaggaagactgtcacatacagtaagcttttttccttctgacttataatagaaaatgttttgaaagtaaaaaaaaaaaatctaatttggaaatttgacttgttagtttctgtgtttgaaatcatggttctagaaatgtagaaattgtgtatatcagatactcatctaggctgtgtgaaccagcccaagatgaccaacatccccacacctctacatctctgtcccctgtatctcttcctttctaccactaaagtgttccctgctaccatcctggcttgtccacatggtgctctccatcttcctccacatcatggaccacaggtgtgcctgtctaggcctggccaccactcccaacttgacctagccacattcatctagagatggttcctgatgctgggcacagactgtgctcatggcacccattagaaatgcctctagcatctttgtatgcatcttgatttttaaaccaagtcattgtacagagcattcagttttggctgtggtaccaagagaaaaactaatcaagaatataaaccacattccaggctgctgttttctctccatctacaggccacacttttactgtatttcttcatacttgaaattcattctgctattttcatatcagggtacagacttataagggtgcatgttccttaaaggtgcataattattcttattccgtttgcttatattgctacagaatgctctgttttggtgctttgagttctgcagacccaagaagcagtgtggaaattcactgcctgggacacagtcttataagaatgttggcaggtgactttgtatcagatgttgcttctcttttctctgtacacagattgagagttaccacagtggcctgtcgggtccaccctgtgggtgcagcacagctctctgaaagcaagaaccttcctacctattctaacgtttttgccctctaagaaaaatggcctcaggtatggtatagacatagcaagaggggaagggctgtctcactctagcaaccatccctccattacacacagaaagccctcttgaagcaaaagaagaagaaagaaagaaagcttatctctaaggctactgtcttcagaatgctctgagctgaatgctcttgctcctttcccaagaggcagatgaaaatatagccagtttatctatacccttcctatctgaggaggagaatagaaaagtagggtaaatatgtaacgtaaaatatgtcattcaaggaccaccaaaactttaagtaccctatcattaaaaatctggttttaaaagtagctcaagtaagggatgctttgtgacccagggtttctgaagtcagatagccattcttacctgccccttactctgacttattgggaaagggagaactgcagtggtgtttctgttgcagtggcaaaggtaacatgtcagaaaattcagagggttgcataccaataatcctttggaaactggatgtcttactgggtgctagaatgaaaatgtaggtatttattgtcagatgatgaagttcattgtttttttcaaaattggtgttgaaatatcactgtccaatgtgttcacttatgtgaaagctaaattgaatgaggcaaaaagagcaaatagtttgtatatttgtaataccttttgtatttcttacaataaaaatattggtagcaaataaaaataataaaaacaataactttaaactgctttctggagatgaattactctcctggctattttcttttttactttaatgtaaaatgagtataactgtagtgagtaaaattcattaaattccaagttttagcagaaaaaaaaaaaaaaaaaa

SEQ ID NO: 1392 - DNA, 3204 bp, Homo Sapiens
  NM_001268
cttcgtttccgtctcggccgggcacccgagcgcatcccgccgaggccgggccgtttcagggggaggcgccaactcatcgcggcgccgggcccctgaccgtgcagtaaccgctacccaggaggcggagcggacaaggctccggcctgcgaggagtcacattaactttgctctagaagacaactttacaaggatctaaaaggaacaggattaaagatgactgaatactgggttccagaaatttaaaacaatcagcttagcaaatcatatattcttctgtggagctgagaattgatgtccgctcttccccgtgatttggaactttccaatcccagagaaaagttgacaaagggactgcccaggactgagtccatatggaagaagaacttcctcttttctctggagacagtggcaagccagtacaggctactctgtcatctttgaagatgttagatgtgggaaagtggccaattttttccctttgttctgaagaagaactacagttaattcgtcaggcttgtgtctttggcagtgctggcaatgaagttttatacactacagtaaatgatgagatttttgtgcttggcacaaactgctgtggctgtttggggttaggtgacgtccagagcaccattgaacctcggagactggattctttaaatggcaaaaaaatagcctgcctcagctatgggagtggtccacatattgtccttgcaacaacagaaggagaagtctttacctggggtcataatgcttatagccagctgggcaatgggacaactaatcatggtttagtgccctgtcatatctctactaatctgtcaaacaaacaagtcattgaagttgcctgtgggtcttaccattctttggtgctaacatctgatggagaggtatttgcctggggttataataactctgggcaggtaggatctggatcaacagttaatcagccaatccctcgaagagtcactggctgcctacaaaataaagtagttgtgaccatagcatgtgggcagatgtgctgcatggcagtagtagacacgggggaggtctatgtctggggttacaacggaaacgggcagcttggactcggcaacagtggcaaccagccaaccccttgcagagtggcagctttgcaaggcatccgtgtccagagggtcgcctgtggctacgcacacacattagtattaacagatgaaggccaagtgtatgcttggggcgccaattcttatgggcagttgggcactggcaataaaagcaaccagtcctatcctactcctgtcactgtggaaaaggacaggattatcgagattgcagcctgtcactccacacacacgtctgcggccaagacgcagggtgggcacgtgtacatgtggggccagtgccggggtcagtccgtgatcctcccgcacctcacccacttctcctgcactgacgacgtgtttgcctgctttgccacgcccgccgtcacgtggcgcctcctctccgtggaacctgatgaccacctcacagtggctgagtcactgaagagggaatttgacaacccggacactgcagacctgaagtttctagttgatggaaagtacatttatgcacataaagtccttctcaagattcgatgtgagcattttcgttcgtcattggaagataacgaggatgatattgtagaaatgagtgaattttcatatcctgtttaccgggccttcctggaatacctatacacagacagcatcagcctttctcctgaggaggcagtaggactgctagacttggctacattttatagagaaaatcgtttgaaaaagctctgccaacaaactatcaagcaaggcatctgcgaggagaatgccatcgctctgctctcggctgcggtgaagtatgatgcacaggatttagaagaattctgcttcaggttttgcataaaccatctgactgtagtaacacaaacatcaggttttgcagaaatggaccatgatctcctgaagaactttatcagcaaagcaagcagagttggagcctttaaaaattgatcccatctgcaggaaagtttttgagcctttccatttcccctgcaaaagccagagatgaatcacttctctttaattaatagtatgtatgatgagctatgtttggctgagtacttgtaactgtcagaagaaggatggtggtgagtggtctttgtctgcctaaacccagagtttatgtagaaagcattgaatgttctgatcagatgtgactaaggtcaaggaaaaaaaattgaaatatcttatttaccatttcctctttttgagtcacttaaattggacacctttggtaccctggtctcagtatatgctattctggcccaaatgttccattattcagctggctgataccacatagatagcttgacaaggagtgctgtctgtccttaccacattttcagcactcagcacagtgccttgtgtataataggcactcaatttattataaatcttcagtatgtcctgagaacagctttagtcatggaatactgggagaaggaataactttcacaaaataaacttaaaacagcctgtaattattgaggttcatattcttctggtatatcattctgagaaattgtggctaatttagaacattgtttagaattgacaaaaggccctggcaattaaattgtcaaggcccaagggctaattttaattttctttttacttggagtcattcattaatttctcacatgggattatggagtatgaagtattatctttgaatgaaattcctgggctgatctgccttacataatcacataaggtcctttgcttttctttgtgttaagagggacttgcctctgtaaatgaaaatgacaatgtgcttttcttgtagttgactttcatgtcactcactataaaataggtctcttaacctggcaccagtataactataaagcactagctgagaaggaactgatacttacatttcatggacagcattaacaagaatgagataaatttgtactttttagatcaaaacaaattacctaattgcaaaagagaaactgaaatggaacatagtctcagattcttctaatgtgtatctcacaatgtcatgtaatgtaaaggaaacccttttggaattagaattcttgttctgatgctgaactatttggtaataaagtgcttatttgcagataacagaaaaaaaaaaaaaaaaaaaaaaaaaaaaaaa

SEQ ID NO: 1393 - DNA, 2035 bp, Homo Sapiens
  NM_001274
acccccacctctccctcctccttccccagtcgttcgccggaaagcatttgtctcccacctcttcataacaacaattaatttcctctggggcctgaggagggcagaatttcaaccttcggtgtgcttgggagtggcgattgtgatttacacgacaaaatgccgaggtgctcggtggagtcatggcagtgccctttgtggaagactgggacttggtgcaaaccctgggagaaggtgcctatggagaagttcaacttgctgtgaatagagtaactgaagaagcagtcgcagtgaagattgtagatatgaagcgtgccgtagactgtccagaaaatattaagaaagagatctgtatcaataaaatgctaaatcatgaaaatgtagtaaaattctatggtcacaggagagaaggcaatatccaatatttatttctggagtactgtagtggaggagagctttttgacagaatagagccagacataggcatgcctgaaccagatgctcagagattcttccatcaactcatggcaggggtggtttatctgcatggtattggaataactcacagggatattaaaccagaaaatcttctgttggatgaaagggataacctcaaaatctcagactttggcttggcaacagtatttcggtataataatcgtgagcgtttgttgaacaagatgtgtggtactttaccatatgttgctccagaacttctgaagagaagagaatttcatgcagaaccagttgatgtttggtcctgtggaatagtacttactgcaatgctcgctggagaattgccatgggaccaacccagtgacagctgtcaggagtattctgactggaaagaaaaaaaaacatacctcaacccttggaaaaaaatcgattctgctcctctagctctgctgcataaaatcttagttgagaatccatcagcaagaattaccattccagacatcaaaaaagatagatggtacaacaaacccctcaagaaaggggcaaaaaggccccgagtcacttcaggtggtgtgtcagagtctcccagtggattttctaagcacattcaatccaatttggacttctctccagtaaacagtgcttctagtgaagaaaatgtgaagtactccagttctcagccagaaccccgcacaggtctttccttatgggataccagcccctcatacattgataaattggtacaagggatcagcttttcccagcccacatgtcctgatcatatgcttttgaatagtcagttacttggcaccccaggatcctcacagaacccctggcagcggttggtcaaaagaatgacacgattctttaccaaattggatgcagacaaatcttatcaatgcctgaaagagacttgtgagaagttgggctatcaatggaagaaaagttgtatgaatcaggttactatatcaacaactgataggagaaacaataaactcattttcaaagtgaatttgttagaaatggatgataaaatattggttgacttccggctttctaagggtgatggattggagttcaagagacacttcctgaagattaaagggaagctgattgatattgtgagcagccagaagatttggcttcctgccacatgatcggaccatcggctctggggaatcctggtgaatatagtgctgctatgttgacattattcttcctagagaagattatcctgtcctgcaaactgcaaatagtagttcctgaagtgttcacttccctgtttatccaaacatcttccaatttattttgtttgttcggcatacaaataatacctatatcttaattgtaagcaaaactttggggaaaggatgaatagaattcatttgattatttcttcatgtgtgtttagtatctgaatttgaaactcatctggtggaaaccaagtttcaggggacatgagttttccagcttttatacacacgtatctcatttttatcaaaacattttgtttaattcaaaaagtacatattccatgttgatttaattctaagatgaaccaataaagacataattcttgtga

SEQ ID NO: 1394 - DNA, 3539 bp, Homo Sapiens
  NM_001278
ccggaaccggccttggaacaactgtggaacctgaggccgcttgccctcccgccccatggagcggcccccggggctgcggccgggcgcgggcgggccctgggagatgcgggagcggctgggcaccggcggcttcgggaacgtctgtctgtaccagcatcgggaacttgatctcaaaatagcaattaagtcttgtcgcctagagctaagtaccaaaaacagagaacgatggtgccatgaaatccagattatgaagaagttgaaccatgccaatgttgtaaaggcctgtgatgttcctgaagaattgaatattttgattcatgatgtgcctcttctagcaatggaatactgttctggaggagatctccgaaagctgctcaacaaaccagaaaattgttgtggacttaaagaaagccagatactttctttactaagtgatatagggtctgggattcgatatttgcatgaaaacaaaattatacatcgagatctaaaacctgaaaacatagttcttcaggatgttggtggaaagataatacataaaataattgatctgggatatgccaaagatgttgatcaaggaagtctgtgtacatcttttgtgggaacactgcagtatctggccccagagctctttgagaataagccttacacagccactgttgattattggagctttgggaccatggtatttgaatgtattgctggatataggccttttttgcatcatctgcagccatttacctggcatgagaagattaagaagaaggatccaaagtgtatatttgcatgtgaagagatgtcaggagaagttcggtttagtagccatttacctcaaccaaatagcctttgtagtttagtagtagaacccatggaaaactggctacagttgatgttgaattgggaccctcagcagagaggaggacctgttgaccttactttgaagcagccaagatgttttgtattaatggatcacattttgaatttgaagatagtacacatcctaaatatgacttctgcaaagataatttcttttctgttaccacctgatgaaagtcttcattcactacagtctcgtattgagcgtgaaactggaataaatactggttctcaagaacttctttcagagacaggaatttctctggatcctcggaaaccagcctctcaatgtgttctagatggagttagaggctgtgatagctatatggtttatttgtttgataaaagtaaaactgtatatgaagggccatttgcttccagaagtttatctgattgtgtaaattatattgtacaggacagcaaaatacagcttccaattatacagctgcgtaaagtgtgggctgaagcagtgcactatgtgtctggactaaaagaagactatagcaggctctttcagggacaaagggcagcaatgttaagtcttcttagatataatgctaacttaacaaaaatgaagaacactttgatctcagcatcacaacaactgaaagctaaattggagttttttcacaaaagcattcagcttgacttggagagatacagcgagcagatgacgtatgggatatcttcagaaaaaatgctaaaagcatggaaagaaatggaagaaaaggccatccactatgctgaggttggtgtcattggatacctggaggatcagattatgtctttgcatgctgaaatcatggagctacagaagagcccctatggaagacgtcagggagacttgatggaatctctggaacagcgtgccattgatctatataagcagttaaaacacagaccttcagatcactcctacagtgacagcacagagatggtgaaaatcattgtgcacactgtgcagagtcaggaccgtgtgctcaaggagctgtttggtcatttgagcaagttgttgggctgtaagcagaagattattgatctactccctaaggtggaagtggccctcagtaatatcaaagaagctgacaatactgtcatgttcatgcagggaaaaaggcagaaagaaatatggcatctccttaaaattgcctgtacacagagttctgcccggtcccttgtaggatccagtctagaaggtgcagtaacccctcagacatcagcatggctgcccccgacttcagcagaacatgatcattctctgtcatgtgtggtaactcctcaagatggggagacttcagcacaaatgatagaagaaaatttgaactgccttggccatttaagcactattattcatgaggcaaatgaggaacagggcaatagtatgatgaatcttgattggagttggttaacagaatgagttgtcacttgttcactgtccccaaacctatggaagttgttgctatacatgttggaaatgtgtttttcccccatgaaaccattcttcagacatcagtcaatggaagaaatggctatgaacagaaactacatttctactatgatcagaagaacatgattttacaagtataacagttttgagtaattcaagcctctaaacagacaggaatttagaaaaagtcaatgtacttgtttgaatatttgttttaataccacagctatttagaagcatcatcacgacacatttgccttcagtcttggtaaaacattacttatttaactgattaaaaataccttctatgtattagtgtcaacttttaacttttgggcgtaagaccaaatgtagttttgtatacagagaagaaaacctcaagtaataggcattttaagtaaaagtctacctgtgtttttttctaaaaaggctgctcacaagttctatttcttgaagaataaattctacctccttgtgttgcactgaacaggttctcttcctggcatcataaggagttggtgtaatcattttaaattccactgaaaatttaacagtatccccttctcatcgaagggattgtgtatctgtgcttctaatattagttggctttcataaatcatgttgttgtgtgtatatgtatttaagatgtacatttaataatatcaaagagaagatgcctgttaatttataatgtatttgaaaattacatgttttttcatttgtaaaaatgagtcatttgtttaaacaatctttcatgtcttgtcatacaaatttataaaggtctgcactcctttatctgtaattgtaattccaaaatccaaaaagctctgaaaacaaggtttccataagcttggtgacaaaattcatttgcttgcaatctaatctgaactgaccttgaatctttttatcccatttagtgtgaatattcctttattttgctgcttgatgatgagagggagggctgctgccacagactgtggtgagggctggttaatgtagtatggtatatgcacaaaactacttttctaaaatctaaaatttcataattctgaaacaacttgccccaagggtttcagagaaaggactgtggacctctatcatctgctaagtaatttagaagatattatttgtcttaaaaaatgtgaaatgcttttatattctaatagtttttcactttgtgtattaaatggtttttaaattaaaaaaaaaaaaaaaa

SEQ ID NO: 1395 - DNA, 1397 bp, Homo Sapiens
  NM_001280
aggatgtgtagggggcggggcccggcggaagcgtatataaggccgggctcggggacgcccccccctcactcgcgcgttaggaggctcgggtcgttgtggtgcgctgtcttcccgcttgcgtcagggacctgcccgactcagtggccgccatggcatcagatgaaggcaaactttttgttggagggctgagttttgacaccaatgagcagtcgctggagcaggtcttctcaaagtacggacagatctctgaagtggtggttgtgaaagacagggagacccagagatctcggggatttgggtttgtcacctttgagaacattgacgacgctaaggatgccatgatggccatgaatgggaagtctgtagatggacggcagatccgagtagaccaggcaggcaagtcgtcagacaaccgatcccgtgggtaccgtggtggctctgccgggggccggggcttcttccgtgggggccgaggacggggccgtgggttctctagaggaggaggggaccgaggctatggggggaaccggttcgagtccaggagtgggggctacggaggctccagagactactatagcagccggagtcagagtggtggctacagtgaccggagctcgggcgggtcctacagagacagttatgacagttacgctacacacaacgagtaaaaacccttcctgctcaagatcgtccttccaatggctgtgtgtttaaagattgtgggagcttcgctgaacgttaatgtgtagtaaatgcacctccttgtattcccactttcgtagtcatttcggttctgatcttgtcaaacccagcctgaccgcttctgacgccgggatggcctcgttactagacttttctttttaaggaagtgctgtttttttttgagggttttcaaaacattttgaaaagcatttacttttttgaccacgagccatgagttttcaaaaaaatcgggggttgtgtgggtttttggtttttgttttagtttttggttgcgttgcctttttttttttagtggggttggccccatgaagtgggtgccccactcacttctctgagatcgaacggactgtgaatccgctctttgtcggaagctgagcaagctgtggcttttttccaactccgtgtgacgtttctgagtgtagtgtggtaggaccccggcgggtgtggcagcaactgccctggagccccagcccctgcgtccatctgtgctgtgcgccccacagtagacgtgcagacgtccctgagaggttcttgaagatgtttatttatattgtccttttttactggaagacgtacgcatactccatcgatgttgtatttgcagtggctgaggaattcttgtacgcagttttctttggctttacgaagccgattaaaagaccgtgtgaaatgaa

SEQ ID NO: 1396 - DNA, 1475 bp, Homo Sapiens
  NM_001281
gccgcctcgggctcggctctctccgcgcagaggtttcatggcttgcttcaatcttttgatatcttagagtaattgcttccaatttttgggcatcgccgcctcagtttacagaatagtatggatctggtgccagagccgggaaaacgatgcgcatcgtaaaccgcaaaacactgagcatccaggacagaagccaaggcgcttggcttggttgaaggccagtgcgcatgcgcgagtttacccttcgcggactgggcgagctcttgccactcctacctccgggcttcagtcttcgccgcctgttctggtcctttcccgggccgctattggaagaaccgtgaactatggaaggcccctctggattggctgggctggcccaagagtaaggagagccctcttcctggcggtggggaagggacggcggcgattggcggacgctcctggcaggagagcgcggattggtcaggcacggagcaggaggcggggctgatagcccagcagcagcagcggcggcggcggctgcggagcgggtgtgaggcggctggaccgcgctgcaggcatccgcagggcgcggcaagatggaggtgacgggggtgtcggcacccacggtgaccgttttcatcagcagctccctcaacaccttccgctccgagaagcgatacagccgcagcctcaccatcgctgagttcaagtgtaaactggagttgctggtgggcagccctgcttcctgcatggaactggagctgtatggagttgacgacaagttctacagcaagctggatcaagaggatgcgctcctgggctcctaccctgtagatgacggctgccgcatccacgtcattgaccacagtggcgcccgccttggtgagtatgaggacgtgtcccgggtggagaagtacacgatctcacaagaagcctacgaccagaggcaagacacggtccgctctttcctgaagcgcagcaagctcggccggtacaacgaggaggagcgggctcagcaggaggccgaggccgcccagcgcctggccgaggagaaggcccaggccagctccatccccgtgggcagccgctgtgaggtgcgggcggcgggacaatcccctcgccggggcaccgtcatgtatgtaggtctcacagatttcaagcctggctactggattggtgtccgctatgatgagccactggggaaaaatgatggcagtgtgaatgggaaacgctacttcgaatgccaggccaagtatggcgcctttgtcaagccagcagtcgtgacggtgggggacttcccggaggaggactacgggttggacgagatatgacacctaaggaattcccctgcttcagctcctagctcagccactgactgcccctcctgtgtgtgcccatggcccttttctcctgaccccattttaattttattcattttttcctttgccattgatttttgagactcatgcattaaattcactagaaacccagaaagt

SEQ ID NO: 1397 - DNA, 5644 bp, Homo Sapiens
  NM_001286
agtcccagagctcgagagggccacgtgaccgtcccggggccagtcacgtgaggcgcagatcctggctgggagggggttggtagaggggtccagagtggcagtaaaggaggaagatggcggggtgcagggggtctctgtgctgctgctgcaggtggtgctgctgctgcggtgagcgtgagacccgcacccccgaggagctgaccatccttggagaaacacaggaggaggaggatgagattcttccaaggaaagactatgagagtttggattatgatcgctgtatcaatgacccttacctggaagttttggagaccatggataataagaaaggtcgaagatatgaggcggtgaagtggatggtggtgtttgccattggagtctgcactggcctggtgggtctctttgtggacttttttgtgcgactcttcacccaactcaagttcggagtggtacagacatcggtggaggagtgcagccagaaaggctgcctcgctctgtctctccttgaactcctgggttttaacctcacctttgtcttcctggcaagcctccttgttctcattgagccggtggcagcaggttccgggatacccgaggtcaaatgctatctgaatggcgtaaaggtgccaggaatcgtccgtctccggaccctgctctgcaaggtccttggagtgctgttcagtgtggctggagggctcttcgtggggaaggaaggccccatgatccacagtggttcggtggtgggagctggcctccctcagtttcagagcatctccttacggaagatccagtttaacttcccctatttccgaagcgacagagacaagagagactttgtatcagcaggagcggctgctggagttgctgcagctttcggggcgccaatcgggggtaccttgttcagtctagaggagggttcgtccttctggaaccaagggctcacgtggaaagtgctcttttgttccatgtctgccaccttcaccctcaacttcttccgttctgggattcagtttggaagctggggttccttccagctccctggattgctgaactttggcgagtttaagtgctctgactctgataaaaaatgtcatctctggacagctatggatttgggtttcttcgtcgtgatgggggtcattgggggcctcctgggagccacattcaactgtctgaacaagaggcttgcaaagtaccgtatgcgaaacgtgcacccgaaacctaagctcgtcagagtcttagagagcctccttgtgtctctggtaaccaccgtggtggtgtttgtggcctcgatggtgttaggagaatgccgacagatgtcctcttcgagtcaaatcggtaatgactcattccagctccaggtcacagaagatgtgaattcaagtatcaagacatttttttgtcccaatgatacctacaatgacatggccacactcttcttcaacccgcaggagtctgccatcctccagctcttccaccaggatggtactttcagccccgtcactctggccttgttcttcgttctctatttcttgcttgcatgttggacttacggcatttctgttccaagtggcctttttgtgccttctctgctgtgtggagctgcttttggacgtttagttgccaatgtcctaaaaagctacattggattgggccacatctattcggggacctttgccctgattggtgcagcggctttcttgggcggggtggtccgcatgaccatcagcctcacggtcatcctgatcgagtccaccaatgagatcacctacgggctccccatcatggtcacactgatggtggccaaatggacaggggactttttcaataagggcatttatgatatccacgtgggcctgcgaggcgtgccgcttctggaatgggagacagaggtggaaatggacaagctgagagccagcgacatcatggagcccaacctgacctacgtctacccgcacacccgcatccagtctctggtgagcatcctgcgcaccacggtccaccatgccttcccggtggtcacagagaaccgcggtaacgagaaggagttcatgaagggcaaccagctcatcagcaacaacatcaagttcaagaaatccagcatcctcacccgggctggcgagcagcgcaaacggagccagtccatgaagtcctacccatccagcgagctacggaacatgtgtgatgagcacatcgcctctgaggagccagccgagaaggaggacctcctgcagcagatgctggaaaggagatacactccctaccccaacctataccctgaccagtccccaagtgaagactggaccatggaggagcggttccgccctctgaccttccacggcctgatccttcggtcgcagcttgtcaccctgcttgtccgaggagtttgttactctgaaagccagtcgagcgccagccagccgcgcctctcctatgccgagatggccgaggactacccgcggtaccccgacatccacgacctggacctgacgctgctcaacccgcgcatgatcgtggatgtcaccccatacatgaacccttcgcctttcaccgtctcgcccaacacccacgtctcccaagtcttcaacctgttcagaacgatgggcctgcgccacctgcccgtggtgaacgctgtgggagagatcgtggggatcatcacacggcacaacctcacctatgaatttctgcaggcccggctgaggcagcactaccagaccatctgacagcccagcccaccctctcctggtgctgcctggggaggcaaatcatgctcactccggcgggcacagctggctggggctgttccggggcatggaagattcccagtcacccactcactcagaaagccgggagtcatcggacaccttgctggtcagaggtcctgggggtggttttgaaccatcagagcttggacttttctgacttccccagcaaggatcttcccacttcctgctccctgtgttcccaccctccagtgttggcacaggcccacccctggctccaccagagccagaagcagaggtagaatcaggcgggccccgggctgcactccgagcagtgttcctggccatctttgctactttcctagagaacccggctgttgccttaaatgtgtgagagggacttggccaaggcaaaagctggggagatgccagtgacaacatacagttcatgactaggtttaggaattgggcactgagaaaattctcaatatttcagagagtccttcccttatttgggactcttaacacggtatcctcgctagttggttttaagggaaacactctgctcctgggtgtgagcagaggctctggtcttgccctgtggtttgactctccttagaaccaccgcccaccagaaacataaaggattaaaatcacactaataacccctggatggtcaatctgataataggatcagatttacgtctaccctaattcttaacattgcagctttctctccatctgcagattattcccagtctcccagtaacacgtttctacccagatcctttttcatttccttaagttttgatctccgtcttcctgatgaagcaggcagagctcagaggatcttggcatcacccaccaaagttagctgaaagcagggcactcctggataaagcagcttcactcaactctggggaatgctaccattttttttccaaagtagaaaggaagcacttctgagccagtgaccactgaaaggtatgtgctatgataaagcagatggcctatttgaggaagagggtgtctgcccttcacaaacacctctctctcccctgcactagctgtcccaagcttacatacagaggcccttcaggagggcctcctgtgccgcagggagggtgcgtggggaagatgcttcctgccagcacgtgcctgaaggtttcacatgaagcatgggaagcgcaccctgtcgttcagtgacgtcattcttctccaggctggcccgccccctctgactaggcacccaaagtgagcatctgggcattgggcattcatgcttatcttcccccaccttctacatggtattagtcccagcaggcatccctggggcagacgtgctttggctcaagatggccttcatttacgtttagttttttttaaaaccgtggaggttgcccacgggcctcggcacctggccctggcagcacagctctcaggcccagccctgggcgacctccttggccaagtctgcctttcaccctggggtgagcatcagtcctggctctgctggtccagatcttgcgctcagcacactctagggaataattccactccagagatggggctgcttcaaggtcttttctagctgattgtggcccctccattttccccattttcttatctccctgaccaaaattgctttgacttctaaatgtttctgcttcccagaatgcacctgacttatgaaatggggataatactcccaggaaatagcgcaggacatcacaaggaccaaaaaggcaattcttatttaaatgttactatttggccagctgctgctgtgttttatggcagtgttcagagcttgatcacgttatttcttccttttattaagaaggaagccaattgtccaagtcaggagaatggtgtgatcacctgtcacagacactttgtcccctctccccgccccttcctggagctggcagagctaacgccctgcaggaggaccccggcctctcgagggctggatcagcagccgcctgccctgaggctgccccggtgaatgttattggaattcatccctcgtgcacatcctgttgtgtttaagtcaccagatattttgttcccatcagtttagcccagagatagacagtagaatgcaaatacctccctcccctaaactgactggacggctgccaaggaggccccaaacccaggccccatgcaaaggcacgtggtttccttttctcctctctctgcatctgcgctttccagataagcccaaagacagcaacttctccactcatgacaaatcaactgtgaccctcgctccttccatttctgtccattagaaaccagccttttcagcatctcacccattagcagccccatcacccagtgatcagtcgcctcagtaaagcagatctgtggatggggagcctacgggtggtaagaagtggtgttttgtgtttcatctccagcttggtgttccatggcccctaggcgaggtgatcagggagtggggccaatgggcccccggccctggctttgggaccttgtgctgagggatgatttgctcctgaccttgattaacttaacagttcccagctggaagggacactttcaggacccagtccactgtatggcatttgtgatgcagaattatgcactgacatgaccctgggtgacaggaaagcctttcgagaggcccaaggtggcctcgccagccctgcagtattgatgtgcagtattgcaccacagctctgcggaccttggccattgccgcagtcgcagcttccttttttctgtttgcactgtttgtttgtatgatgttagctaattccactgtgtatataaattgtattttttttaatttgtaaaatgctatttttatttgaacctttggaacttgggagttctcattgtaaccctaacatgtgagaataaaatgtcttctgtctcctctgtctccttta

SEQ ID NO: 1398 - DNA, 4225 bp, Homo Sapiens
  NM_001287
gtcgctcatcacgtggccccgtcgcgcgtcacgtggccgccggcgcgggtcacgagaacaaacacgggggcagccggcgcttcccggccggtgtcgctccgcggcgggccatggccaacgtctctaagaaggtgtcctggtccggccgggaccgggacgacgaggaggcggcgccgctgctgcggaggacggcgcggcccggcggggggacgccgctgctgaacggggctgggcctggggctgcgcgccagtcaccacgttctgcgcttttccgagtcggacatatgagcagcgtggagctggatgatgaacttttggacccggatatggaccctccacatcccttccccaaggagatcccacacaacgagaagctcctgtccctcaagtatgagagcttggactatgacaacagtgagaaccagctgttcctggaggaggagcggcggatcaatcacacggccttccggacggtggagatcaagcgctgggtcatctgcgccctcattgggatcctcacgggcctcgtggcctgcttcattgacatcgtggtggaaaacctggctggcctcaagtacagggtcatcaagggcaatatcgacaagttcacagagaagggcggactgtccttctccctgttgctgtgggccacgctgaacgccgccttcgtgctcgtgggctctgtgattgtggctttcatagagccggtggctgctggcagcggaatcccccagatcaagtgcttcctcaacggggtgaagatcccccacgtggtgcggctcaagacgttggtgatcaaagtgtccggtgtgatcctgtccgtggtcgggggcctggccgtgggaaaggaagggccgatgatccactcaggttcagtgattgccgccgggatctctcagggaaggtcaacgtcactgaaacgagatttcaagatcttcgagtacttccgcagagacacagagaagcgggacttcgtctccgcaggggctgcggccggagtgtcagcggcgtttggagcccccgtgggtggggtcctgttcagcttggaggagggtgcgtccttctggaaccagttcctgacctggaggatcttctttgcttccatgatctccacgttcaccctgaattttgttctgagcatttaccacgggaacatgtgggacctgtccagcccaggcctcatcaacttcggaaggtttgactcggagaaaatggcctacacgatccacgagatcccggtcttcatcgccatgggcgtggtgggcggtgtgcttggagcagtgttcaatgccttgaactactggctgaccatgtttcgaatcaggtacatccaccggccctgcctgcaggtgattgaggccgtgctggtggccgccgtcacggccacagttgccttcgtgctgatctactcgtcgcgggattgccagcccctgcaggggggctccatgtcctacccgctgcagctcttttgtgcagatggcgagtacaactccatggctgcggccttcttcaacaccccggagaagagcgtggtgagcctcttccacgacccgccaggctcctacaaccccctgaccctcggcctgttcacgctggtctacttcttcctggcctgctggacctacgggctcacggtgtctgccggggtcttcatcccgtccctgctcatcggggctgcctggggccggctctttgggatctccctgtcctacctcacgggggcggcgatctgggcggaccccggcaaatacgccctgatgggagctgctgcccagctgggcgggattgtgcggatgacactgagcctgaccgtcatcatgatggaggccaccagcaacgtgacctacggcttccccatcatgctggtgctcatgaccgccaagatcgtgggcgacgtcttcattgagggcctgtacgacatgcacattcagctgcagagtgtgcccttcctgcactgggaggccccggtcacctcacactcactcactgccagggaggtgatgagcacaccagtgacctgcctgaggcggcgtgagaaggtcggcgtcattgtggacgtgctgagcgacacggcgtccaatcacaacggcttccccgtggtggagcatgccgatgacacccagcctgcccggctccagggcctgatcctgcgctcccagctcatcgttctcctaaagcacaaggtgtttgtggagcggtccaacctgggcctggtacagcggcgcctgaggctgaaggacttccgagacgcctacccgcgcttcccacccatccagtccatccacgtgtcccaggacgagcgggagtgcaccatggacctctccgagttcatgaacccctccccctacacggtgccccaggaggcgtcgctcccacgggtgttcaagctgttccgggccctgggcctgcggcacctggtggtggtggacaaccgcaatcaggttgtcgggttggtgaccaggaaggacctcgccaggtaccgcctgggaaagagaggcttggaggagctctcgctggcccagacgtgaggcccagccctgcccataatgggcactggcgctggcaccccggcccttctgcatttcctcccggagtcactggtttctcggcccaaaccatgctccccagcagtggcaatggcgagcaccctgcagctgggcgggcaggcggcaggcgcggaactgaccctctcgcgggactgaccctgttgtgggcagtggtctccccccttggcgcctccttgcgcaggcccagcctccactctcctcgtctaggtttctttacctccagggatcagctgtgtgtgtgtgacctccctaccgggctatcggcctcttgggagccagcggcagggccggcacctgcgtgcctgtgcccgtgtgcgtgagacagagcccttgcccctgctgctgccccgagggctgccctgccctggaagggcccctctgcctccacaccagtggagtcttcgagacttgggagctgcttggcctcattttcagccatgagcagacggcctgtggtccctgggcctgaggcacggactcgtagcaccagggtttggaggctgcgaccgccccggagagcagcttcacactggcgccacagaggagccccacgtgcactccccggcctgcatccggcttgggtacacaggcccagaggactggggtgactcacgggccctgtgctgtgatgttgagagctgagaaaaacctccaaggccctgagccccatgcccagccctgccttggtcccccaacccccagagcttggagtctgggccccacacccagccctgccttggtccctgagcctcagagcgtggaattgctgccctgtggacactggctgggaaggcaggtcttcccctagcacatggggaccccggcctcgagggtgacctccctaccccgcccctgccagccaccaagcgcaggtgcagcgggggccagactcctgccggcctcagaggacacctggcccagcacaggcagctagaagggccggtgggcaccggggccgggaagcccccacctcaccacctgagggcccctgggaggctcctctggcctggctgggctgggtctggggccgccacaggcccctcacggggcggcagaggcaacttcagtgtccctgttagagcaacacgggtccctccgtggggggctgggtgcggccccctgccgtgtatttcctccccagggagtggggcctccccgggagctgacgccaccaccctgcttagccctcacagggccccaaggtgtccgagtgtgttgggtctgaacgcgaaataaagaaatcctctcagcccgcctttgccagcgtcgtccctcccaccccacccagaccacgtccaacagcctgggactttcgggaccctggggtcggggcaccgtgtggagtgagaaaggcgtgaaagacagcggctgcggccacccagggcaccagccacatcctcttcctcgtccccgcccctcagcctccctcctctggctcctggctggtgggtctgggggcaaggcagaggcgctccaggtggaggggggcgggccggggtgcccacgctggggtgacgcaagaagaaaactcccgggcctcagagtcggcgccggaaacctaggtctgggtttccctcgtggtggttgtgtactgaggacctggaagtgatcatattttggatatattcggttaaataaaatcagcggttaggattcac

SEQ ID NO: 1399 - DNA, 1265 bp, Homo Sapiens
  NM_001288
gttcagggcggggccggtcggtgagtcagcggctctctgatccagcccgggagaggaccgagctggaggagctgggtgtggggtgcgttgggctggtggggaggcctagtttgggtgcaagtaggtctgattgagcttgtgttgtgctgaagggacagccctgggtctaggggagagagtccctgagtgtgagacccgccttccccggtcccagcccctcccagttcccccagggacggccacttcctggtccccgacgcaaccatggctgaagaacaaccgcaggtcgaattgttcgtgaaggctggcagtgatggggccaagattgggaactgcccattctcccagagactgttcatggtactgtggctcaagggagtcaccttcaatgttaccaccgttgacaccaaaaggcggaccgagacagtgcagaagctgtgcccaggggggcagctcccattcctgctgtatggcactgaagtgcacacagacaccaacaagattgaggaatttctggaggcagtgctgtgccctcccaggtaccccaagctggcagctctgaaccctgagtccaacacagctgggctggacatatttgccaaattttctgcctacatcaagaattcaaacccagcactcaatgacaatctggagaagggactcctgaaagccctgaaggttttagacaattacttaacatcccccctcccagaagaagtggatgaaaccagtgctgaagatgaaggtgtctctcagaggaagtttttggatggcaacgagctcaccctggctgactgcaacctgttgccaaagttacacatagtacaggtggtgtgtaagaagtaccggggattcaccatccccgaggccttccggggagtgcatcggtacttgagcaatgcctacgcccgggaagaattcgcttccacctgtccagatgatgaggagatcgagctcgcctatgagcaagtggcaaaggccctcaaataagcccctcctgggactccctcaaccccctccattttctccacaaaggccctggtggtttccacattgctacccaatggacacactccaaaatggccagtgggcagggaatcctggagcacttgttccgggatggtgtggtggaagaggggatgagggaaagaaatggggggcctgggtcagatttttattgtggggtgggatgagtaggacaacatatttcagtaataaaatacagaataaaaatcaagtgtttttacgcaaaaaaaaaaaaaaaa

SEQ ID NO: 1400 - DNA, 2560 bp, Homo Sapiens
  NM_001290
cccttcttccctcccttcctccataccaacctccctccctctctggagctcctgctctctccctctccctcctctcccgtgctccctccctccctccctctttccctccctcctctcctctccctctcctctcctgctatagagggctccgacagcagttcccagccagcgtgttcagcctgcctgcctgcctgcctctgtgtgtgtgtgagcgtgtgtgcgtgcgtctactttgtactgggaagaacacagcccatgtgctctgcatggacgttactgatactctgtttagcttgattttcgaaaagcaggcaagatgtccagcacaccacatgaccccttctattcttctcctttcggcccattttataggaggcatacaccatacatggtacagccagagtaccgaatctatgagatgaacaagagactgcagtctcgcacagaggatagtgacaacctctggtgggacgcctttgccactgaattttttgaagatgacgccacattaaccctttcattttgtttggaagatggaccaaagcgatacactatcggcaggaccctcatcccccgttactttagcactgtgtttgaaggaggggtgaccgacctgtattacattctcaaacactcgaaagagtcataccacaactcatccatcacggtggactgcgaccagtgtaccatggtcacccagcacgggaagcccatgtttaccaaggtatgtacagaaggcagactgatcttggagttcacctttgatgatctcatgagaatcaaaacatggcactttaccattagacaataccgagagttagtcccgagaagcatcctagccatgcatgcacaagatcctcaggtcctggatcagctgtccaaaaacatcaccaggatggggctaacaaacttcaccctcaactacctcaggttgtgtgtaatattggagccaatgcaggaactgatgtcgagacataaaacttacaacctcagtccccgagactgcctgaagacctgcttgtttcagaagtggcagaggatggtggctccgccagcagaacccacaaggcaaccaacaaccaaacggagaaaaaggaaaaattccaccagcagcacttccaacagcagcgctgggaacaatgcaaacagcactggcagcaagaagaagaccacagctgcaaacctgagtctgtccagtcaggtacctgatgtgatggtggtaggagagccaactctgatgggaggtgagtttggggacgaggacgaaaggctaatcactagattagaaaacacgcaatatgatgcggccaacggcatggacgacgaggaggacttcaacaattcacccgcgctggggaacaacagcccgtggaacagtaaacctcccgccactcaagagaccaaatcagaaaaccccccaccccaggcttcccaataagatgatcggcaccagaatccactgtcaataggcccgtgggtgatcattacaattgcaaatctttacttacaggagaggaaacagaagagataaaaacttttccatgcaaatatctatttctaaaccacaatgatctgattttctttcttctttctttttttctaattgagaggattattcccagtaagcttccatgaccctttcttggaggccttcacaggtaatacagatactggcactgattgtaattaaaatgagagaaaactctagcgcatcttctggcacggttttaacaacgtgtttgtgttgaatttcctttttatgcatcaaacgaaggccatattgtccataaatgctcagtgctcaggatctcattaatatgccgaacctaactacagatgactttttaatattgtaaaatattttctgctttttgacttgcatctgagagtttcttgtttcagtaaaaaaagaaaagacaaaaaaatcagctttggaaagtaatttaaatgtaccttattttttttttctttatgttttctttcattgggcaacagctaagagggcccagcaaggtaatttatggttgagctgatgtcaattggttcttgtcttgagtcgactcaatttagcccaagtgctgaaacaagaaatgtcatttttttcatcaaagacaccagggcagatttttaagtaaagaaagacaattggacccttaagaatttatgcatttgtaaagttgctgttgatccaaatattttcaagccatgtaatccattggttttgtgggcagtttaataaacctgaacctttgtgtgttttctaattgtacctgagttgaccatcctttctttttatagtatatttcttgtatgatattttgtaaagctctcacctggttcttttatggggacttttcgtttttgggcaactccagtgtatttatgtgaaactttataagagaattaatttttccatttgcatattaatatgttcctccacacatgtaaaggcacagtggctccgtgtgttaaaaaacagctgtattttatgtatgctttactgataagtgtgccaataataaactgtgttaatgaccaaaaaaaaaaaaaaaaaaaaaaa

SEQ ID NO: 1401 - DNA, 2089 bp, Homo Sapiens
  NM_001291
gctcacggcggcggcggcggagcggagaggccagagccggagaccgagctgggatcgggccccgggcgggggcggtgcgagcggcgccaagcagatcttaggggcggggacggagccggggcgggcgggactgaagcggagcccgggaacggggcgggaggtcccagggtcccgggttgggggggtggagcagcatttcgtcgccgcgggggtgccgggactccggccgcagtgtcgccgccatcacggacttcctgtgggacaagcgcacgggcctcgccgccagaacgatgccgcatcctcgaaggtaccactcctcagagcgaggcagccgggggagttaccgtgaacactatcggagccgaaagcataagcgacgaagaagtcgctcctggtcaagtagtagtgaccggacacgacggcgtcggcgagaggacagctaccatgtccgttctcgaagcagttatgatgatcgttcgtccgaccggagggtgtatgaccggcgatactgtggcagctacagacgcaacgattatagccgggatcggggagatgcctactatgacacagactatcggcattcctatgaatatcagcgggagaacagcagttaccgcagccagcgcagcagccggaggaagcacagacggcggaggaggcgcagccggacatttagccgctcatcttcgatgaaatcgttagcaccttaggagaggggaccttcggccgagttgtacaatgtgttgaccatcgcaggggtggggctcgagttgccctgaagatcattaagaatgtggagaagtacaaggaagcagctcgacttgagatcaacgtgctagagaaaatcaatgagaaagaccctgacaacaagaacctctgtgtccagatgtttgactggtttgactaccatggccacatgtgtatctcctttgagcttctgggccttagcaccttcgatttcctcaaagacaacaactacctgccctaccccatccaccaagtgcgccacatggccttccagctgtgccaggctgtcaagttcctccatgataacaagctgacacatacagacctcaagcctgaaaatattctgtttgtgaattcagactatgagctcacctacaacctagagaagaagcgagatgagcgcagtgtgaagagcacagctgtgcgggtggtagactttggcagtgccacctttgaccatgagcaccatagcaccattgtctccactcgccattaccgagcaccagaagtcatccttgagttgggctggtcacagccttgtgatgtgtggagtataggctgcatcatctttgaatactatgtgggattcaccctcttccagacccatgacaacagagagcatctagccatgatggaaaggatcttgggtcctatcccttcccggatgatccgaaagacaagaaagcagaaatatttttaccggggtcgcctggattgggatgagaacacatcagctgggcgctatgttcgtgagaactgcaaaccgctgcggcggtatctgacctcagaggcagaggaacaccaccagctcttcgatctgattgaaagcatgctagagtatgaaccagctaagcggctgaccttgggtgaagcccttcagcatcctttcttcgcccgccttcgggctgagccgcccaacaagttgtgggactccagtcgggatatcagtcggtgacgatcaggccctgggcccccctgcatcttttatagcagtgggtgtccagtccaggacactggtgcttttttatacaagagaacgagccagagttcactccttcctcctggctctctatatacctgtgaatatgtgaaatagtgtaaatatgaaagaacttgtacctatcacttcaacccctgccttgtacataatactattccatccacacagtttccaccctcacctgccccctcatacggagttggatgggggccgagtgaggtaaccaggtggcatctaccccatgttttataaggaattttgtacagtctttgtgaaataaaataacgtgcttcatttgacccccaaaaaaaaaaaaaaaaaaaaaaaaaaaaaaaaaaaaaa

SEQ ID NO: 1402 - DNA, 1665 bp, Homo Sapiens
  NM_001292
tggggcactggtacctccaggacctggagtgtactggaagaaatggtgcagtccagatgcatcactgtaagcgataccgctcccctgaaccagacccgtacctgagctaccgatggaagaggaggaggtcctacagtcgggaacatgaagggagactgcgatacccgtcccgaagggagcctcccccacgaagatctcggtccagaagccatgaccgcctgccctaccagaggaggtaccgggagcgccgtgacagcgatacataccggtgtgaagagcggagcccatcctttggagaggactactatggaccttcacgttctcgtcatcgtcggcgatcgcgggagagggggccataccggacccgcaagcatgcccaccactgccacaaacgccgcaccaggtcttgtagcagcgcctcctcgatgagattgtggggaacctgggtgaaggcacctttggcaaggtggtggagtgcttggaccatgccagagggaagtctcaggttgccctgaagatcatccgcaacgtgggcaagtaccgggaggctgcccggctagaaatcaacgtgctcaaaaaaatcaaggagaaggacaaagaaaacaagttcctgtgtgtcttgatgtctgactggttcaacttccacggtcacatgtgcatcgcctttgagctcctgggcaagaacacctttgagttcctgaaggagaataacttccagccttaccccctaccacatgtccggcacatggcctaccagctctgccacgcccttagatttctgcatgagaatcagctgacccatacagacttgaaacctgagaacatcctgtttgtgaattctgagtttgaaaccctctacaatgagcacaagagctgtgaggagaagtcagtgaagaacaccagcatccgagtggctgactttggcagtgccacatttgaccatgagcaccacaccaccattgtggccacccgtcactatcgcccgcctgaggtgatccttgagctgggctgggcacagccctgtgacgtctggagcattggctgcattctctttgagtactaccggggcttcacactcttccagacccacgaaaaccgagagcacctggtgatgatggagaagatcctagggcccatcccatcacacatgatccaccgtaccaggaagcagaaatatttctacaaagggggcctagtttgggatgagaacagctctgacggccggtatgtgaaggagaactgcaaacctctgaagagttacatgctccaagactccctggagcacgtgcagctgtttgacctgatgaggaggatgttagaatttgaccctgcccagcgcatcacactggccgaggccctgctgcaccccttctttgctggcctgacccctgaggagcggtccttccacaccagccgcaacccaagcagatgacaggcacaggccaccgcatgaggagatggagggcgggactgggccgcccagccccttgactccagcctcgaccgccagccccaggccagagccacccaatgaacagtgcaatgtgaaggaaggcaggagcctgcaggggagcagacttggtgcccagctgccagaaagcacagatttgacccaagctatttatatgttataaagttataataaagtgtttcttactgtttgta

SEQ ID NO: 1403 - DNA, 1378 bp, Homo Sapiens
  NM_001293
cggggtgactgcctcttccagggcgggcggtgtggtgcacgcattgctgtgctccaactccctcagggcctgtgttgccgcactctgctgctatgagcttcctcaaaagtttcccgccgcctgggccagcggaggggctcctgcggcagcagccagacactgaggctgtgctgaacgggaagggcctcggcactggtaccctttacatcgctgagagccgcctgtcttggttagatggctctggattaggattctcactggaataccccaccattagtttacatgcattatccagggaccgaagtgactgtctaggagagcatttgtatgttatggtgaatgccaaatttgaagaagaatcaaaagaacctgttgctgatgaagaagaggaagacagtgatgatgatgttgaacctattactgaatttagatttgtgcctagtgataaatcagcgttggaggcaatgttcactgcaatgtgcgaatgccaggccttgcatccagatcctgaggatgaggattcagatgactacgatggagaagaatatgatgtggaagcacatgaacaaggacagggggacatccctacattttacacctatgaagaaggattatcccatctaacagcagaaggccaagccacactggagagattagaaggaatgctttctcagtctgtgagcagccagtataatatggctggggtcaggacagaagattcaataagagattatgaagatgggatggaggtggataccacaccaacagttgctggacagtttgaggatgcagatgttgatcactgaaaatgatttatgcaagtttaagattctgctcctaagtgtaggagagaacttggtgcctcttccactctggagtgaagttaatgaaagtctttttccttttccaaaacccaacctgaaccagttctttcttgagacagactatactgagacaacaagttgtcaccagcagaagatagataatatgacctttattaacttgatgaattaacttaaccaagagggtatttgtagtttactatttaccctaaaactttctgtgtctgggtaccctctgagtaggcctataattcctaccttgactgtgtgcatcatttgtaagctagcagatctatgtggtgaaaatgcacaggagcttggtagactgcgggggaaagagagagctcctttcgccatgttttaccagtctgctgttataacctcttaggttgtatcctttaatttccagccttttaggttagtttctgtaacagaacaagtgagtctgggatgaagtcctcaaagtacttcaaatggtaattgttttgtttttgtaatagcttaacaaataaacctaggttttctatattaaaaaa

SEQ ID NO: 1404 - DNA, 2690 bp, Homo Sapiens
  NM_001295
ataaaaacccagaaagccccagaaacaaagacttcacggacaaagtcccttggaaccagagagaagccgggatggaaactccaaacaccacagaggactatgacacgaccacagagtttgactatggggatgcaactccgtgccagaaggtgaacgagagggcctttggggcccaactgctgccccctctgtactccttggtatttgtcattggcctggttggaaacatcctggtggtcctggtccttgtgcaatacaagaggctaaaaaacatgaccagcatctacctcctgaacctggccatttctgacctgctcttcctgttcacgcttcccttctggatcgactacaagttgaaggatgactgggtttttggtgatgccatgtgtaagatcctctctgggttttattacacaggcttgtacagcgagatctttttcatcatcctgctgacgattgacaggtacctggccatcgtccacgccgtgtttgccttgcgggcacggaccgtcacttttggtgtcatcaccagcatcatcatttgggccctggccatcttggcttccatgccaggcttatacttttccaagacccaatgggaattcactcaccacacctgcagccttcactttcctcacgaaagcctacgagagtggaagctgtttcaggctctgaaactgaacctctttgggctggtattgcctttgttggtcatgatcatctgctacacagggattataaagattctgctaagacgaccaaatgagaagaaatccaaagctgtccgtttgatttttgtcatcatgatcatcttttttctcttttggaccccctacaatttgactatacttatttctgttttccaagacttcctgttcacccatgagtgtgagcagagcagacatttggacctggctgtgcaagtgacggaggtgatcgcctacacgcactgctgtgtcaacccagtgatctacgccttcgttggtgagaggttccggaagtacctgcggcagttgttccacaggcgtgtggctgtgcacctggttaaatggctccccttcctctccgtggacaggctggagagggtcagctccacatctccctccacaggggagcatgaactctctgctgggttctgactcagaccataggaggccaacccaaaataagcaggcgtgacctgccaggcacactgagccagcagcctggctctcccagccaggttctgactcttggcacagcatggagtcacagccacttgggatagagagggaatgtaatggtggcctggggcttctgaggcttctggggcttcagtcttttccatgaacttctcccctggtagaaagaagatgaatgagcaaaaccaaatattccagagactgggactaagtgtaccagagaagggcttggactcaagcaagatttcagatttgtgaccattagcatttgtcaacaaagtcacccacttcccactattgcttgcacaaaccaattaaacccagtagtggtgactgtgggctccattcaaagtgagctcctaagccatgggagacactgatgtatgaggaatttctgttcttccatcacctccccccccccgccaccctcccactgccaaagaacttggaaatagtgatttccacagtgactccactctgagtcccagagccaatcagtagccagcatctgcctccccttcactcccaccgcaggatttgggctcttggaatcctggggaacatagaactcatgacggaagagttgagacctaacgagaaatagaaatggggaactactgctggcagtggaactaagaaagcccttaggaagaatttttatatccactaaaatcaaacaattcagggagtgggctaagcacgggccatatgaataacatggtgtgcttcttaaaatagccataaaggggagggactcatcatttccatttacccttcttttctgactatttttcagaatctctcttcttttcaagttgggtgatatgttggtagattctaatggctttattgcagcgattaataacaggcaaaaggaagcagggttggtttcccttctttttgttcttcatctaagccttctggttttatgggtcagagttccgactgccatcttggacttgtcagcaaaaaaaaaaaataataataataataaggcctgctgtgtaagctgacagtatttgtagctgatagggggttgggaggaaagtgtctactaggagggtggggtgagattctgtgttgatgtaggaggccgagaaggcccttaactcaaagtagcttatttatccaaaatgttctggatgcatcatctccaaccaaggaccccttatttatcatgcctttgttctcttttccctcagatgtatatttctttaaaaataattttcctaataacaaaacttatttctaaaacagcttaaaaattcaaagaaaaaccccaaacactgacattacctacacttccactacccaaagacaaaatgtgcccactgtgtgcttttgagtgtattttcttttagtttgttttttgttgggtgcatatttatgataataacaatgatggacttcaattgtactcactgttctattgttggttttaattagcagcaagttgtgatcactttcccaggtgaataaatcatttcaaagcattaaaaaaaaaaaaaa

SEQ ID NO: 1405 - DNA, 3016 bp, Homo Sapiens
  NM_001303
ctcagacctgtcagcccgccacactccagccagtcccttccgatcacctccagacaccacgctctcctttcggagcccgcccgccggaagtggcggcccggaactactcccacaggggggcggggaaggaagatggcggcgcccagcgtcccgtgaggagagaggacacagggatcccggggagcggccccagactcgtaaattatggccgcatctccgcacactctctcctcacgcctcctgacaggttgcgtaggaggctctgtctggtatcttgaaagaagaactatacaggactcccctcacaagttcttacatcttctcaggaatgtcaataagcagtggattacatttcagcactttagcttcctcaaacgcatgtatgtcacacagctgaacagaagccacaaccagcaagtaagacccaagccagaaccagtagcatctcctttccttgaaaaaacatcttcaggtcaagccaaagcagaaatatatgagatgagacctctctcaccgcccagcctatctttgtccagaaagccaaatgaaaaggaattgatagaactagagccagactcagtaattgaagactcaatagatgtagggaaagagacaaaagaggaaaagcggtggaaagagatgaagctgcaagtgtatgatttgccaggaattttggctcgactatccaaaatcaaactcacagctctggttgtaagtaccactgcagctggatttgcattggctccgggcccttttgactggccctgtttcctgcttacttctgttgggacaggccttgcatcctgtgctgccaactccatcaatcagttttttgaggtgccatttgactcaaacatgaataggacaaagaacagaccgctggttcgtggacagatcagcccattgctagctgtgtcctttgccacttgttgtgctgttccgggagttgccattctgaccttgggggtgaatccactcacaggagccctggggctcttcaacattttcctgtatacctgctgctacacaccactgaaaaggatcagcattgccaacacatgggtcggagctgtggttggggccatcccgcctgtcatgggctggacagcggccacgggcagcctcgatgctggcgcatttctcctgggaggaatcctctactcctggcagtttcctcatttcaacgccctgagctggggcctccgtgaagactactcccggggcggctactgcatgatgtcggtcacccacccgggcctgtgccggcgcgtggcgctgcgccactgcctggccctgctcgtgctgtccgcagcagcccctgtgctggacatcaccacatggaccttccccatcatggcccttcccatcaatgcgtacatctcctacctcggcttccgcttctacgtggacgcagaccgcaggagctcgcggagactgttcttctgcagcctgtggcacctgccgctgctgctgctgctcatgctcacctgcaagcggccgagcggaggcggggacgcagggccccctcccagctgagagcactgggacgcccaccgcccctttccctccgctgccaggcgagcatgttgtggtaattctggaacacaagaagagaaattgctgggtttagaacaagattataaacgaattcggtgctcagtgatcacttgacagttttttttttttttaaatattacccaaaatgctccccaaataagaaatgcatcagctcagtcagtgaatacaaaaaaggaattatttttccctttgagggtctttatacatctctcctccaaccccaccctctattctgtttcttcctcctcacatgggggtacacatacacagcttcctcttttggttccatccttaccaccacaccacacgcacactccacatgcccagcagagtggcacttggtggccagaaagtgtgagcctcatgatctgctgtctgtagttctgtgagctcaggtccctcaaaggcctcggagcacccccttcctggtgactgagccagggcctgcatttttggttttccccaccccacacattctcaaccatagtccttctaacaataccaatagctaggacccggctgctgtgcactgggactggggattccacatgtttgccttgggagtctcaagctggactgccagcccctgtcctcccttcacccccattgcgtatgagcatttcagaactccaaggagtcacaggcatctttatagttcacgttaacatatagacactgttggaagcagttccttctaaaagggtagccctggacttaataccagccggatacctctggcccccaccccattactgtacctctggagtcactactgtgggtcgccactcctctgctacacagcacggctttttcaaggctgtattgagaagggaagttaggaagaagggtgtgctgggctaaccagcccacagagctcacattcctgtcccttgggtgaaaaatacatgtccatcctgatatctcctgaattcagaaattagcctccacatgtgcaatggctttaagagccagaagcagggttctgggaattttgcaagttatcctgtggccaggtgtggtctcggttaccaaatacggttacctgcagctttttagtcctttgtgctcccacgggtctgcagagtcccatctgcccaaaggtcttgaagcttgacaggatgttttcattactcagtctcccagggcactgctggtccgtagggattcattggtcggggtgggagagttaaacaacatttaaacagagttctctcaaaaatgtctaaagggattgtaggtagataacatccaatcactgtttgcacttatctgaaatcttccctcttggctgcccccaggtatttactgtggagaacattgcataggaatgtctggaaaaagcctctacaacttgttacagccttcacatttgtacaattcattgattctcttttccttccacaataaaatggtatacaagaacaaaaaaaaaaaaaaa

SEQ ID NO: 1406 - DNA, 9060 bp, Homo Sapiens
  NM_001304
gccgcccggagcgctgagccgcgggagcggagccggggttagcggcgctgctggaagatggcgagcggccgggacgagcggccgccttggcggctagggcggctcctgttgctcatgtgcctgctgctgctggggagctcggcccgggcggctcacatcaagaaggcggaggcgactaccacaactacgagcgcgggcgccgaggcggccgagggccagttcgaccgctactaccacgaagaggagttggagtcggcgctgagggaggcggcggccgcgggcctccccggcctggcccgcctctttagcatcggccgctcggtggaaggccggccgctgtgggtgcttcgcctcaccgccggcctggggtcgctaatccctgagggcgacgcggggcctgacgctgccgggcccgacgctgcggggccgctgctgcccggccggccccaggtgaagctggtgggcaacatgcatggcgacgagaccgtgtcgcgccaggtgttgatctacttggcccgcgagctggcggccggctaccgccgcggggacccgcgcctggtccgcctgctcaacaccaccgacgtgtacctgctgcccagcctcaaccccgatggcttcgagcgtgcccgcgagggcgactgtggcttcggcgacggcggcccgtccggggccagcggccgcgacaatagtcgcggccgcgacctcaaccgaagctttcccgaccagtttagcaccggcgaaccccccgccctggacgaggtgcccgaggtgcgcgccctcatcgagtggatccgcaggaacaagtttgtgctttctggaaatctgcatggtggctcagtggtagcaagctatccttttgatgattctccagaacataaggccactggaatctatagcaaaacctcagatgatgaagtatttaaatacttggcaaaagcttatgcttcaaaccaccccataatgaaaactggtgagcctcattgtccaggagatgaagacgagactttcaaagatggaatcacaaacggcgcacattggtatgatgtggaaggtggtatgcaagattacaattatgtgtgggccaactgttttgagatcacattagaactgtcttgttgcaagtacccacctgcttcacagcttcgacaggaatgggagaacaatcgtgagtctttgatcacattgattgaaaaggttcacattggagtgaaaggatttgttaaagattccataacaggatctgggttagagaatgcaaccatctcagtggctggtattaatcataatatcacaacaggcagatttggtgatttctaccgattacttgttcctggaacttacaaccttacagtagttttaactgggtatatgccattgactgttactaatgtagtggtgaaagaaggaccagccacagaggtggatttttctcttaggccaactgtaacttcagtaatccctgacacgacagaggctgtatcaactgctagcacagttgctatacctaatattctttctggaacatcatcctcctaccagccaattcagccaaaggactttcaccaccaccatttccctgatatggaaatcttcttgagaaggtttgccaatgaatatcctaacattacccggctttattccttgggaaaatcagtagagtcaagagaactttatgtgatggagatatctgataatccgggtgtccatgaaccaggtgaaccagaatttaagtacattggaaatatgcatggaaatgaagtggttggaagagaactgctgttgaacctcatagaatacctttgtaagaactttggaacagaccctgaagtcacagatttggttcataacactagaattcaccttatgccatccatgaatcctgatgggtatgaaaagtcccaggaaggagattcaataagtgtaattggcagaaacaacagcaacaactttgacctgaaccgaaatttcccagaccagtttgttcagatcacagatcctacgcaaccagaaactattgctgtaatgagctggatgaagtcctatccatttgtactttcagcaaacctgcatggaggttctttggtggttaactacccttttgatgatgatgaacaaggacttgccacatatagtaaatcaccagatgatgctgtgttccaacaaatagcactttcttattccaaggaaaattcccagatgtttcaaggtagaccttgcaagaatatgtatcctaatgaatattttcctcatggaataacaaatggagctagttggtataatgtgccaggaggaatgcaggactggaactatttacaaacaaattgctttgaagtgactattgaactaggttgtgtgaaatatccacttgagaaagagctgccaaacttttgggaacagaatcgaagatcactaatccagtttatgaaacaggttcatcagggcgtcagaggatttgttctagatgccacagatggcaggggtatattaaatgccaccattagtgttgctgagattaatcacccagtgactacttacaaaactggagattactggcgtctcttggttccaggaacttataaaatcacagcatctgctcgagggtataatccagttaccaagaatgtgactgtcaagagtgaaggcgctattcaggtcaacttcacacttgttcgatcctcaacagattcaaacaatgaatcaaagaaaggaaaaggggctagcagcagcaccaatgatgccagtgatccaactactaaagagtttgaaactttaattaaagacctttcagcggagaatggtttggaaagcctcatgttacgctcctcctcaaatctggctctggctctttatcgataccattcctacaaagacttatcagagtttctgagaggacttgtaatgaactatccacatattacaaatcttaccaatttgggacagagcactgaatatcgtcacatttggtcccttgaaatctccaataagcccaatgtatctgagcctgaagaaccaaagattcgttttgttgctggtatccatggaaatgcgccagttggaactgaactgcttttggctctggcagaatttctctgcctgaactacaaaaagaacccagctgttacccaattggttgacaggactaggattgtgattgtcccttctctaaatccagatgggcgagagagagctcaagagaaagactgtacttcaaaaataggacaaacaaatgctcgtggcaaagatttggatacagacttcacaaataatgcctcccaacctgagaccaaagccatcattgaaaatttgattcaaaaacaggactttagtctttctgttgccttagatggtggttccatgctggtcacatatccttatgacaagccagtacagacagtggaaaataaagagactctgaagcatttggcatctctttatgcaaataatcatccatccatgcacatgggtcagcccagttgcccaaataaatcagatgagaatattccaggaggagtaatgcgtggagcagaatggcatagtcacctgggcagcatgaaggattatagtgtcacctatggccattgtccggaaatcacagtatacacaagctgctgttactttcctagtgctgcacgactcccttccttgtgggcagacaataagagatctcttcttagtatgttagtggaggttcacaagggagttcatggatttgttaaagataagactggaaagccaatctctaaagcagtcattgtacttaatgaaggaataaaggtacaaacaaaagagggaggttatttccatgtactcttagcgccaggtgtccataacattattgccatcgctgatgggtaccagcaacaacattcacaggtctttgtgcatcatgatgcagctagttctgtggtgatagtctttgacacagataaccggatatttggtttgccaagggagcttgtggtaactgtatcaggtgctactatgtcggcattgatcctaacagcttgcattatttggtgcatctgctcaatcaagtctaatagacacaaggatggctttcatcggctcaggcagcatcatgatgagtatgaagatgaaattcgcatgatgtctaccggctccaagaagtccctcctaagccatgagttccaggatgaaacagacactgaagaggaaacattatattctagcaaacattgaaaaacacattttgcatatctcccagcataagtaccaagcaaaattacagttcctcttgggagaacactgcattaagaagagagactctcttgcttcttcaaagagctttgggaaattaaattgctaaatttgtattctctgtgaatttcactggcagttttgaacttcccttccttaaagtactctaaacctttaaaaaaaaatctgatttatgcagcagagatgggacagccactttttctttttaatttaagatgagctatttggagcttatgtaataatggcataaagccaactagaggatgttgtattttgcacatcagatgtttactagtggctttagtatttttctttgttttaaatggccaaaagaatccagaaacattaaggcagggacagcagtcagaatcgacataaagctttaaaaactcaaggttttttcaacctactgaggagtacttttctctagttgttaaatagctggagtttttcttattcaggtttaatggaggttgaattgatttttaaacacatataacagtaggaaatgaataaatgggcttctgcatttggctttctacctgttccaaggctagatcggaactggtagactacgctgtaagcaggatttcactacctctcttaaggtttagcaaacttctaaatagcccattttaagggagaacttactaactttattgtgaaaggtctaaatgcccacttgaatgaagctgagagagagatctagcaaaagctaaaactcatgttgtctatctttgaacttggtaaaaacccacaggtgctgctgcttatatctgtgaagcactagcttattctaggaatgcctgattctttaatattgcctaaatcggaacctttttctatgttgcacacatggttttcagatgacccagccatctacaagatctgaattctactgaaaatatctagaaatgtggaagagacctacttgcacattcttaacctgtatttgaacacaaaatatctatacttcatgctccagcccaagcctataccctgtaatagcatactattattgaaatcgcttgaccggtcttgttcacataggcctctgggagtgatttggttctttgccctaatgtttcatttgacggtctctttttgatcaaccaatttttctaaaagttcagtcgaaagcttttaagtatagcttcctcccttgaaaaaaaatgtaaactatgactgctgagtgataaaacactgtggtgtgaaagtgtcatcttcactgccaatcaggcaaagaccggaaagatttgcattttattatgtctgtcttatcatgcaatggaaatgatgctttttgtaagtatgcatcttaccaatgatgtaacggtttaatacctttgaatgttttaataaccaagttgctgctgaacttatactaaatcaggggaccaaaaaacttgctcttatcttctcaaattgtattctatatccattaatgtatcagttatcccaaagccttcaggtggaggggtttaccaccttcctaggtcgttcaaccaggttttgtgaggaatgcattcaaagtggctttataaaagaagattttctttagcaagaataatgaggtcatgtcatttgttaataagtatctgtgataaatccgtggttcaaggttaagccattctggtattctggtattagcaactgtaaattctgccacctcatacatggaacagagcttgtgggatgctaatagttagtgaagtatacatgatttaatttctaataatctttatgttttctttaaggatggtggtgtattgctctttttcagctttatttttaagagtacagtcaggaaaccaacaaggggcctaagagtggctgcccctgcttgggacattacagcaagtgaaacaaagttaatgtgacaagctttgctttgttatcattggtcttcactagaggataccttttacatgtacttctctcttggatcaaatatgtctttaactgtacatctcagtggctggaggccatgccttttaagcatgtgtaaaatttttaaagaaatgaacatacacatagttattttagtaatatttcctgaaagaaaaaccaaattctgctataagtcttgatcttcaatgaacttttaaataatgcatttagctggaaaacaagactttcccagcttgtattacctagaagcgtgaatgtataggatacctgactactaagactatattctcagccctgccctgtcttttatttgcgggtctaatctaatattagaatatattaaccgcttaaggcattgaagccatatgggatggggaatgcatttcttcagtgtttctccgagagactttccatttccttggagttatggcggcaagtaagtatcatagtattaagaaatttgcctaaatctgagttgtgcctttctttactcacaaggcatgggctttgtcctggtgatcagtttgtaagccttcttccttcccagctccttaataaaagcaaagtgattgagtaggtaatgttcaaagtgtctgcctgtgtacatgtacttgtattgattatgtagttcagtaagatgtgcccaagtcatttcagaaagaaagacccttcagttttgatgcattttgctgaacacttgggtagtgagtgggatcctatccagttgaggaatgcttgcaatgctcattgaagggatttgctttgggactttgtcatcttccagaaaggaaacatattgtatatttggcccagtgtgattgattgctttatctttggtaacttttacttgaatgggatttgctgaattaatgactattgaatttaaaactaattatgagttgacaaataaataaaaggtagtgtttatgtctgagcttattgtgtttgagctaacaccaggttactcagtaaccatgacctgctcctccatttccatttattctcaacattaaatagttttatcttgttgttgccagaaatgcacttgtgccaggtattgtccctgctgtatgaaaagcttcttggcaatgaattctgtaatagtgccctacattatggttttctggtggaattgttttaacagtgacaacccaggatttccaatatatttttgttttattgttattaccaaaaattccactatgattgatgttcagtgattttctatagcaacttttttggtaactctttgggtttctgatttgttttagctaaaattttggggatatgatttgggtctttgattaatgtcagctgaacttggatttctagttcatgaagaaatctctcccaatacccatttatcctatttttagcaataattcgttaatgattccacttgattttcagaatattgtcctggttgattttgatttgacagcatacattatgaaatttgaaagtaggttaccattttgaggcagttggatataaattatgtaaatatgtatgattatgatttttataaatggcataacatgagtgtactaactaccttctatgctggccatgctacagattttctggaggtatgacaatagtatttttttatgctcagattaaaaatcagcttttcacctctccagtttttccaagtgatactcccagttctagagcaatctacagctgtttatgtgaggtgcccaacacccattcatctcaagtgcttcagtctttggtttatttcatgcactgtgccttcaaaatgaaatttttaaaagggactttaaatgaagttgaatagtagtttttaaaagtcaatttgtaatttatgtgaaatctaactgtaatgaggtcctttctgttttttatatgtaaacagatctactaatcctgtataaaagttattttacgatgtttgtctttctttgtgttttgtctcataatcttttttcagatgcaatatgccggaaaaagttataggtccagtttgaaaattatttagtttttctgcctatgctagtggaaaaatagtaccaggatcagaatacagggtatcacctatggaatgtttctgtatttatgaattgactcaaaagaaagctttgtttctgaaatcgcattatgtagtagccacagttttctgtttgtagctcagctagattgttatatatgttcaatcatttcacaataacaacacaaaactggtcattgaaaggtttttatgtacgcattttaaacttgttcgttaaaaatttggtcctttttccaggtgaggcccagttagaataatgtgtcccggcacttttaggcacagcaaggatgaattcaatatccccttttcacttagcaacaatgtgttacttctaccctaataggaattgggaaagcaaagttgtatgagaaacagactctgctgataaagtactcatagtccagaccagagaaatataaatggaaataggttatatttcaatagtgattggttcatctaaaagtctctgctgtaaaggaaataaagcatagaggtttgagcatggactttggagttggaccaatctgtgactgattcttcgttctgctacttgcttccaatgtgaccttgtacaagtttcttgacattctctgagcctcagtttctctactggttgaataatccttgataggattgcagtggaaaattaaatgaaataatgttagcaaaggtcccaacataatatttgacttggaattgaatgcccatggtaaccagcatcattttccttcatgtgatgtcttcttatgcctttgaaagaaagttactttatcaaatgtataaataaagatctgtttataggtgatctttttaatttagaagaaattctgagacacaaataaaaaaagaaattttttaaaaaaaaaaaaaaaaaa

SEQ ID NO: 1407 - DNA, 480 bp, Homo Sapiens
  NM_001311
agcgctgggctaggggcgcggcttgaactcgcctaaagagctgcgccctctcatctcgcgcctgcagcccgtgccgccccagccgctgccgcctgcaccggacccggagccgtcatgcccaagtgtcccaagtgcaacaaggaggtgtacttcgccgagagggtgacctctctgggcaaggactggcatcggccctgcctgaagtgcgagaaatgtgggaagacgctgacctctgggggccacgctgagcacgaaggcaaaccctactgcaaccacccctgctacgcagccatgtttgggcctaaaggctttgggcggggcggagccgagagccacactttcaagtaaaccaggtggtggagaccccatccttggctgcttgcagggccactgtccaggcaaatgccaggccttgtccccagatgcccagggctcccttgttgcccctaatgctctcagtaaacctgaacacttggaaaa

SEQ ID NO: 1408 - DNA, 1236 bp, Homo Sapiens
  NM_001312
gctgggcgcgggcggcggcggcccggaggagaacgggcggagggcgcgggccgaccgggcgcaccgaccatggcctccaaatgccccaagtgcgacaagaccgtgtacttcgccgagaaggtgagctccctggggaaggactggcacaagttctgcctcaagtgcgagcgctgcagcaagacgctgacgcccgggggccacgccgagcatgacgggaagccgttctgccacaagccgtgctacgccaccctgttcggacccaaaggcgtgaacatcgggggcgcgggctcctacatctacgagaagcccctggcggaggggccgcaggtcaccggccccatcgaggtccccgcggcccgagcagaggagcggaaggcgagcggccccccgaaggggcccagcagagcctccagtgtcaccactttcaccggggagcccaacacgtgcccgcgctgcagcaagaaggtgtacttcgctgagaaggtgacgtctctgggcaaggattggcaccggccctgcctgcgctgcgagcgctgcgggaagacactgacccccggcgggcacgcggagcacgacggccagccctactgccacaagccctgctatggaatcctcttcggacccaagggagtgaacaccggtgcggtgggcagctacatctatgaccgggaccccgaaggcaaggtccagccctaggctacagcggctctcatgatgtgggctcacctgcgccccagaccctgcaggggcccccctgcttggctctgctgggagagtgctcagccgcccagtcctgcctgcaagcccagggcgagtattggaggaggggcagccacgggcagagcaccatgcccatccccgagtctctggtgtgtctgccccctctggcatcctctgggcgtcccatgatcccttctgtgtctgcgtgtccgaatccccgtgtgaccctgtcccagcattttcccgccgaccctgcgtgtccccgtggcgctgtccgctctccctctcctgctgcccacccacctgccagtgttatttatgctcccttcgtgggtgatggccacgccctcaccatgtccctggcagagggcttccctccgggatcccctgcctggtgcccacactgcctcgcaagcgctcgccaccctcacgtggctcacctgctgttgagccttgtgctgtcaataaacggtttgaggattgcagaaaaaaaaaaaaaaaaaaaaaaaaaaaaaa

SEQ ID NO: 1409 - DNA, 4353 bp, Homo Sapiens
  NM_001315
ttctctcacgaagccccgcccgcggagaggttccatattgggtaaaatctcggctctcggagagtcccgggagctgttctcgcgagagtactgcgggaggctcccgtttgctggctcttggaaccgcgaccactggagccttagcgggcgcagcagctggaacgggagtactgcgacgcagcccggagtcggccttgtaggggcgaaggtgcagggagatcgcggcgggcgcagtcttgagcgccggagcgcgtccctgcccttagcggggcttgccccagtcgcaggggcacatccagccgctgcggctgacagcagccgcgcgcgcgggagtctgcggggtcgcggcagccgcacctgcgcgggcgaccagcgcaaggtccccgcccggctgggcgggcagcaagggccggggagagggtgcgggtgcaggcgggggccccacagggccaccttcttgcccggcggctgccgctggaaaatgtctcaggagaggcccacgttctaccggcaggagctgaacaagacaatctgggaggtgcccgagcgttaccagaacctgtctccagtgggctctggcgcctatggctctgtgtgtgctgcttttgacacaaaaacggggttacgtgtggcagtgaagaagctctccagaccatttcagtccatcattcatgcgaaaagaacctacagagaactgcggttacttaaacatatgaaacatgaaaatgtgattggtctgttggacgtttttacacctgcaaggtctctggaggaattcaatgatgtgtatctggtgacccatctcatgggggcagatctgaacaacattgtgaaatgtcagaagcttacagatgaccatgttcagttccttatctaccaaattctccgaggtctaaagtatatacattcagctgacataattcacagggacctaaaacctagtaatctagctgtgaatgaagactgtgagctgaagattctggattttggactggctcggcacacagatgatgaaatgacaggctacgtggccactaggtggtacagggctcctgagatcatgctgaactggatgcattacaaccagacagttgatatttggtcagtgggatgcataatggccgagctgttgactggaagaacattgtttcctggtacagaccatattaaccagcttcagcagattatgcgtctgacaggaacaccccccgcttatctcattaacaggatgccaagccatgaggcaagaaactatattcagtctttgactcagatgccgaagatgaactttgcgaatgtatttattggtgccaatcccctggctgtcgacttgctggagaagatgcttgtattggactcagataagagaattacagcggcccaagcccttgcacatgcctactttgctcagtaccacgatcctgatgatgaaccagtggccgatccttatgatcagtcctttgaaagcagggacctccttatagatgagtggaaaagcctgacctatgatgaagtcatcagctttgtgccaccaccccttgaccaagaagagatggagtcctgagcacctggtttctgttctgttgatcccacttcactgtgaggggaaggccttttcacgggaactctccaaatattattcaagtgcctcttgttgcagagatttcctccatggtggaagggggtgtgcgtgcgtgtgcgtgcgtgttagtgtgtgtgcatgtgtgtgtctgtctttgtgggagggtaagacaatatgaacaaactatgatcacagtgactttacaggaggttgtggatgctccagggcagcctccaccttgctcttctttctgagagttggctcaggcagacaagagctgctgtccttttaggaatatgttcaatgcaaagtaaaaaaatatgaattgtccccaatcccggtcatgcttttgccactttggcttctcctgtgaccccaccttgacggtggggcgtagacttgacaacatcccacagtggcacggagagaaggcccataccttctggttgcttcagacctgacaccgtccctcagtgatacgtacagccaaaaaggaccaactggcttctgtgcactagcctgtgattaacttgcttagtatggttctcagatcttgacagtatatttgaaactgtaaatatgtttgtgccttaaaaggagagaagaaagtgtagatagttaaaagactgcagctgctgaagttctgagccgggcaagtcgagagggctgttggacagctgcttgtgggcccggagtaatcaggcagccttcataggcggtcatgtgtgcatgtgagcacatgcgtatatgtgcgtctctctttctccctcacccccaggtgttgccatttctctgcttacccttcacctttggtgcagaggtttcttgaatatctgccccagtagtcagaagcaggttcttgatgtcatgtacttcctgtgtactctttatttctagcagagtgaggatgtgttttgcacgtcttgctatttgagcatgcacagctgcttgtcctgctctcttcaggaggccctggtgtcaggcaggtttgccagtgaagacttcttgggtagtttagatcccatgtcacctcagctgatattatggcaagtgatatcacctctcttcagcccctagtgctattctgtgttgaacacaattgatacttcaggtgcttttgatgtgaaaatcatgaaaagaggaacaggtggatgtatagcatttttattcatgccatctgttttcaaccaactatttttgaggaattatcatgggaaaagaccagggcttttcccaggaatatcccaaacttcggaaacaagttattctcttcactcccaataactaatgctaagaaatgctgaaaatcaaagtaaaaaattaaagcccataaggccagaaactccttttgctgtctttctctaaatatgattactttaaaataaaaaagtaacaaggtgtcttttccactcctatggaaaagggtcttcttggcagcttaacattgacttcttggtttggggagaaataaattttgtttcagaattttgtatattgtaggaatcctttgagaatgtgattccttttgatggggagaaagggcaaattattttaatattttgtattttcaactttataaagataaaatatcctcaggggtggagaagtgtcgttttcataacttgctgaatttcaggcattttgttctacatgaggactcatatatttaagccttttgtgtaataagaaagtataaagtcacttccagtgttggctgtgtgacagaatcttgtatttgggccaaggtgtttccatttctcaatcagtgcagtgatacatgtactccagagggacagggtggaccccctgagtcaactggagcaagaaggaaggaggcagactgatggcgattccctctcacccgggactctccccctttcaaggaaagtgaacctttaaagtaaaggcctcatctcctttattgcagttcaaatcctcaccatccacagcaagatgaattttatcagccatgtttggttgtaaatgctcgtgtgatttcctacagaaatactgctctgaatattttgtaataaaggtctttgcacatgtgaccacatacgtgttaggaggctgcatgctctggaagcctggactctaagctggagctcttggaagagctcttcggtttctgagcataatgctcccatctcctgatttctctgaacagaaaacaaaagagagaatgagggaaattgctattttatttgtattcatgaacttggctgtaatcagttatgccgtataggatgtcagacaataccactggttaaaataaagcctatttttcaaatttagtgagtttctcaagtttattatatttttctcttgtttttatttaatgcacaatatggcattatatcaatatcctttaaactgtgacctggcatacttgtctgacagatcttaatactactcctaacatttagaaaatgttgataaagcttcttagttgtacattttttggtgaagagtatccaggtctttgctgtggatgggtaaagcaaagagcaaatgaacgaagtattaagcattggggcctgtcttatctacactcgagtgtaagagtggccgaaatgacagggctcagcagactgtggcctgagggccaaatctggcccaccacctgtttggtgtagcctgctaagaatggcttttacatttttaaatggttgggaaagaaaaaaaaagaagtagtagattttgtagcatgtgatgtaagtaatgtaaaacttaaattccagtatccataaataaagttttatgagaacaga

SEQ ID NO: 1410 - DNA, 3579 bp, Homo Sapiens
  NM_001316
tcaggctcgctgtcgcgccattttgccggggtttgaatgtgaggcggagcggcggcaggagcgggtagtgccagctacggtccgcggctggggttccctcctccgtttctgtatccccacgagatcctatagcaatggaactcagcgatgcaaatctgcaaacactaacagaatatttaaagaaaacacttgatcctgatcctgccatccgacgtccagctgagaaatttcttgaatctgttgaaggaaatcagaattatccactgttgcttttgacattactggagaagtcccaggataatgttatcaaagtatgtgcttcagtaacattcaaaaactatattaaaaggaactggagaattgttgaagatgaaccaaacaaaatttgtgaagccgatcgagtggccattaaagccaacatagtgcacttgatgcttagcagcccagagcaaattcagaagcagttaagtgatgcaattagcattattggcagagaagattttccacagaaatggcctgacttgctgacagaaatggtgaatcgctttcagagtggagatttccatgttattaatggagtcctccgtacagcacattcattatttaaaagataccgtcatgaatttaagtcaaacgagttatggactgaaattaagcttgttctggatgcctttgctttgcctttgactaatctttttaaggccactattgaactctgcagtacccatgcaaatgatgcctctgccctgaggattctgttttcttccctgatcctgatctcaaaattgttctatagtttaaactttcaggatctccctgaattttttgaagataatatggaaacttggatgaataattttcatactctcttaacattggataataagcttttacaaactgatgatgaagaggaagccggcttattggagctcttaaaatcccagatttgtgataatgccgcactctatgcacaaaagtacgatgaagaattccagcgatacctgcctcgttttgttacagccatctggaatttactagttacaacgggtcaagaggttaaatatgatttgttggtaagtaatgcaattcaatttctggcttcagtttgtgagagacctcattataagaatctatttgaggaccagaacacgctgacaagtatctgtgaaaaggttattgtgcctaacatggaatttagagctgctgatgaagaagcatttgaagataattctgaggagtacataaggagagatttggaaggatctgatattgatactagacgcagggctgcttgtgatctggtacgaggattatgcaagttttttgagggacctgtgacaggaatcttctctggttatgttaattccatgctgcaggaatacgcaaaaaatccatctgtcaactggaaacacaaagatgcagccatctacctagtgacatctttggcatcaaaagcccaaacacagaagcatggaattacacaagcaaatgaacttgtaaacctaactgagttctttgtgaatcacatcctccctgatttaaaatcagctaatgtgaatgaatttcctgtccttaaagctgacggtatcaaatatattatgatttttagaaatcaagtgccaaaagaacatcttttagtctcgattcctctcttgattaatcatcttcaagctgaaagtattgttgttcatacttacgcagctcatgctcttgaacggctctttactatgcgagggcctaacaatgccactctctttacagctgcagaaatcgcaccgtttgttgagattctgctaacaaaccttttcaaagctctcacacttcctggctcttcagaaaatgaatatattatgaaagctatcatgagaagtttttctctcctacaagaagccataatcccctacatccctactctcatcactcagcttacacagaagctattagctgttagtaagaacccaagcaaacctcactttaatcactacatgtttgaagcaatatgtttatccataagaataacttgcaaagctaaccctgctgctgttgtaaattttgaggaggctttgtttttggtgtttactgaaatcttacaaaatgatgtgcaagaatttattccatacgtctttcaagtgatgtctttgcttctggaaacacacaaaaatgacatcccgtcttcctatatggccttatttcctcatctccttcagccagtgctttgggaaagaacaggaaatattcctgctctagtgaggcttcttcaagcattcttagaacgcggttcaaacacaatagcaagtgctgcagctgacaaaattcctgggttactaggtgtctttcagaagctgattgcatccaaagcaaatgaccaccaaggtttttatcttctaaacagtataatagagcacatgcctcctgaatcagttgaccaatataggaaacaaatcttcattctgctattccagagacttcagaattccaaaacaaccaagtttatcaagagttttttagtctttattaatttgtattgcataaaatatggggcactagcactacaagaaatatttgatggtatacaaccaaaaatgtttggaatggttttggaaaaaattattattcctgaaattcagaaggtatctggaaatgtagagaaaaagatctgtgcggttggcataaccaaattactaacagaatgtcccccaatgatggacactgagtataccaaactgtggactccattattacagtctttgattggtctttttgagttacccgaagatgataccattcctgatgaggaacattttattgacatagaagatacaccaggatatcagactgccttctcacagttggcatttgctgggaaaaaagagcatgatcctgtaggtcaaatggtgaataaccccaaaattcacctggcacagtcacttcacaagttgtctaccgcctgtccaggaagggttccatcaatggtgagcaccagcctgaatgcagaagcgctccagtatctccaagggtaccttcaggcagccagtgtgacactgctttaaactgcatttttctaatgggctaaacccagatggtttcctaggaaatcacaggcttctgagcacagctgcattaaaacaaaggaagttctccttttgaacttgtcacgaattccatcttgtaaaggatattaaatgttgctttaacctgaaccttgagcaaattagttggtttgtgtgatcatacagttatgtgggtggcttctagtttgcaacttcaagggacaagtattaatagttcagtgtatggcgttggtttgtgttgagcgtttgcacggtttggataatcttaaattttgacggacactgtggagactttctgttactaaatccttttgttttgaagctgttgctatttgtatttctcttgtcctttatattttttgtctgtttatttacgcttttattggaaatgtgaataagtaaagaattacttgtgttacttgccaagcagtgcacatttcatagtttcaaatctgtaatcagcaataaaaatcctaaaatatgtacctaaaaaaaaaaaaaaaaaaaa

SEQ ID NO: 1411 - DNA, 2027 bp, Homo Sapiens
  NM_001325
ggcttgtgctccgtacggaagtgtgctttggcgcaccggaagccgactcaacagagctatggcgggtttgactgtgagagacccagcggtggatcgttctctacgttctgtgttcgtggggaacattccttatgaagctactgaagagcagttgaaggacatcttttctgaggttggacctgttgttagtttcagattggtatacgatagagagacaggaaagccaaagggttatggcttctgtgaataccaagaccaagagacagcacttagtgccatgcggaacctgaatgggcgcgaattcagtgggagagcacttcgagtggacaatgctgccagtgaaaagaacaaagaagagctgaagagccttggcactggtgcccctgtcattgagtcaccttatggagagaccatcagtcctgaggatgcccctgagtccattagcaaagcagttgccagccttccaccagagcagatgtttgagctgatgaaacaaatgaagctctgtgtccagaatagtccccaggaggcacggaacatgttacttcagaaccctcaactggcttatgctttgctgcaagcacaggtagtgatgagaattgtggatccggaaattgccctgaaaattctgcatcgccagacaaatatcccaacgctgattgcaggcaaccctcagccagtccatggtgctgggcctggctcaggatccaatgtgtcaatgaaccagcagaatcctcaggcccctcaggcccagtctttgggtggaatgcatgtcaatggcgcacctcctctgatgcaagcttctatgcagggtggagttccagcaccagggcaaatgccagctgctgtcacaggacctggccctggttccttagctcctggaggaggaatgcaggctcaggttggaatgccaggaagtggaccagtgtccatggaacgggggcaagtgccgatgcaagaccccagagcagctatgcagcggggatccttgcctgcgaatgtcccaacccctcgaggcttgttaggagatgctccgaatgatccacggggaggcactttactttctgtaactggagaggtagagcctagaggttacttgggaccacctcatcagggtccacccatgcaccatgtccctggccatgagagccgaggaccacccccacatgaactgaggggagggccattacccgagcccagacctctaatggcagaaccaagaggacccatgctagatcagaggggtccacccttggatggcagaggtggaagggatccccgaggaatagatgcacgagggatggaggcccgagccatggaggcaagagggttagatgccagaggattagaggcccgtgcaatggaggcccgtgcgatggaagctcgtgcaatggaggcccgagcgatggaggcccgtgcaatggaagtccgagggatggaggccagaggcatggataccagaggcccagtgcctggccccagaggacctatacctagtggaatgcagggtcccagtccaattaacatgggggcggttgtcccccagggatccagacaggtcccagtcatgcagggaacaggaatgcaaggagcaagtatacagggtggaagccagcctggcggctttagtcccgggcagaaccaagtcactccacaggatcatgagaaggctgctttgattatgcaggttctacaactgactgcagaccagattgccatgttgcctcctgagcaaaggcagagtatcctgattttaaaggaacaaatacagaaatccactggagcaccttgataggttttcaaaaatacctggcaagaaatctggaaattctataattttgttgaaatattgaaaaaagatgacctgcatcctaacccttgaatgactcaaatcagtgccaggtggaggactcccatcaccttctctcagaacaaaatcacttcattttattgtcttagtttgtatattttctgtgacttgaaataaactttgaacacaattttagtacactgcaaaaaaaaaaaaa

SEQ ID NO: 1412 - DNA, 2846 bp, Homo Sapiens
  NM_001326
gcagccattttaattcatatttgagtgggcggtggcgattggtgttggcggtctggctcagctgggcagggggtaactttactgatttgggggtggtttttagtttaatttttcttttctagcttcccatcgacggtcagtgcgcacgttgtaatcagctgaggccatgtcaggagacggagccacggagcaggcagctgagtatgtcccagagaaggtgaagaaagcggaaaagaaattagaagagaatccatatgaccttgatgcttggagcattctcattcgagaggcacagaatcaacctatagacaaagcacggaagacttatgaacgccttgttgcccagttccccagttctggcagattctggaaactgtacattgaagcagagattaaagctaaaaattatgacaaggttgaaaagctatttcagagatgccttatgaaggttttgcacattgatttatggaagtgttatctttcatatgtccgagaaaccaagggtaaactaccaagttacaaagaaaaaatggctcaagcatatgactttgcactggataaaattggaatggaaattatgtcctatcagatttgggtggattacatcaatttcctaaaaggcgtggaagctgtaggatcttatgcagaaaatcaaagaataacagctgtccgaagagtttatcaacgaggttgtgttaatccgatgatcaacattgaacagctctggagagactataacaagtatgaagagggtatcaatattcatttagctaaaaaaatgattgaagatcggagtagagattatatgaatgctagacgtgtagcaaaggaatatgagacagtaatgaaaggcttggaccgtaatgctccctcggtgcctcctcagaatactcctcaagaagctcaacaagtagatatgtggaagaaatatatacagtgggaaaagagcaaccctcttcgtacagaggatcagacccttataacaaaaagagttatgtttgcttatgaacagtgcctgcttgtgctgggccatcaccctgatatttggtatgaagctgcccagtatcttgagcagtcaagtaaactgctcgcagaaaagggagatatgaataatgccaaattatttagtgatgaagctgctaatatatatgaaagagccataagcactttattgaagaagaatatgcttctttattttgcatatgcagattatgaagagagtcgcatgaagtatgaaaaggttcacagtatatataacagacttctggcaattgaggatattgaccctaccttggtatatatccaatatatgaaatttgcacggagagcagaaggcatcaaatctggaagaatgatatttaaaaaagcaagagaagataccagaacccgccaccatgtctatgttactgcagcactcatggaatattactgtagtaaggacaaatctgttgcctttaagatttttgagctggggctaaaaaaatatggagacattccagagtatgtcctggcctatattgactatctttctcacctcaatgaggacaataatacccgagttttgtttgaacgagttttaacatctggaagccttcctcctgagaagtctggagaaatctgggcccgatttctagcatttgaaagtaatattggtgatctagctagtatactcaaagtggagaaaagacggtttacagcattcaaagaagagtatgaagggaaagaaacggctttactagtagatagatacaagttcatggatttatatccttgctctgcaagtgaattaaaagcacttggttataaggatgtctcccgtgctaagctagcagctataattccggacccagttgtagctccttctatagtgcctgttctgaaagatgaagtggatagaaaaccagaataccctaaaccagacactcagcagatgattccatttcagccacgacatttagcacctccaggtttacaccctgtacctggtggagtgttcccagtccctcctgcagctgttgttttaatgaaacttctccctcctcctatctgtttccagggtccttttgtacaagtggatgaactgatggaaattttccgaagatgcaagataccaaatactgttgaggaagctgtgaggatcattactggtggggccccagagctagctgtagaaggcaacggccccgtggaaagtaatgcagtactcaccaaggccgtcaaaaggcccaacgaggattcagatgaagatgaagaaaagggagccgttgtcccccctgttcatgacatttacagagcacggcagcagaagcggattcggtagggttttaaacgcctctgcagaaaactcctgtccaggattccttttgcctcaagtggtatgtttaaaagagacaacgctttgttacaaggttcttggaaacaaagttgtattgtcattggtgcctctatcacatggttcttgagaaaaaacaaaccaacctgtgtgaattttagaatacggaacagacctatgctctaagcaaaattaggttttcaaaaatgtgagaacagtacaaagtggcagaaccacattttgttccctcttcaagggtgtcttgtatgtgccgcttgaagatttgtgagtttttcaacagttttattttaaaaactggatggcttatgattgtaaagcattttatcacattttctgaaaacaattgttcttggtttgcttatgtagagtcctgccttattgtttgtttttatttatggcagaatgtatgaaatccgttttgtagtttcaaattttaaaagtcctttaaaaaataaaaggattcagaaacaaaaaaaaaaaaaaaaaaaaaaaa

SEQ ID NO: 1413 - DNA, 2943 bp, Homo Sapiens
  NM_001334
ccgaaagagaaaacaggccgcgcgggcggcagaggagccgggcgccgcaatggacgtgcgggcgctgccgtggctgccgtggctgctgtggctgctgtgccggggcggcggcgatgcggactcccgcgcccccttcaccccgacctggccgcggagccgcgagcgtgaagccgccgccttccgggaaagtcttaatagacatcgatacttgaattctttatttcccagtgaaaactccaccgccttctatggaataaatcagttttcctatttgtttcctgaagagtttaaagccatttatttaagaagcaaaccttccaagtttcccagatactcagcagaagtacatatgtccatccccaatgtgtctttgccgttaagatttgactggagggacaagcaggttgtgacacaagtgagaaaccagcagatgtgtggaggatgctgggccttcagcgtggtgggggcagtggaatctgcttatgcaataaaggggaagcccctggaagacctaagtgtccagcaggtcattgactgttcgtataataattatggctgcaatggaggctctactctcaatgctttgaactggttaaacaagatgcaagtaaaactggtgaaagattcagaatatccttttaaagcacaaaatggtctgtgccattacttttctggttcacattctggattttcaatcaaaggttattctgcatatgacttcagtgaccaagaagatgaaatggcaaaagcacttcttacctttggccctttggtagtcatagtagatgcagtgagctggcaagattatctgggaggcattatacagcatcactgctctagtggagaagcaaatcatgcagttctcataactgggtttgataaaacaggaagcactccatattggattgtgcggaattcctggggaagttcttggggagtagatggttatgcccatgtcaaaatgggaagtaatgtttgtggtattgcagattccgtttcttctatatttgtgtgacatgttgggcagatcaagagacagctacaaaaatgaaggttttcataatgcaatgtaacatagtacttcaaagtattattcaacttcaagtttcagcaactacctacaaaagattctaaggcctagtagtatttaaactaagtttcagaatgttcccttcttgtagagagatggacaaccaaagtcagtgggacaaactccagcacagaagcctgcgaggaagcctatggaatagtttcctgtcctgagacgaaattcagattaggagatattttaggcccctgcaactggggaaggctactgtttgtttttgtttgcttattatttatttgtttgtttattgtgagatatttcaggtgggatcaaagaggtcataagaatttattttcttttgtggggtgtaactactagctttagattacccctatacacaagaatggccaacctaaaattatgtgtgtcttgtacagttagttatattagcagccctctgagatggcgtatctatcggaaggatttcaaacaccaattgctttacctgaacaaatggtgcttaccctttgaacagcagagtgaccacgtagaaggaaggaaaagggcaaaatcgcttcagttaaactgaaattaaatgaacaataaggcaactatataagtaacttctagtagcattgcctgagagacaaattattgtttgataattttcattgtgaataggaatccaatagatcatattgcttactttgttctttttatactatagaataatattttgttctctagtatatcaaaataccaaaatattatctcatattttctccctctttctcttactctttaccaagttttcctggtggcttggcttccctgactaaagaattaagtctcatttttactttccatttctattttcttaccacttggttggctccctttgtctctgtacctttaccaacattaggatctcacctctttcttcctcccttaattcataagcaccactcctatcaaagtcccatctcttaaccctgggtatcaaacaaactgtgagttttccagaatctgtttcccagttttcccctcagctttcctggtctcccatccgaactgcttctttgtgcacctcttgttctttctcttggctcccagtcttgattcctgtgatcactcttgcatcactaattgcacaagtgatttcaggtgcaattctgattagcctgcgtccacacagtgatcgatgatcctatgtgcctagaaaggacactgtgtgctgctcatgacctgcaacaggaaaaaagccatttcttgttagcagtgtaagaaccttagagcaaaggagttgaccttctgattgaatataagcacaaccatattaaatgaatcaatacaagaaaattatttctgatactatgtatgtacatatttcttctctaaaatgtatcattcttttctaatgtatatgatctaacaaaaatgaaacatgaaatgcagtagcaaccactaaaaaaaaaaattcaaggacatctaactttttctctcacttttgccctttgtttatccttccctgtgattagataaacaaaataaaaaacaaaatgctgtatttctcttcttacgccagtcagaaccaatccgaaaagaatgtgtgttgactcaggtttggagttatttcaggaagacagatattgaccttttaattgataaatattcttattatcctggaatgccagaaaagaactatgtcctgcttgtctagtttgtattcgctgactttctatgtgatatagatgcatttgtaatactctttttcaagtgctaaaggatttctaaaatttcaaactgattaatatgtttctgctgttctggattttgatgacatttacaataaaacaacctacatttgactttggtttaaaaagaaaaaaaaaaaa

SEQ ID NO: 1414 - DNA, 1327 bp, Homo Sapiens
  NM_001335
tgcgcggcttcctgcctccatgccactccagactgcaccggcatggcactgactgcccacccctcctgcctcctggccctgttggtggcaggcctagcccaaggcatcagaggcccccttagggcccaggacctaggtccccagccgctagagctgaaagaggccttcaagttgttccagatccagttcaaccggagttacctgagcccagaagagcatgctcaccgcctggacatctttgcccacaacctggcccaggctcagaggctgcaggaggaggacttgggcacagctgagtttggggtgactccattcagtgacctcacagaggaggagtttggccagctctatggctatcggagggcagctggaggggtccccagcatgggcagagaaataaggtctgaagagccagaggagtcagtacctttcagctgtgactggcggaaggtggccggcgccatctcacccatcaaggaccagaaaaactgcaactgctgctgggccatggcagcggcaggcaacatagagaccctgtggcgcatcagtttctgggattttgtggacgtctccgtgcaggaactgctggactgtggccgctgtggggatggctgccacggtggcttcgtctgggacgcgttcataactgtcctcaacaacagcggcctggccagtgaaaaggactacccgttccagggcaaagtcagagcccacaggtgccaccccaagaagtaccagaaggtggcctggatccaggacttcatcatgctgcagaacaacgagcacagaattgcgcagtacctggccacttatggccccatcaccgtgaccatcaacatgaagccccttcagctataccggaaaggtgtgatcaaggccacacccaccacctgtgacccccagcttgtggaccactctgtcctgctggtgggttttggcagcgtcaagtcagaggaggggatatgggcagagacagtctcatcgcagtctcagcctcagcctccacaccccaccccatactggatcctgaagaactcctggggggcccaatggggagagaagggctatttccggctgcaccgagggagcaatacctgtggcatcaccaagttcccgctcactgcccgtgtgcagaaaccggatatgaagccccgagtctcctgccctccctgaacccacctggccccctcagctctgtcctgttaggccaactgcctccttgccagccccacccccaggtttttgcccatcctcccaatctcaatacagcctgaataaaccaagacaagacctctgaaaaaaaaaaaaaaaaaaaaaaaaaaaaaaa

SEQ ID NO: 1415 - DNA, 1517 bp, Homo Sapiens
  NM_001336
aaagtgcggggtcggccgggtgctgggccgaggccgaggccggggcgggatccagagcgggagccggcgcgggatctgggactcggagcgggatccggagcgggacccaggagccggcgcggggccatggcgaggcgcgggccagggtggcggccgcttctgctgctcgtgctgctggcgggcgcggcgcagggcggcctctacttccgccggggacagacctgctaccggcctctgcggggggacgggctggctccgctggggcgcagcacatacccccggcctcatgagtacctgtccccagcggatctgcccaagagctgggactggcgcaatgtggatggtgtcaactatgccagcatcacccggaaccagcacatcccccaatactgcggctcctgctgggcccacgccagcaccagcgctatggcggatcggatcaacatcaagaggaagggagcgtggccctccaccctcctgtccgtgcagaacgtcatcgactgcggtaacgctggctcctgtgaagggggtaatgacctgtccgtgtgggactacgcccaccagcacggcatccctgacgagacctgcaacaactaccaggccaaggaccaggagtgtgacaagtttaaccaatgtgggacatgcaatgaattcaaagagtgccacgccatccggaactacaccctctggagggtgggagactacggctccctctctgggagggagaagatgatggcagaaatctacgcaaatggtcccatcagctgtggaataatggcaacagaaagactggctaactacaccggaggcatctatgccgaataccaggacaccacatatataaaccatgtcgtttctgtggctgggtggggcatcagtgatgggactgagtactggattgtccggaattcatggggtgaaccatggggcgagagaggctggctgaggatcgtgaccagcacctataaggatgggaagggcgccagatacaaccttgccatcgaggagcactgtacatttggggaccccatcgtttaaggccatgtcactagaagcgcagtttaagaaaaggcatggtgacccatgaccagaggggatcctatggttatgtgtgccaggctggctggcaggaactggggtggctatcaatattggatggcgaggacagcgtggcactggctgcgagtgttcctgagagttgaaagtgggatgacttatgacacttgcacagcatggctctgcctcacaatgatgcagtcagccacctggtgaagaagtgacctgcgacacaggaaacgatgggacctcagtcttcttcagcagaggacttgatattttgtatttggcaactgtgggcaataatatggcatttaagaggtgaaagagttcagacttatcaccattcttatgtcactttagaatcaagggtgggggagggagggagggagttggcagtttcaaatcgcccaagtgatgaataaagtatctggctctgcacgaaaaaaaaaaaaaaaaaa

SEQ ID NO: 1416 - DNA, 3108 bp, Homo Sapiens
  NM_001337
gaaatactcgtctctggtaaagtctgagcaggacagggtggctgactggcagatccagaggttcccttggcagtccacgccaggccttcaccatggatcagttccctgaatcagtgacagaaaactttgagtacgatgatttggctgaggcctgttatattggggacatcgtggtctttgggactgtgttcctgtccatattctactccgtcatctttgccattggcctggtgggaaatttgttggtagtgtttgccctcaccaacagcaagaagcccaagagtgtcaccgacatttacctcctgaacctggccttgtctgatctgctgtttgtagccactttgcccttctggactcactatttgataaatgaaaagggcctccacaatgccatgtgcaaattcactaccgccttcttcttcatcggcttttttggaagcatattcttcatcaccgtcatcagcattgataggtacctggccatcgtcctggccgccaactccatgaacaaccggaccgtgcagcatggcgtcaccatcagcctaggcgtctgggcagcagccattttggtggcagcaccccagttcatgttcacaaagcagaaagaaaatgaatgccttggtgactaccccgaggtcctccaggaaatctggcccgtgctccgcaatgtggaaacaaattttcttggcttcctactccccctgctcattatgagttattgctacttcagaatcatccagacgctgttttcctgcaagaaccacaagaaagccaaagccattaaactgatccttctggtggtcatcgtgtttttcctcttctggacaccctacaacgttatgattttcctggagacgcttaagctctatgacttctttcccagttgtgacatgaggaaggatctgaggctggccctcagtgtgactgagacggttgcatttagccattgttgcctgaatcctctcatctatgcatttgctggggagaagttcagaagatacctttaccacctgtatgggaaatgcctggctgtcctgtgtgggcgctcagtccacgttgatttctcctcatctgaatcacaaaggagcaggcatggaagtgttctgagcagcaattttacttaccacacgagtgatggagatgcattgctccttctctgaagggaatcccaaagccttgtgtctacagagaacctggagttcctgaacctgatgctgactagtgaggaaagatttttgttgttatttcttacaggcacaaaatgatggacccaatgcacacaaaacaaccctagagtgttgttgagaattgtgctcaaaatttgaagaatgaacaaattgaactctttgaatgacaaagagtagacatttctcttactgcaaatgtcatcagaactttttggtttgcagatgacaaaaattcaactcagactagtttagttaaatgagggtggtgaatattgttcatattgtggcacaagcaaaagggtgtctgagccctcaaagtgaggggaaaccagggcctgagccaagctagaattccctctctctgactctcaaatcttttagtcattatagatcccccagactttacatgacacagctttatcaccagagagggactgacacccatgtttctctggccccaagggcaaaattcccagggaagtgctctgataggccaagtttgtatcaggtgcccatccctggaaggtgctgttatccatggggaagggatatataagatggaagcttccagtccaatctcatggagaagcagaaatacatatttccaagaagttggatgggtgggtactattctgattacacaaaacaaatgccacacatcacccttaccatgtgcctgatccagcctctcccctgattacaccagcctcgtcttcattaagccctcttccatcatgtccccaaacctgcaagggctccccactgcctactgcatcgagtcaaaactcaaatgcttggcttctcatacgtccaccatggggtcctaccaatagattccccattgcctcctccttcccaaaggactccacccatcctatcagcctgtctcttccatatgacctcatgcatctccacctgctcccaggccagtaagggaaatagaaaaaccctgcccccaaataagaagggatggattccaaccccaactccagtagcttgggacaaatcaagcttcagtttcctggtctgtagaagagggataaggtacctttcacatagagatcatcctttccagcatgaggaactagccaccaactcttgcaggtctcaacccttttgtctgcctcttagacttctgctttccacacctggcactgctgtgctgtgcccaagttgtggtgctgacaaagcttggaagagcctgcaggtgctgctgcgtggcatagcccagacacagaagaggctggttcttacgatggcacccagtgagcactcccaagtctacagagtgatagccttccgtaacccaactctcctggactgccttgaatatcccctcccagtcaccttgtggcaagcccctgcccatctgggaaaataccccatcattcatgctactgccaacctggggagccagggctatgggagcagcttttttttcccccctagaaacgtttggaacaatctaaaagtttaaagctcgaaaacaattgtaataatgctaaagaaaaagtcatccaatctaaccacatcaatattgtcattcctgtattcacccgtccagaccttgttcacactctcacatgtttagagttgcaatcgtaatgtacagatggttttataatctgatttgttttcctcttaacgttagaccacaaatagtgctcgctttctatgtagtttggtaattatcattttagaagactctaccagactgtgtattcattgaagtcagatgtggtaactgttaaattgctgtgtatctgatagctctttggcagtctatatgtttgtataatgaatgagagaataagtcatgttccttcaagatcatgtaccccaatttacttgccattactcaattgataaacatttaacttgtttccaatgtttagcaaatacatattttatagaacttcca

SEQ ID NO: 1417 - DNA, 4653 bp, Homo Sapiens
  NM_001347
gtaccgggccgtggagcggcggctcctgtacccccggcgcggacctaaaggggctcgggccgctcgggccgggaatggcggcggcggccgagcccggggcccgcgcctggctgggcggcggctccccgcgccccggcagcccggcctgcagccccgtgctgggctcaggaggccgcgcgcgcccggggccggggccggggccgggacccgagcgggcgggcgtcagagccccgggccccgctgccgcgccgggacacagcttccggaaggtgacgctcaccaagcccaccttctgccacctctgctccgacttcatctgggggctggccggcttcctgtgcgacgtctgcaatttcatgtctcatgagaagtgcctgaagcacgtgaggatcccgtgcacgagtgtggcacccagcctggtccgggttcctgtagcccactgcttcggcccccgggggctccacaagcgcaagttctgtgctgtctgccgcaaggtcctggaggcaccggcgctccactgcgaagtgtgtgagctgcacctccacccagactgtgtgcccttcgcctgcagtgactgccgccagtgccaccaggatgggcaccaggatcacgacacccatcaccaccactggcgggaggggaacctgccctcgggagcgcgctgcgaggtctgcaggaagacgtgcggctcctctgacgtgctggccggcgtgcgctgcgagtggtgcggggtccaggcgcactccctctgctccgcggcgctggctcccgagtgtggcttcgggcgtctgcgctccctggtcctgcctcccgcgtgcgtgcgccttctgcccggcggcttcagcaagacgcagagcttccgcatcgtggaggccgcggagccgggcgaggggggcgacggcgccgacgggagcgctgccgtgggtccaggcagagagacacaggcaactccggagtccgggaagcaaacgctgaagatctttgatggcgacgacgcggtgagaagaagccagttccgcctcgtcacggtgtcccgcctggccggtgccgaggaggtgctggaggccgcactgcgggcccaccacatccccgaggaccctggccacctggagctgtgccggctgcccccttcctctcaggcctgtgacgcctgggctgggggcaaggctgggagtgctgtgatctcggaggagggcagaagccccgggtccggcgaggccacgccagaggcctgggtcatccgggctctgccgcgggcccaggaggtcctgaagatctaccctggctggctcaaggtgggcgtggcctacgtgtccgtgcgagtgaccccgaagagcacggcccgctctgtggtgctggaggtcctgccgctgctcggccgccaggccgagagtcccgagagcttccagctggtggaggtggcgatgggctgcaggcacgtccagcggacgatgctgatggacgaacagcccctgctggaccggctacaggacatccggcagatgtctgtgcggcaggtgagccagacgcggttctacgtggcagagagcagggatgtagccccgcacgtctccctgtttgttggcggcctgcctcccggcctgtctcccgaggagtacagcagcctgctgcatgaggccggggctaccaaagccaccgtggtgtccgtgagtcacatctactcctcccaaggcgcggtagtgttggacgttgcctgctttgcggaggccgagcggctgtacatgctgctgaaggacatggctgtgcggggccggctgctcactgccctggtgctccccgacctgctgcacgcgaagctgcccccagacagctgtcccctccttgtgttcgtgaaccccaagagtggaggcctcaagggccgagacctgctctgcagcttccggaagctactgaaccctcatcaggtcttcgacctgaccaacggaggtcctcttcccgggctccacctgttctcccaggtgccctgcttccgggtgctggtgtgtggtggcgatggcactgtgggctgggtgcttggcgccctggaggagacacggtaccgactggcctgcccggagccttctgtggccatcctgcccctgggcacagggaatgaccttggtcgagtcctccgctggggggcgggctacagcggcgaggacccgttctccgtactgctgtctgtggacgaggccgacgccgtgctcatggaccgctggaccatcctgctggatgcccacgaggctggcagtgcagagaacgacacggcagacgcagagccccccaagatcgtgcagatgagtaactactgtggcattggcatcgacgcggagctgagcctggacttccaccaggcacgggaagaggagcctggcaagttcacaagcaggctgcacaacaagggtgtgtacgtgcgggtggggctgcagaagatcagtcactctcggagcctgcacaagcagatccggctgcaggtggagcggcaggaggtggagctgcccagtattgaaggcctcatcttcatcaacatccccagctggggctcgggggccgacctgtggggctccgacagcgacaccaggtttgagaagccacgcatggacgacgggctgctggaggttgtgggcgtgacgggcgtcgtgcacatgggccaggtccagggtgggctgcgctccggaatccggattgcccagggttcctacttccgagtcacgctcctcaaggccaccccggtgcaggtggacggggagccctgggtccaggccccggggcacatgatcatctcagctgctggccctaaggtgcacatgctgaggaaggccaagcagaagccgaggagggccgggaccaccagggatgcccgggcggatgctgcgcctgcccctgagagcgatcctaggtaggggtggctggggcagcccaagggctcgagccatctctgctcccgccagccttgttttcaggtggtctggaggcagctccacgtccacacagtggccggccctgtggtcggacctggctacagccctgaccacagcatcttcccagtgacggagcgggacccgccctcatcccattggtgacacatgttggtgtcacagccctcatcccactggagactggtgtgcgggtggcagtgttaccccgtgtcccgggtgggcgcagggctctggatggtgagccctctgccctgtgggggcctggtcctctcctcaggggtgggcacccatccctctacccactgagccccttgagctggacagtgctggatgcaggccgtccaggtgggtctgatctcactttgtgcccctcgggccgtccccctggccagtccttcagagcagcaggctccctggtgtgtccctgccccagcagacacaggctgccagtccctccagcctcacctccccgccctgggcagcaggtgtgggcagcgtgtgaggctgccgggtggtggtgactggtgacttccttgtgttcagggaagggagaaggtgccttcccttgttttctggccttgttatatacagatggcagcttggatctcaggtacagctccaggggcaggcagtgcccagctggacctggtggccctttcctagtgcctctgcttggggaggagaacctctgtccacgtggaggctaggaggtctcaggtgctgccctggcagcaccagagtgtgggccgggcccgagtgtctgcccctcggccctcagggtggggcacttagcacccagaagggaccaaaagcagggcatggcggtgcagaggagtttgggaggtgtaaacagcccatgcacgtggaggaggagctggctttcagccccagaccccacgctagcactttccacgctgcttgcccgctgttgatgtgcagttcccagtgcctgtgtgagccgacatctgctcagtcctatccctcgtcagcgtgtggagacccagctcctgcagccctcctgctcccacgcccccagacagcttggtggagggtcctgcatctgggccaggctggggtgcacccagccaaagacaaagctgcctccacgtgcccaaggattcagatggtgcactggccccgggaggagtctgaccaaaaatggagcccgctctgtggggaagccccgactcccccacgagaaacggtcccacggtgcggatctcccccttcccttgtggggcacagctggcctgggcctccaatcctgcggagctttcctgggtgtggctttgacctcagaagtggctctggtttggcctcaggagtgtggcctggcccagcctgctgcagcctcctggggggcccttgatgccactaatcccccgaccccccgcatctgccaaactgcacagacacacgcattgtaaggccgcttgtggcctccagcgtgcactcttgtttacgtcattgtcatcttcaagaccagtcctttgtgattagttttgcttcgcgagccctggtgtggactgtggtctgtatgaatcgtgtgtaactgtggtgaggggcttgtcctgtatgtgagtctgtacccaggtggggtctgtgccctgcacaccgggcccctctgtatttatcgctgcctgaatgcaacagtaatttatatccaggacaaatacagtctgggcgtcactatcctaaaaaaaaaaaaaaaaaa

SEQ ID NO: 1418 - DNA, 2322 bp, Homo Sapiens
  NM_001349
atctcgagatagccgcagctctcgcgatctttctggagccgcacctccacgcggagtccgagcgcgtgtgctgagaccccagggtcgggagggcggagactgggagggagggagaagcccctttggcctgccttacggaagcctgcgagggagggtggtgtccactgcccagttccgtgtcccgatgcccagcgccagcgccagccgcaagagtcaggagaagccgcgggagatcatggacgcggcggaagattatgctaaagagagatatggaatatcttcaatgatacaatcacaagaaaaaccagatcgagttttggttcgggttagagacttgacaatacaaaaagctgatgaagttgtttgggtacgtgcaagagttcatacaagcagagctaaagggaaacagtgcttcttagtcctacgtcagcagcagtttaatgtccaggctcttgtggcggtgggagaccatgcaagcaagcagatggttaaatttgctgccaacatcaacaaagagagcattgtggatgtagaaggtgttgtgagaaaagtgaatcagaaaattggaagctgtacacagcaagacgttgagttacatgttcagaagatttatgtgatcagtttggctgaaccccgtctgcccctgcagctggatgatgctgttcggcctgaggcagaaggagaagaggaaggaagagctactgttaaccaggatacaagattagacaacagagtcattgatcttaggacatcaactagtcaggcagtcttccgtctccagtctggcatctgccatctcttccgagaaactttaattaacaaaggttttgtggaaatccaaactcctaaaattatttcagctgccagtgaaggaggagccaatgtttttactgtgtcatattttaaaaataatgcatacctggctcagtccccacagctatataagcaaatgtgcatttgtgctgattttgagaaggttttctctattggaccagtattcagagcggaagactctaatacccatagacatctaactgagtttgttggtttggacattgaaatggcttttaattaccattaccacgaagttatggaagaaattgctgacaccatggtacaaatattcaaaggacttcaagaaaggtttcagactgaaattcaaacagtgaataaacagttcccatgtgagccattcaaatttttggagccaactctaagactagaatattgtgaagcattggctatgcttagggaagctggagtcgaaatgggagatgaagacgatctgagcacaccaaatgaaaagctgttgggtcatttggtaaaggaaaagtatgatacagatttttatattcttgataaatatccattggctgtaagacctttctataccatgcctgacccaagaaatcccaaacagtccaactcttacgatatgttcatgagaggagaagaaatattgtcaggagctcaaagaatacatgatcctcaactgctaacagagagagctttacatcatggaattgatttggagaaaattaaggcttacattgattccttccgctttggagcccctcctcatgctggtggaggcattggattggaacgagttactatgctgtttctgggattgcataatgttcgtcagacctccatgttccctcgtgatcccaaacgactcactccttaaattcacactttgccacttaactccagtgtggatgacagagcgagaccctgcctcaaaaaaaaaaaaaaaaaaagaaagccacacttattcttttcagtaacctgctagtgcacaggctgtactttaggtacttaaaatatgcactagaataaatttgcaaggccctaaaatatcactgttatttttggagtaattcagtataggttcgtttaaaagagatttttataacttcagacatgcatcagtaggaaataacttgagaaattcatatggttatgttacaaattcatattctgttactacagtaaacgttaagagttttaaacagttaagattgtacaatttttcttcttttctatattacaagggccccagtgttaatgtcttagattttcagtatttgaacttatttttttaaattctgtcattgagataagaataattcaggtagcatctgaaattttaatgaatgtataattggcatatcatggaaaattaaccagaaagtatcagttcttaaaagttatgcctagaaattatgtaaagctaaactactggttagaaagtattcagtgtaatattgtattaatttgttaaattctaaacttgaatttcaataaaattttaaagct

SEQ ID NO: 1419 - DNA, 1658 bp, Homo Sapiens
  NM_001352
cgcgcacacctctcggtgcagattgcaaagcgccttccgttgcgagagctgcagattttgcaagagccaggctcgcccaccttgtagaaggagcgccttgagtcccctctcaccctcggttgcaaagagccgaccgcttgatctggacaccccctcgcccagattgcatgatctcccgggaccctcttgagttgcacgtttctgcaccgaggacctcaaatccccgtcgctcctaggatttgcagcgttctggatactggagggttgcaggctacactcgcccgcccctgggcagacactcgtccaaaccactggagtgtgctggtgactggcaggccagcccttcgcctctccatgaacccgtgagcctgggggcaggtgccaggcgatggcgcggcctgtgagcgacaggaccccggcccctctgctgctgggcggcccggccgggacaccccctggcgggggagcgctgcttgggttgcggagccttctgcaggggaccagcaagcccaaagagccggccagctgtctcctgaaggaaaaggagcgcaaggcggccctgcctgcagccacaacccctgggccaggcctggagactgcgggcccggcggatgccccggctggggcagtggtgggcggagggtccccgcgggggcgcccggggccggtgcccgccccgggtctgttggcgccactgctgtgggagcgcacgctgccgttcggcgatgtggagtacgtagacctggacgccttcctgctggagcacgggctcccgcccagcccgccgccccccggtggcccgtcgccggagccgtcgcccgcgcggacgcccgcaccctccccagggccgggttcgtgcggctcggcttccccccgctcctctcctgggcacgcccccgcccgggctgccctcgggaccgccagcggccaccgcgcaggcctgacctctcgggacacacccagccctgtggacccagacaccgtggaggtgttgatgacctttgaacccgacccagctgatcttgccctatcaagcattcctggccacgagacctttgaccctcgaagacatcgcttctcagaagaggaacttaagccccagccaatcatgaagaaggcaagaaaaatccaggtgccggaggagcagaaggatgagaaatactggagccggcggtacaagaacaacgaggcagccaagcggtcccgtgacgcccggcggctcaaggagaaccagatatcggtgcgggcggccttcctggagaaggagaacgccctgctgcggcaggaagttgtggccgtgcgccaggagctgtcccactaccgcgccgtgctgtcccgataccaggcccagcacggggccctgtgaggctgccccacatccccacctggcggagctctcctccgccttgctgagacttacgccctgttcccttcctgccctgtggcccacgggccggccagctgggtgccccagggacgtgataatgcagataaatacatttatatttttaagaaaaagcgagcctcccccctcccttgcgggggcggggagggttctctgtgtgtgtccccggcacgtcagggaccctatcctcccaccgcctccgttaacacgatcctgaataaatcttgagaaccccagaaaaaaaaaaaaaaaa

SEQ ID NO: 1420 - DNA, 4543 bp, Homo Sapiens
  NM_001357
atgcgtacgctcgctggccccgccccctagcgccgcggtcggagccatttcgccgattcctccatgcgagttgctgtgcgtttctctgttgtctcggtagaaggccagagtcacacacggtcctaagagctgggcaccaggaagcgaaggctgatctgaagaagacacttgaatcatgggtgacgttaaaaattttctgtatgcctggtgtggcaaaaggaagatgaccccatcctatgaaattagagcagtggggaacaaaaacaggcagaaattcatgtgtgaggttcaggtggaaggttataattacactggcatgggaaattccaccaataaaaaagatgcacaaagcaatgctgccagagactttgttaactatttggttcgaataaatgaaataaagagtgaagaagttccagcttttggggtagcatctccgcccccacttactgatactcctgacactacagcaaatgctgaaggagatttaccaacaaccatgggaggacctcttcctccacatctggctctcaaagcagaaaataattctgaggtaggggcctctggctatggtgttcctgggcccacctgggaccgaggagccaacttgaaggattactactcaagaaaggaagaacaagaagtgcaagcgactctagaatcagaagaagtggatttaaatgctgggcttcatggaaactggaccttggaaaatgctaaagctcgtctaaaccaatattttcagaaagaaaagatccaaggagaatataagtacacccaagtgggtcctgatcacaacaggagctttattgcagaaatgaccatttatatcaagcagctgggcagaaggatttttgcacgagaacatggatcaaataagaaattggcagcacagtcctgtgccctgtcacttgtcagacaactgtaccatcttggagtggttgaagcttactccggacttacaaagaagaaggaaggagagacagtggagccttacaaagtaaacctctctcaagatttagagcatcagctgcaaaacatcattcaagagctaaatcttgagattttgcccccgcctgaagatccttctgtgccagttgcactcaacattggcaaattggctcagttcgaaccatctcagcgacaaaaccaagtgggtgtggttccttggtcacctccacaatccaactggaatccttggactagtagcaacattgatgaggggcctctggcttttgctactccagagcaaataagcatggacctcaagaatgaattgatgtaccagttggaacaggatcatgatttgcaagcaatcttgcaggagagagagttactgcctgtgaagaaatttgaaagtgagattctggaagcaatcagccaaaattcagttgtcattattagaggggctactggatgtgggaaaaccacacaggttccccagttcattctagatgactttatccagaatgaccgagcagcagagtgtaacatcgtagtaactcagcccagaagaatcagtgcggtttctgtggcagagcgagttgcatttgaaagaggagaagagcctggaaaaagctgtggctacagcgttcgatttgagtctatacttcctcgtcctcatgccagtataatgttttgtactgtaggtgtgctcctgagaaaattagaagcaggcattcgaggaatcagtcatgtaattgtagatgaaatacatgaaagagatattaatactgacttccttttggtagtactgcgtgatgttgttcaggcttatcctgaagttcgcattgttcttatgtctgctactattgataccagcatgttttgtgaatatttcttcaattgccccatcattgaagtttatgggaggacttacccagttcaagaatattttctggaagactgcattcagatgacccactttgttcctccaccaaaagacaaaaagaagaaggataaggatgatgatggtggtgaggatgatgatgcaaattgcaacttgatctgtggtgatgaatatggtccagaaacaaggttgagcatgtctcaattgaacgaaaaggaaactccttttgaactcatcgaggctctacttaagtacattgaaacccttaatgttcctggagctgtgttggtttttttgcctggctggaatctgatttatactatgcagaagcatttggaaatgaatccacattttggaagccatcggtatcagattctacccctgcattctcagattcctcgagaggaacagcgcaaagtgtttgatccagtaccagttggagtaaccaaggttattttgtccacaaatattgctgaaacaagcattaccataaacgatgttgtttatgtcattgactcctgcaagcagaaagtgaaactcttcactgctcacaacaatatgaccaactatgctaccgtatgggcatcaaaaacaaaccttgagcaacggaaagggcgagctggccgagtacggcctggattctgctttcacctgtgcagccgagctcgttttgagagacttgaaacccacatgacaccagagatgttccgaacaccattgcatgaaattgctcttagcataaaacttctgcgtctaggaggaattggccaatttctggccaaagcaattgaacctccccctttggatgctgtgattgaagcagaacacactcttagagagcttgatgcattagatgccaatgatgagttgactcctttgggacgaatcctggctaaactccccattgagcctcgttttggcaaaatgatgataatggggtgtattttctacgtgggagatgctatctgtaccattgctgctgctacctgctttccagagcctttcatcaatgaaggaaagcggctgggctatatccatcgaaattttgctggaaacagattttctgatcacgtagcccttttatcagtattccaagcctgggatgatgctagaatgggtggagaagaagcagagatacgtttttgtgagcacaaaagacttaatatggctacactaagaatgacctgggaagccaaagttcagctcaaagagattttgattaattctgggtttccagaagattgtttgttgacacaagtgtttactaacactggaccagataataatttggatgttgttatctccctcctggcctttggtgtgtaccccaatgtatgctatcataaggaaaagaggaagattctcaccactgaagggcgtaatgcacttatccacaaatcatctgttaattgtccttttagtagccaagacatgaagtacccatctcccttctttgtatttggtgaaaagattcgaactcgagccatctctgctaaaggcatgactttagtcacccccctgcagttgcttctctttgcctccaagaaagtccaatctgatgggcagattgtgcttgtagatgactggattaaactgcaaatatctcatgaagctgctgcctgtatcactggtctccgggcagccatggaggctttggttgttgaagtaaccaaacaacctgctatcatcagccagttggaccccgtaaatgaacgtatgctgaacatgatccgtcagatctctagaccctcagctgctggtatcaaccttatgattggcagtacacggtatggagatggtccacgtcctcccaagatggcccgatacgacaatggaagcggatatagaaggggaggttctagttacagtggtggaggctatggcggtggctatagcagtggaggctatggtagcggaggctatggtggcagcgccaactcctttcgggcaggatatggtgcaggtgttggtggaggctatagaggagtttcccgaggtggctttagaggcaactctggaggagactacagagggcctagtggaggctacagaggatctgggggattccagcgaggaggtggtaggggggcctatggaactggctactttggacagggaagaggaggtggcggctattaaaacttggttatgtcagttcctgtgtgtagacagtaaggaaaaaaaggcatgctatgtgttacgtgttttttccagtatgtttatttgccaccaaaaagtaaatgcattttcacccattctgtggttcattgtagtttaaggaaaccaagcatatagatgcattagtgattttgtttatattatgtaaaatataacgatctcttaaaaataccacagtttgtattttttctttaaggagtaaagatttgcctttaaataacttggtattttcctggctttcgtttaatacaatagaaaataaagtattacaccgaatacttgccgtgtagtttgtttgttgacctcgtatgttagaaaattttacaatgccagctacatctgttgattttaaatgtcagagaagttgtaccctgtttcaaaagtatactaagtgatactacttgtaatagaataaatcatcttggaattgaattgttaccttttgaagtaaatactggcaagtgcacaagccacataaacctgaataaaacttttgacctagggttgaaaaaaaaa

SEQ ID NO: 1421 - DNA, 3019 bp, Homo Sapiens
  NM_001358
cccagccctcgtcgccgccgccattttagctgttggttccggccgcaccgtgtgggctgtagtagcgggaggggtgggggtcctccagagttaagtggctgtcctcgactgtgcccatacagcagccagctttcttccttaataactgcccgttcgaagagtgcgaggatgtccaagcggcaccggttggacctaggggaggattacccctctggcaagaagcgtgcggggaccgatgggaaggatcgagatcgagaccgggatcgtgaagatcggtctaaagatcgagaccgagaacgtgatagaggagatagagagcgagagagggagaaagaaaaggagaaggagttgcgagcttcaacaaatgctatgcttatcagtgctggattaccacctttgaaagcttcccattcagctcactcaacccactcagcacattcaacgcattcaacacattctgctcattcaacgcatgccggacatgcaggtcacacgtcacttccacagtgcattaatccgttcaccaacttaccccatactcctcgatactatgatattctaaagaaacgtcttcagctccctgtttgggaatacaaggataggtttacagatattctggttagacatcagtcctttgtactggttggtgagactgggtctggtaaaacaacacagattccacagtggtgtgtggagtacatgcgatcattaccaggacccaagagaggagttgcctgtacccaacccaggagagtggctgcaatgagtgtggctcagagagttgctgatgagatggatgtgatgttgggccaggaagttggttactccattcgatttgaagactgcagtagtgcaaaaaccattcttaagtatatgactgatgggatgttacttcgtgaagctatgaatgatcccctcctggagcgttatggtgtaataattcttgatgaggctcatgagaggacactggctacagatattctaatgggtgttctgaaggaagttgtaagacagagatcagatttaaaggttatagttatgagcgctactctagatgcaggaaaattccagatttactttgataactgtcctctcctaactattcctgggcgtacacatcctgttgagatcttctatactccagaaccagagagagattatcttgaagcagcaattcgaacagttatccagattcatatgtgtgaagaggaagagggagatcttcttcttttcttaactggtcaagaggaaattgatgaagcctgtaagagaataaagcgtgaagttgatgatttgggccctgaagttggtgacattaaaatcattccattgtattctacacttccacctcagcagcagcaacgcatttttgagcctccacctcccaaaaaacagaatggagcaattggaagaaaggtagttgtgtcaactaacatagcagagacgtctttgacaatagatggtgtggtgtttgtgattgatcctggatttgcgaaacagaaggtctacaatcctcgaatcagagttgagtcccttttggtgacagctattagtaaagcttcagctcagcaaagggctggtcgagctggacgtaccagacctggaaaatgcttcagactttacacagagaaagcttataaaacagaaatgcaggataacacctatcctgagattttgcgttctaatttaggatcagttgtgttacaattgaagaaacttggtattgatgacttggtacattttgattttatggatccaccagctcctgaaactctgatgagagccctggaacttttgaattacctggctgctttaaatgatgatggagatctgactgaattgggatccatgatggcagagtttcctctagatccacagctcgcaaaaatggttattgcaagttgtgactacaactgttctaatgaggtcctatctattactgctatgttgtcagtcccacagtgttttgttcgccccacggaggccaagaaagccgcagatgaggccaagatgagatttgcccacatagatggagatcatctgacactgctgaacgtctaccatgcttttaaacaaaatcatgaatcggttcagtggtgttatgacaacttcattaactacaggtccctgatgtccgcagacaatgtacgccagcagctatctcgaattatggacagatttaatttgcctcgtcgaagtactgactttacaagcagggactattatattaatataagaaaagctttggttactgggtattttatgcaggtggcacatttagaacgaacagggcattacttaactgtgaaagataaccaggtggttcagttgcatccctctactgttcttgaccacaaacctgaatgggtgctttataatgagtttgttctaacaacaaagaattacatccggacatgtacagatatcaagccagaatggttggtgaaaattgcccctcaatattatgacatgagcaatttcccacagtgtgaagcaaagagacagttggaccgcatcattgccaaacttcaatccaaggaatattcacagtactgaattcagtgcttagaactgaagttattgagaggacagctttaaaagatgaatgaactcaaaagttcgagttgtgctcttcacgttggttcgataatggcctttatttgaaagctttttaatttttctttacagtaaatattccattctgatttcataaattaaacatttatgcctcccttttgtgttgacactgtagctcatactggaaaagtcgatcaatgttttgcagtttattgaaagtagttctatatataacaatgttataagcatttctttagaaatggttgaaaatgcttctaaaatgtgattatcgaccatggtatgcatgatcgttgtaattgttgacattccttttagaagttgtgaaatgttacaacttgtgcttatgtagacacaatcttctgtctcagtacagaggcactgacttcaataaagtctatttatactaattttggccaaaaaa

SEQ ID NO: 1422 - DNA, 2665 bp, Homo Sapiens
  NM_001360
aatcgctgacatcatccgggggcgggcgcccctgccctgcgggtgactccgacccctggctagagggtaggcggcgtggagcagcgcgcgcaagcgaggccaggggaaggtgggcgcaggtgaggggccgaggtgtgcgcaggactttagccggttgagaaggatcaagcaggcatttggagcacaggtgtctagaaacttttaaggggccggttcaagaaggaaaagttcccttctgctgtgaaactatttggcaagaggctggagggcccaatggctgcaaaatcgcaacccaacattcccaaagccaagagtctagatggcgtcaccaatgacagaaccgcatctcaagggcagtggggccgtgcctgggaggtggactggttttcactggcgagcgtcatcttcctactgctgttcgcccccttcatcgtctactacttcatcatggcttgtgaccagtacagctgcgccctgactggccctgtggtggacatcgtcaccggacatgctcggctctcggacatctgggccaagactccacctataacgaggaaagccgcccagctctataccttgtgggtcaccttccaggtgcttctgtacacgtctctccctgacttctgccataagtttctacccggctacgtaggaggcatccaggagggggccgtgactcctgcaggggttgtgaacaagtatcagatcaatggcctgcaagcctggctcctcacgcacctgctctggtttgcaaacgctcatctcctgtcctggttctcgcccaccatcatcttcgacaactggatcccactgctgtggtgcgccaacatccttggctatgccgtctccaccttcgccatggtcaagggctacttcttccccaccagcgccagagactgcaaattcacaggcaatttcttttacaactacatgatgggcatcgagtttaaccctcggatcgggaagtggtttgacttcaagctgttcttcaatgggcgccccgggatcgtcgcctggaccctcatcaacctgtccttcgcagcgaagcagcgggagctccacagccatgtgaccaatgccatggtcctggtcaacgtcctgcaggccatctacgtgattgacttcttctggaacgaaacctggtacctgaagaccattgacatctgccatgaccacttcgggtggtacctgggctggggcgactgtgtctggctgccttatctttacacgctgcagggtctgtacttggtgtaccaccccgtgcagctgtccaccccgcacgccgtgggcgtcctgctgctgggcctggtgggctactacatcttccgggtggccaaccaccagaaggacctgttccgccgcacggatgggcgctgcctcatctggggcaggaagcccaaggtcatcgagtgctcctacacatccgccgatgggcagaggcaccacagcaagctgctggtgtcgggcttctggggcgtggcccgccacttcaactacgtcggcgacctgatgggcagcctggcctactgcctggcctgtggcggcggccacctgctgccctacttctacatcatctacatggccatcctgctgacccaccgctgcctccgggacgagcaccgctgcgccagcaagtacggccgggactgggagcgctacaccgccgcagtgccttaccgcctgctgcctggaatcttctaagggcacgccctagggagaagccctgtggggctgtcaagagcgtgttctgccaggtccatgggggctggcatcccagctccaactcgaggagcctcagtttcctcatctgtaaactggagagagcccagcacttggcaggtgtccagtacctaatcacgctctgttccttgcttttgccttcaagggaattccgagtgtccagcactgccgtattgccagcacagacggattttctctaatcagtgtccctggggcaggaggatgacccagtcacctttactagtcctttggagacaatttacctgtattaggagcccaggccacgctacactctgcccacactggtgagcaggaggtcttcccacgccctgtcattaggctgcatttactcttgctaaataaaagtgggagtggggcgtgcgcgttatccatgtattgcctttcagctctagatccccctcccctgcctgctctgcagtcgtgggtggggcccgtgcgccgtttctccttggtagcgtgcacggtgttgaactgggacactggggagaaaggggctttcatgtcgtttccttcctgctcctgctgcacagctgccaggagtgctctgcctggagtctgcagacctcagagaggtcccagcaccggctgtggcctttcaggtgtaggcaggtgggctctgcttcccgattccctgtgagcgcccaccctctcgaaagaattttctgcttgccctatgactgtgcagactctggctcgagcaacccggggaacttcaccctcaggggcctcccacaccttctccagcgaggaggtctcagtcccagcctcgggagggcacctccttttctgtgctttcttccctgaggcattcttcctcatccctagggtgttgtgtagaactctttttaaactctatgctccgagtagagttcatctttatattaaacttcccctgttcaaataa

SEQ ID NO: 1423 - DNA, 2594 bp, Homo Sapiens
  NM_001363
agcaaatcgcattgcgcagacgaccagcgggcgcctcggattccgcccccgggatggccccgcctcctcccgccccgcggcaaggcacgcacagggcagtgcgcgggtgggtgggtcctagcagcgcggcctgacgggaccaaggcggcgggagtctgcggtcgttccctcggctgtggaccgggcggcacgcacgcggtgcagggtaacatggcggatgcggaagtaattattttgccaaagaaacataagaagaaaaaggagcggaagtcattgccagaagaagatgtagccgaaatacaacacgctgaagaatttcttatcaaacctgaatccaaagttgctaagttggacacgtctcagtggccccttttgctaaagaattttgataagctgaatgtaaggacaacacactatacacctcttgcatgtggttcaaatcctctgaagagagagattggggactatatcaggacaggtttcattaatcttgacaagccctctaacccctcttcccatgaggtggtagcctggattcgacggatacttcgggtggagaagacagggcacagtggtactctggatcccaaggtgactggttgtttaatcgtgtgcatagaacgagccactcgcttggtgaagtcacaacagagtgcaggcaaagagtatgtggggattgtccggctgcacaatgctattgaaggggggacccagctttctagggccctagaaactctgacaggtgccttattccagcgacccccacttattgctgcagtaaagaggcagctccgagtgaggaccatctacgagagcaaaatgattgaatacgatcctgaaagaagattaggaatcttttgggtgagttgtgaggctggcacctacattcggacattatgtgtgcaccttggtttgttattgggagttggtggtcagatgcaggagcttcggagggttcgttctggagtcatgagtgaaaaggaccacatggtgacaatgcatgatgtgcttgatgctcagtggctgtatgataaccacaaggatgagagttacctgcggcgagttgtttaccctttggaaaagctgttgacatctcataaacggctggttatgaaagacagtgcagtaaatgccatctgctatggggccaagattatgcttccaggtgttcttcgatatgaggacggcattgaggtcaatcaggagattgtggttatcaccaccaaaggagaagcaatctgcatggctattgcattaatgaccacagcggtcatctctacctgcgaccatggtatagtagccaagatcaagagagtgatcatggagagagacacttaccctcggaagtggggtttaggtccaaaggcaagtcagaagaagctgatgatcaagcagggccttctggacaagcatgggaagcccacagacagcacacctgccacctggaagcaggagtatgttgactacagtgagtctgccaaaaaagaggtggttgctgaagtggtaaaagccccgcaggtagttgccgaagcagcaaaaactgcgaagcggaagcgagagagtgagagtgaaagtgacgagactcctccagcagctcctcagttgatcaagaaggaaaagaagaagagtaagaaggacaagaaggccaaagctggtctggagagcggggccgagcctggagatggggacagtgataccaccaagaagaagaagaagaagaagaaagcaaaagaggtagaattggtttctgagtagtgaaggccacttgaagctggaggagaaactaaagccttattgagaaaacatgttatagatccttttgttgctgagagagtggaacataggtcctagacagggtgaagagttctggcacattttagctgctactttgagacctcggtgatgttacctggtgtggtcatcccatcttgtcctgttttaaggatatgggtggtgaaagatgaaagaggcagagtttatcccaatgacttctctgtttgagttgggaagcctcaccttcagacccagtaactgtccgcagctgtctgctagtggttgtcttaacatcgtagtcctagtttgcattttttaaatcccctctgtttaaaaggtttgtaaaacaaaaacaaaaaactaagtctgctcagtgaaatgctgtagaaccctaaataagtggtagaagagtgtcactgaattttgtctctgaattcagtataactgagttttgtccatgctggtgtctgggttataggcctgatgggcctggtagttttccatcttgttctggcctagaggtcagtcctttgcacttcctcaaagcttgtgtacagtgctcacctaaatccatctgactacttgttcctgtgccctcttgttttaggcctcgtttacttttaaaaaatgaaattgttcattgctgggagaagaatgttgtaatttttacttattaaagtcaacttgttaagttttttatgtattcctgttgggttttcttgttgatctcatgctagcagagcaaaaattgtaaaatattttgattaaaaatctagggacctttatgtcctatttgaaatgtgaaaaaaaaaaaaaaaaaa

SEQ ID NO: 1424 - DNA, 15588 bp, Homo Sapiens
  NM_001369
attccggaagagctgactccagcctgtccatgcacggctacaatgtttaggattgggaggagacagctctggaagcatagcgtcactcgagttttaacgcaaagactgaagggagagaaggaagccaagcgggctcttttggatgcgaggcataactacttatttgcaattgtggcttcctgtttggacctgaacaaaaccgaagtggaggatgccattcttgaagggaatcagattgaaagaattgatcaactttttgctgttggaggtctccgacacctcatgttttactatcaagatgtggaggaagcagaaacaggacaacttggctctctaggaggggtaaatcttgtttctggaaagattaaaaaacctaaggtgttcgtgaccgagggaaacgatgtggctcttactggggtatgtgtgttcttcatcaggactgacccttccaaagccatcacccctgacaacatccaccaggaggtgagttttaacatgttagatgcggcagatggaggcctgctcaacagtgtgagacgtttgctgtcggacatcttcattcctgctctcagagccacgagccatggctggggcgagctcgagggccttcaggacgcagctaacattcgccaggagttcttgagctccctggaaggctttgtgaacgtcctgtcgggtgcacaggagagtctgaaggagaaggtgaaccttcgaaagtgtgacatacttgaactgaaaaccctaaaggaacctacggactacttgactctagcaaataaccctgagactttgggaaaaatagaggattgcatgaaagtatggatcaaacagacagaacaggttcttgctgaaaacaatcagctgctgaaggaagcggatgacgttgggccacgagcggagctggagcactggaaaaaaagactctccaagtttaactaccttttggaacaattgaaaagcccggatgtgaaggctgtgctggcagtgcttgcggcggccaagtcgaaactgctgaagacttggcgggagatggatattcgaatcactgatgcaactaatgaagcaaaggacaatgtgaaatacttgtatacacttgaaaaatgttgtgaccctttgtacagcagtgatcccctatccatgatggatgctattcctacacttataaatgcaattaaaatgatctatagtatctctcattactataatacctctgagaagatcacatctctgtttgtaaaggtgacaaatcagattatatctgcatgtaaagcctatattaccaataatggaaccgcttccatctggaaccagccacaggatgttgttgaagaaaaaatactatctgcgattaaactgaaacaggaataccagctctgctttcacaagacaaaacaaaagcttaaacaaaatccaaatgcaaaacaatttgattttagcgagatgtatatttttggaaaattcgaaacttttcaccgacgccttgccaagataatagacatctttacaaccctcaagacgtattcagtcctgcaagattccacaattgaagggctggaagacatggccactaaataccagggcattgtggcaaccataaagaaaaaggaatacaatttcctagaccagcggaaaatggattttgaccaagattacgaagagttttgcaagcagactaatgaccttcataacgagttgcggaagttcatggatgttacatttgcaaagattcaaaacacaaatcaagctctaagaatgttgaagaaatttgaaagattgaatatacctaatcttggtattgatgacaaatatcaacttatccttgagaactatggggctgacattgatatgatttcaaagctgtatacaaagcagaaatacgatcctcctctggctcgaaaccagcctcccatcgctggaaagattttgtgggcccgccagctcttccataggattcagcagcccatgcagcttttccagcagcacccagctgtgctaagcacggcagaagccaaacctataattcgcagttacaacaggatggccaaggtcctcctggagtttgaggtcctcttccacagggcgtggcttcggcaaattgaagaaattcatgtaggtcttgaggcttcattattggtgaaggctccaggcacaggggaattgtttgtaaactttgaccctcagatattaatcttatttagagaaacagagtgcatggcccagatgggtctggaagtctctccactggcaacttccctcttccagaaacgagatagatacaaaaggaacttcagtaacatgaagatgatgctagctgaatatcagagagtgaagtcaaaaatacctgctgccattgagcaattgattgtccctcacttggccaaagtggatgaagctctccaacctggcttggctgcactgacctggacatcactgaatattgaggcttatttagaaaacacttttgcaaagatcaaggacctggagttgctgcttgacagggtcaatgatttgattgagttccgcattgatgccattctagaagaaatgagcagcacgcctctttgtcagcttccccaggaggagccactaacctgtgaagagtttctccaaatgacaaaggatctttgtgtaaatggtgcacaaatactacattttaaaagctcattagtggaggaggcagtcaatgagcttgtaaatatgttgctggatgtggaagttttatctgaagaagaaagtgaaaaaatatccaatgagaatagtgttaattacaaaaatgaaagttcagcaaaaagagaagaaggaaattttgacaccttgacatcatctattaatgccagggccaatgccctgcttttgacgacagtcacgaggaaaaagaaagaaactgagatgttaggggaagaagcccgcgagttactctctcatttcaaccatcagaacatggatgctcttctgaaagttacaaggaatacactagaggccattcgcaaacgtattcattcctctcacacaattaacttccgggacagtaacagtgcctctaacatgaagcagaacagtttgcccattttccgggcaagcgtcactctggccattcccaacatcgtcatggcccctgccctggaagatgtacagcagaccctgaacaaagccgtggagtgcatcatcagtgtccctaagggggtcagacagtggagcagtgaactgttgtccaagaaaaagatacaagaaagaaaaatggctgctttgcagagtaatgaagacagtgattctgatgttgaaatgggagaaaatgaacttcaagataccttggagatagcatctgtaaatttacccattcccgtgcaaaccaagaactattataagaatgtttctgaaaacaaagagattgtaaaattagtttctgtgcttagcacaattatcaactccaccaaaaaggaagttattacatccatggattgcttcaaacgctacaatcacatttggcaaaagggaaaagaagaagccattaagacatttattacacagagccccttgctttctgaatttgagtcccagattctctatttccaaaacctagagcaggaaattaatgctgagcctgaatatgtctgtgtgggttccattgctctgtacacagctgacttgaagttcgccctgactgctgagacaaaggcctggatggttgtcattggacgccactgtaacaaaaaataccggagtgagatggaaaacatttttatgcttattgaagaattcaataagaaactaaatcgtccaattaaggacctagatgatattcggattgcaatggcagcgctgaaagaaataagggaggagcaaatctccattgactttcaagtaggacctattgaggaatcttatgccctgcttaacagatatggacttctgatagcaagggaagagatagacaaagttgatacactgcactatgcttgggagaagctgctggcacgtgctggcgaagtccagaataaattagtctcactgcagcccagtttcaagaaagagcttattagtgctgtggaggtattcctccaagattgtcaccagttttatctggactatgatttgaatggtccaatggctagcggcttgaagccccaggaagccagtgacaggcttatcatgtttcagaatcaatttgataatatctatcggaaatacatcacatatactggaggagaggagctttttggcctgccagctacacagtatcctcagcttcttgaaataaagaagcaactaaatcttctacagaaaatatatactctgtacaacagtgtcatagaaactgtaaatagctattatgatattctttggtcagaggtgaatattgaaaaaattaacaatgaactcttagaattccagaacagatgtcgaaagcttccccgggccttgaaggactggcaggcttttttggacctgaagaagatcattgatgatttcagcgagtgttgcccgctgctggaatacatggccagtaaagccatgatggagcggcactgggaaaggataaccaccctcaccgggcacagtctggatgtggggaatgaaagctttaagttaagaaatatcatggaggcacctcttctgaaatataaagaggaaatagaggacatctgtatcagtgcggtgaaagagagagacattgagcaaaagctgaagcaagtgattaatgaatgggacaataaaacattcaccttcggcagctttaaaacccgtggagagctcctcttgagaggagacagtacctcggaaatcatcgccaacatggaggacagcttgatgttgctgggatccctactgagcaacaggtacaatatgccattcaaagcccagattcaaaaatgggtgcagtacctttccaactcaacagacatcatcgagagctggatgacggtgcaaaacctgtggatttatttagaagctgtctttgtgggaggagacattgccaagcagctgcccaaggaagccaagcggttttctaacatagataaatcttgggtgaagatcatgactcgggcacatgaagtgcccagtgtagtccagtgctgtgttggagatgagaccctggggcagctgttaccacacttgctggaccagttggaaatatgccagaaatcccttactgggtacttggagaaaaaacgactgtgctttcctcggtttttcttcgtctcagatcctgcccttctagagattctggggcaggcgtcggactcccacactatacaggcccatttgctgaatgtgtttgacaacattaaatctgtcaagttccacgaaaagatctatgatcgaattctgtcaatttcctctcaagagggtgagacgattgaattggataaacctgtcatggcagagggcaatgtggaagtttggcttaattctcttttggaagaatctcagtcctcattgcatcttgtgattcgccaggcagccgcaaatattcaagaaacaggtttccaactaactgaatttctttcatccttccctgctcaggttggattattaggaattcagatgatatggacacgggattcagaagaagcccttagaaatgccaagtttgataaaaaaatcatgcagaaaactaatcaggctttcctggagctactcaatacattgatagacgtcaccacgagggatctgagttccacggaacgagtgaaatacgagactctgattactattcatgtgcaccaaagggatatctttgatgacctgtgtcatatgcatatcaagagtcccatggactttgagtggctgaaacagtgcagattttactttaacgaagattctgacaagatgatgattcacatcacagatgtggcgttcatataccagaatgaatttttaggctgcactgacaggcttgtaataactccacttacagacagatgttacatcacgctggctcaagctctgggaatgagcatggggggagcccctgctggacctgcaggcacaggcaaaacagaaaccactaaagacatgggacgatgcctcgggaaatacgtcgtggttttcaattgttcagaccagatggatttccgaggacttggacggatttttaagggactggcacagtctggatcctggggttgttttgatgaatttaaccgtattgatctaccagttctctcggttgcagcccagcaaatttccattattctgacatgtaaaaaggagcacaaaaagtcttttatctttactgatggagataatgtgactatgaaccctgaatttgggcttttcttaaccatgaatcctggctatgccggacggcaggaactccctgaaaacttgaagattaatttccgctcagtggccatgatggtgcctgaccgtcagattatcataagggtgaagttggctagttgtggcttcattgacaacgttgttttggccaggaagtttttcacgctctacaaactgtgtgaggagcagctttctaagcaggttcattatgactttggcctgcgtaacattctgtcagttcttcggaccttgggagcagcaaaaagagccaatccaatggatacggagtccacgattgtcatgcgtgtactacgggacatgaatctttctaaactgattgatgaggatgaacccttgtttttgagtttgattgaagatctctttccaaatattcttctggacaaggcaggttaccctgaactggaagcagcaattagtagacaggttgaagaagctggtttaatcaaccatcctccttggaaactgaaggtcatccagctattcgaaacgcagagagtgcgacatgggatgatgactctggggcccagtggggctgggaagaccacctgcatccacaccttgatgagagccatgacagattgtggaaaaccacatcgggaaatgaggatgaatcccaaagcgattactgccccacagatgtttggtcggctggacgttgccacaaatgactggactgatgggatattttctacgctttggaggaaaacattaagagcaaagaaaggggaacatatctggataattcttgatggtccagtagatgccatctggattgaaaatctgaattctgttttggatgataacaaaactctaacccttgccaatggtgatcggattcccatggctccaaactgcaagatcattttcgagcctcataacattgacaatgcttctcctgccaccgtctcaagaaatggaatggttttcatgagctcttctatccttgattggagtcctattcttgagggttttcttaagaaacgctcacctcaagaagcagaaattcttcgtcagctgtacaccgagtctttcccagacttgtatcgcttctgtatccagaacttagaatacaagatggaggtgctggaggcctttgtcatcacacagagcattaacatgcttcaaggcctgattcctctgaaggagcaaggcggggaggtgagccaggctcacctggggcggctgttcgtgttcgcgctgctgtggagcgcgggggcggcgctggagctggacggacggcgccgcctggagctctggctgcgctctcggcccacagggacgctggagctgccgccgccagcggggcccggggacaccgccttcgactactatgtggcgcccgatggtacatggacgcactggaacacgcgtacccaggaatacctgtatccgtctgataccaccccagagtatggttctattctggtgccaaatgttgacaatgtgaggactgactttctaattcaaaccattgctaaacagggcaaggctgtgctattaattggtgaacaaggaacagccaaaacagtaataattaaaggatttatgtcaaaatatgatcctgaatgtcacatgatcaagagtctgaatttttcttctgcaaccaccccactgatgttccagaggacgatagagagctatgtggataaacgaatgggtacaacatatggccctcctgcgggaaagaagatgactgtttttattgatgatgtgaatatgccaataatcaatgagtggggagatcaggttacgaatgagatagtgcgacagctgatggaacaaaatggattctataatctagagaagcctggggagttcaccagcatcgtggacatccagtttttggcagccatgatccatcctggtggtggacgcaatgacataccccaaagactcaagaggcagttctctatatttaattgcacgttgccctctgaagcttctgtggacaagatctttggtgtgattggggtaggccactactgtactcagaggggtttctcagaagaagtgagagattctgtgacaaaattggtgcctctgacacgccgactatggcagatgaccaagattaaaatgcttcctacccctgcaaaattccattatgtgtttaacctacgagatctttctcgggtctggcagggaatgctgaacactacttcagaggtcatcaaggaaccaaatgatctgttaaagctgtggaagcatgagtgtaaacgtgttatagctgaccgtttcacagtgtccagtgatgtgacctggtttgataaggctttagtaagtttggtagaggaggagtttggtgaagagaaaaaactcttggtggattgtggaattgacacatattttgtggatttcttgagagatgcacctgaagctgcaggtgaaacatctgaagaggctgatgctgaaacacctaaaatttatgagccaattgaatcttttagtcacctaaaagagcgtctgaatatgttcctgcagctctataatgagagcatccgtggcgccggcatggacatggtgttctttgcagatgccatggttcacttagtcaagatctctcgtgtcattcgtactcctcagggaaatgccctcctggtcggggtgggcggatcaggaaagcagagcctgacgaggttggcttcattcattgctggctacgtttccttccagatcactctgacgagatcctacaacacatcaaatctgatggaagatctgaaggttttgtatcgaacagctggtcagcaaggcaaaggaatcacttttattttcacagacaatgagattaaagatgagtcatttttggaatatatgaacaatgttttatcatcaggtgaggtctctaacctatttgctcgagatgaaattgatgaaattaatagcgacctggcatcagtcatgaaaaaagaattccccaggtgccttcctaccaatgagaacctgcacgactacttcatgagtcgggtccgacagaaccttcatattgtgctctgcttctcgccagtgggggagaaatttcgaaacagagctttgaagttccctgccctaatttcaggatgcacaattgactggttcagccgatggcccaaagatgctttagttgctgtgtctgaacacttcctcacttcctatgatattgactgcagtttggaaatcaagaaggaggtggtccaatgcatgggctccttccaggatggggtggctgagaagtgtgttgattattttcagagattccgacgttctacccacgtgacgcccaaatcatacctctcctttattcagggctataagttcatatatggagaaaagcatgtggaggtgcggaccctggccaacagaatgaatactggattggaaaagctcaaagaagcttcagagtctgttgcagccttgagtaaagaactggaagcgaaagaaaaggagctacaagtggccaacgataaagccgacatggtcttaaaagaagtgacaatgaaagcacaggctgctgaaaaggtcaaggctgaggtacagaaggtgaaggacagggcccaggccattgtggacagcatctctaaagacaaagccattgctgaagaaaaactggaagcagcaaaaccagctttagaagaggcagaagctgcattgcagaccatcaggccttcggacatcgccactgttcgcacgttgggccgcccccctcacctcatcatgcggatcatggattgcgtactgctgctgtttcaaaggaaagtcagtgctgtgaaaattgacctggaaaaaagctgtaccatgccctcctggcaggaatccttaaaattgatgactgcagggaactttttacagaacttacagcaattcccaaaagacacaatcaatgaagaggtgatagaatttttgagtccttactttgaaatgcctgactataacatcgaaactgctaaacgcgtatgtggaaatgtagctggtctttgttcctggacgaaagctatggcttccttcttttctataaacaaagaagtactgcctctgaaggccaacttggtggtgcaagagaatcgccatctcctggccatgcaggatctgcagaaagcccaggccgagttggatgacaagcaggcggaacttgacgtggtgcaggctgagtatgaacaggccatgactgaaaagcagaccttgcttgaagatgcagagcgatgcagacacaagatgcagacagcttccacgctcatcagtggcttggcaggtgaaaaagaaagatggacagagcaaagccaagagtttgctgcacaaactaaaagacttgtaggggatgtactgttggctacagcttttctatcttattctggtccatttaaccaagagtttcgtgatcttctgttaaatgactggcggaaggaaatgaaagcccggaaaattccatttggaaagaacctaaatctcagtgagatgttgattgatgctcctactattagtgaatggaacctccaaggtctgccaaatgatgacttgtccattcaaaatggaattattgtcacgaaggcatctcgttaccctttgttaattgatccacagactcaaggcaagatctggattaaaaataaagaaagccgaaatgaactccagatcacgtctttaaatcacaagtacttcagaaaccacctggaagacagcctttctcttggaaggcctttgcttattgaagatgttggagaggaactagatccagcactagataatgttttggaaagaaacttcattaaaactgggtctacctttaaggtgaaagttggtgacaaggaagtagatgtgttggatggctttagactctacattaccaccaaattgcctaacccagcctacacccctgagataagtgcccgtacctccatcattgacttcactgtcaccatgaaaggtctagaagatcagttactggggagggtcattctcacagagaagcaggaattggagaaagaaagaactcatctgatggaagatgtaactgcaaacaaaagaaggatgaaggaactagaagataacttgctttaccgcctgacaagtacccaggggtccctggtagaagatgaaagtctcattgtcgtgctgagtaacacaaaaaggacagccgaggaggtgacacagaagctagaaatttctgctgagacagaagttcaaattaactcagcccgggaggaatacagacctgtggctacgcggggcagcatcctctacttcctcattactgagatgcgcttggttaatgagatgtatcagacttcgcttcgccagtttctgggcttatttgacctttccttagccaggtctgtcaagagcccgattacaagcaagaggattgctaatatcatcgagcacatgacctacgaggtttataagtatgctgcccgagggctgtacgaggagcacaaattcctgttcaccttgttgcttaccctaaagattgacatccagaggaaccgagtcaagcatgaagagtttctcactcttattaaaggaggtgcctcattagaccttaaagcttgtcctccaaaaccatcaaaatggatcctggacataacatggctgaatttggtggaacttagcaaactcagacagttttcagatgtccttgaccagatatcgagaaatgagaaaatgtggaaaatttggtttgataaggaaaacccggaggaggaacctcttccaaatgcctatgataaatctcttgactgcttcagacgtcttctccttattagatcctggtgtcctgacagaaccatcgcccaggcccgcaagtacatcgtggactccatgggagaaaaatatgccgaaggtgttattttagacttggagaagacgtgggaggaatctgatccacggacgccactcatctgtctcctgtctatgggctcagaccccacagattccatcattgccttggggaagagattaaaaatagaaacccgttatgtgtccatgggccagggccaggaagtccatgctcggaagctcttgcagcagaccatggcgaacggaggatgggcacttctgcagaactgccatctgggacttgatttcatggatgagctgatggacataatcatagaaactgagcttgtacatgatgcgttccgcctctggatgaccaccgaggctcataagcagtttcccattacactccttcagatgtccattaaatttgccaacgatcctccacaaggactccgggcaggactgaaaagaacatatagtggtgtcagccaagacctgctggacgtgagctctgggtcccagtggaagcccatgctgtacgcagtggctttcctgcactccactgtccaggagaggcgcaagttcggtgccctggggtggaatatcccctacgaatttaaccaagcggactttaatgccactgtgcagttcatccaaaaccacttggatgacatggatgtcaaaaagggtgtctcctggaccaccatccgctacatgataggagagattcaatatggaggcagagtcactgacgactatgataagagattgttgaacacatttgctaaggtttggttcagtgaaaatatgtttggaccagatttcagtttttaccaaggatacaatattccaaaatgcagcacagtggataactatcttcagtatatccagagtttgcctgcctatgacagccctgaggtgtttgggctgcaccccaatgctgacatcacctaccagagcaagctggccaaggacgtgctggacaccatcctaggcatccaacccaaggacacctctggtggaggggatgagacccgggaggcggtggtggcccggctggctgatgatatgctggagaagctgcccccagactatgtcccctttgaagtaaaagagaggctgcagaagatggggccattccagcctatgaacattttcctcaggcaggaaatagacagaatgcaaagggtactcagccttgtccgcagcaccctcactgagctgaaacttgctattgatggcaccatcatcatgagcgaaaatctgcgagatgcattggattgcatgtttgatgctagaatccctgcttggtggaaaaaagcttcttggatttctagtacactgggtttctggtttactgaacttatagaaagaaacagccagtttacctcgtgggttttcaatggccgacctcactgcttttggatgacgggtttttttaacccccagggatttttaactgcaatgcgacaggaaataactcgggccaacaaaggctgggctctggacaatatggtgctttgcaatgaagtcaccaaatggatgaaggacgacatttctgcccctcccacagagggtgtctatgtctatggcttatatcttgaaggtgctggctgggacaagaggaacatgaaactcattgaatcaaagccaaaagtgctctttgagttgatgcctgtcataaggatttatgcagaaaacaatactttacgagatcctcggttttactcctgtcccatctataagaagccagttcgaacggacttgaactacattgccgctgtggatctcaggacagcccagacccctgaacactgggtgctccgtggggttgcccttctgtgtgatgtcaagtaacatgtggggagtgtccccacccaatgctttggaaaatgcaagatctaaattattgtaacctttatttctgtatgactgctggacagtgtatgttaggtcgtttatgcaattaatgagctgcataggttttccccactccttaattggatgcttatattttacttgtttcatcattagtgaccaatgtctgagtttgttgaaaatgttatttagtgatataaaagtaaatttacagcatcctaatgaagtgtggccctcaaatccacagtagtatattttcttcttacttcgctccgaagactgactagggtaagcagacagtatttctctgggaggaattattcttctgttaacgtggcctggtaacagccaagttcttgaaggtaacagggcaagtctgtgctgattttgcttctattgcctttcgtatttaggtcaagttaagagacttattttcagggtttcaagcagccaattaaaaataccttttaaaaaatagaaggaaatagaagaatggattaagaatgtaaatagaaaatttatgtaaacatagagaataaacgtagaacaatgcttaagcctacttataattaataatgaaatactaattgataattcttataataaaaattaaagctaaaagtaaatgatagcatgctctcagtaaaactgatccactcacaaattgctggagcaatgtaaatcaacccaacctttttgtaaaatgattaaatacagaaagagccataaaaatattcacacccttggatctttgttttctctacatcaaggaaacaatttaaaagactgaaaacagtctatataaaattgcatttaataacagaaaaaaatggaaaaatcataaatattcaatagtcaggctatggttaaggaaattaagagatatttggcaaccataaaaaacaattttgaagattccataatatgaaatggtagacccagactgttaagtgaaagatttagtttacaaaatattgagcacactgtgattataacagcaaatatatttgcatgtggacaaagattagatggcaagatagaaaaataagaacagatgtgatagcaagaattatagttggcttgaaaaaatgtgatgatcaggagaaaaaataaaaaaagggtagaaatattagacggtgcgtagggactttctatggacttttattaattaggaaacattatcaaaggaacttttcacgtatttttctttaaattctggttagatgttattaataattcttcatctaacctactgactagaaaatatagtcagtactaaattagaattgtggtttataaacttttggttagctctggatctgtataactgcatttttttggataaacagtttttggtaggtggataccgggagacaagtgtgggtccctctcactgggcttcattctgtggaccaggatcattatttcatgctcatgatcatgagagttaggactgagtggctcctgtgactcccaccatcttagatgatactgttttcttgtgagttctttcttttggtgtggattagtatatcagttgatttgtgtgaattgtggtgaaacaatcatttcattttgaaaagcaagtaatgaaaatgtcaacatcataggaattaataaaatgtttttactaaaaaaaaaaaaaaaaaa

SEQ ID NO: 1425 - DNA, 14361 bp, Homo Sapiens
  NM_001376
ctggcagtggctgcctttagggcggagccggctcccgctctcctcagtctgcggtgggctagcggacggtccggcttccggcggccgtttctgtctcttgctggctgtctcgctgagtcgcggccgccttctcatcgctcctggaaggtcccgagcgcgacaccatgtcggagcccgggggcggcggcggcgaggacggctcggccggattggaagtgtcggccgtgcagaatgtggcggacgtgtcggtgctgcagaagcacctgcgcaagctggtgccgctgctgctggaggacggcggcgaggcgccggccgcgctggaggcggcgctggaggagaagagcgccctggagcagatgcgcaagttcctttcggacccgcaggtccacacggtgctggtggagcgctccacgctcaaagaggacgtcggtgatgaaggagaagaagaaaaagaattcatttcctataacatcaacatagacattcattatggggttaaatccaatagcttggcattcattaaacgtactcccgtgattgatgcagataaacccgtgtcttctcagctccgggtccttacactcagtgaagactcgccctacgaaactttgcattctttcattagcaatgcagtggctcctttttttaagtcctacattagagagtctggcaaggcagacagggatggtgataaaatggctccttcagttgaaaagaagattgcagaactcgaaatgggactccttcacttgcagcaaaatattgaaattccggagatcagcctgccgattcatccaatgatcacaaatgttgcaaaacagtgttatgagcgtggagaaaagccaaaagttacagactttggtgataaggttgaagacccaacatttcttaatcagttacaatctggagttaaccgctggatccgagaaattcaaaaagtgaccaaactggatcgagatcctgcatcaggaactgccttacaggaaattagtttttggctaaacttggaacgtgcgttataccgcatccaggagaaacgggagagcccggaagttctcctgactctggatatcttgaaacatggcaagcgcttccatgccaccgtcagttttgacactgacacaggtctaaaacaggctttggaaactgtgaatgactacaatcctctgatgaaagatttccctctgaatgatttgctgtctgccacggagctggacaaaataagacaggcgcttgttgccattttcacacatttgagaaagatccgaaacacaaaatatcctattcagagggcactgcgtttggtggaggcaatttcaagagacttgagttctcaattactcaaagtattgggcactaggaaattgatgcatgttgcttatgaagaatttgaaaaagttatggtagcatgctttgaagtttttcagacttgggatgatgagtatgagaaacttcaggtattgttgagagacatcgtcaaaagaaaaagggaagaaaatctgaagatggtgtggcgtatcaaccctgcccacaggaagctgcaggcccgccttgaccagatgagaaaatttagacgccagcatgaacagctaagagctgttatcgtcagggtcctgaggccacaggtcacggcagttgcacaacagaatcaaggagaggtccctgaaccccaagatatgaaagtggctgaggttctctttgatgctgcagatgcaaatgccattgaggaagtaaaccttgcttatgagaacgtcaaggaagtggatggactggatgtttccaaagagggcacggaagcctgggaggctgctatgaagaggtacgatgagaggatcgacagagtggagacccggatcaccgctcgccttcgggatcagcttggcacagccaagaatgccaacgagatgtttaggattttctccaggtttaatgcactgtttgtcaggcctcacatccgtggggccattcgcgaataccagacccagctgatccagcgcgtgaaagatgacattgagtctcttcacgacaagttcaaggtccagtacccacagagtcaggcttgtaagatgagtcacgttcgtgacttgccccctgtgtcagggtctatcatctgggctaaacagatcgacaggcagctgacggcctacatgaagcgggtggaagatgtccttggcaagggctgggagaatcacgtggaggggcagaagctgaagcaggatggagacagcttccgcatgaagctcaacacgcaggagatctttgatgactgggcaaggaaggtgcagcagcgcaacctcggtgtctcggggcgcattttcaccatcgaaagtactcgggttcggggccgaactggaaatgtgcttaagctgaaagttaactttcttcctgagattatcacactatccaaagaagtccggaacctcaaatggcttggtttccgcgtcccactggcgattgtgaacaaagcccatcaagcaaaccagctttacccgtttgccatctcactgatcgagagcgttcgtacctatgaacggacctgcgagaaggtggaggagcggaacaccatttcccttttggtggctggcttgaaaaaggaagtgcaggccctgatcgcagaaggcattgcgttggtgtgggagtcctacaaacttgacccatatgtacagcgcttagcagagactgtcttcaacttccaagaaaaggtggatgatctgctgatcattgaagaaaaaatagacctagaagtccgttccttggaaacttgtatgtatgaccataagacattctcggaaatcttgaacagagtccagaaagcagtggatgacttaaatctgcactcctattccaatttgcccatctgggtcaacaagcttgacatggagattgaaagaatattgggcgtccgtctgcaagctggcctgagagcttggacgcaggttcttcttggacaagctgaagataaagcagaagttgacatggacacagatgctccacaagttagtcacaagcctggtggagagccaaagatcaaaaatgtcgttcatgagctaagaataaccaatcaggtaatctacttgaatccaccaattgaagagtgcagatacaagctgtatcaggaaatgtttgcctggaagatggttgtactgtctctccccaggatccagagtcagaggtaccaggtgggtgtacattacgaattgactgaggaagagaaattctatcggaatgctttaacacggatgcctgatggccctgttgccctggaagagtcgtattctgctgtcatgggcattgtatctgaagttgaacagtatgtcaaggtttggcttcagtatcagtgtttatgggatatgcaagctgaaaacatctataacagacttggagaagatctcaacaaatggcaggctctcctggtccaaataaggaaggccagaggaacctttgacaatgcagaaaccaagaaagagtttggaccagtagttatagattatggcaaggtacaatctaaggtgaacttgaaatatgactcttggcataaggaggttcttagcaaatttgggcagatgctaggatcaaacatgacggaattccattcccagatctcaaagtcccgccaagagttggagcagcactcagtagacacggccagcacctccgatgcagtgaccttcatcacctatgtgcagtctttgaaacggaagatcaagcagtttgagaagcaagttgagctctaccgcaatggccagcgcttactggaaaagcaaaggttccagttcccaccttcctggctttatattgacaacatcgagggagagtggggagccttcaatgacatcatgcggcgaaaggactctgccattcagcagcaggtggcaaacctgcaaatgaagattgtccaggaggatcgggccgtggaaagccgcaccaccgacctgctgactgactgggagaagaccaagcctgtcacgggcaaccttcgcccagaagaggcacttcaggctctcaccatatatgaggggaagtttggtaggctgaaggacgacagagagaagtgtgcaaaggccaaggaggcgctggaattgacagatactgggcttctcagtggcagtgaagagcgcgtgcaggtggccttagaagaattacaggacctcaaaggcgtttggtcagaactttctaaggtttgggagcaaatcgatcagatgaaggagcaaccctgggtttcagtacagcctcgaaagcttcgacaaaatttggatgccctcctgaaccagctgaaaagcttccctgcccggttgcgacagtatgcgtcctatgagtttgttcagaggcttctgaaaggttacatgaagataaatatgctggtgattgaactgaaatccgaagcacttaaagaccgccattggaaacagctcatgaaaaggcttcacgttaattgggttgtttctgagctaacccttggccaaatctgggatgttgacttgcagaaaaatgaagcgattgtcaaggatgtactgcttgtggcacaaggggagatggctttggaagaatttttgaagcagataagagaagtgtggaatacttatgaactagacttggttaattatcagaacaagtgccgcttgatccgtggctgggatgacctcttcaacaaggtcaaagaacacatcaacagcgtctcggccatgaagctctctccgtattacaaggtttttgaagaggatgctctcagctgggaagataagctgaacaggatcatggctctctttgatgtgtggattgatgtgcagaggcggtgggtctacctggaaggtatcttcacaggcagtgcagatatcaagcacctgctgccagtggaaacccagcggtttcagagcatcagcactgagtttttggctctaatgaaaaaagtgtccaagtctccccttgttatggatgttctgaacatccagggagtacagaggtctctggaaagattggcagacctgctaggaaagatccagaaagcattgggagaatatctggaaagagagcggtcatctttccccaggttctattttgtgggtgatgaagatttgcttgaaatcattggaaacagcaagaatgtcgctaaattacagaaacacttcaagaagatgtttgctggagtttcgagcatcatcctgaacgaggataactctgttgttttgggtatttcatctcgggaaggagaggaggttatgtttaaaactcctgtgtcaattactgaacatcccaaaatcaatgagtggctcacattggtagaaaaggagatgagagtcaccctggccaaactgcttgctgagtctgttacggaagttgagatttttggtaaagcaacttcaattgacccaaatacctacatcacttggattgataaataccaggcccagcttgtggttttgtcagcccagatagcctggtctgagaacgtggagaccgcactgagcagcatgggcggaggtggagatgccgcgcccttgcactctgtgctgagcaatgtggaggtcaccctcaatgtgttagcagactctgtcctcatggagcagcccccactccgaaggcggaagctagaacacttgattacagagttggttcaccagagagatgttacaaggtccttgatcaaaagcaagattgacaacgccaaatcttttgaatggctcagccagatgcgattttactttgaccctaagcaaactgatgtgttacagcagttgtcaattcaaatggcaaatgccaaatttaactatggctttgagtacctgggtgttcaggacaaactggtccagacccccctcactgaccgctgctatttgacaatgacacaagccttggaggccaggctggggggttccccatttggacctgctggaactgggaaaacagagtctgtcaaagctcttggccatcagcttggacggtttgttttagttttcaactgtgatgaaacctttgatttccaggcaatgggccggatctttgtgggcctttgccaggtgggtgcctggggctgctttgacgagttcaaccgcctggaggagcggatgctctcggctgtgtcccagcaggtgcagtgcatacaggaagcactgcgtgaacattccaaccccaactacgacaagacctctgcccccattacttgtgagctgctgaacaaacaagtcaaggtgagcccggacatggccatcttcatcaccatgaaccctggctacgcgggccggtctaaccttcctgacaacttgaagaagctgttccggagcttggccatgaccaagcccgaccggcagttaatcgcccaggtcatgctgtactcacagggtttccgcactgctgaagtgcttgccaacaaaatcgtcccgttttttaaactatgcgatgagcagctctcttcccaaagccattatgacttcggtcttcgggctttgaagagtgtgctggtgagtgcaggcaatgtgaagagagagagaatccagaagataaagagggagaaagaggaacgaggggaagcagttgatgaaggagaaattgctgaaaatctccctgaacaagagattctgatacagagcgtctgtgagacgatggtgccaaagctggtggcagaggacatcccgctgctcttcagcctcctgtcggacgtgttccctggagtccagtatcacaggggtgagatgactgcccttcgagaggagctgaagaaagtgtgtcaggagatgtatttgacatatggagatggagaagaagttggtggaatgtgggttgaaaaggttctccagctctatcagatcacccagatcaatcatggcctgatgatggtggggccctcgggaagtgggaagagcatggcctggcgtgtcctgctgaaggcattggagagactcgagggtgtggaaggtgtggcccatatcatcgaccccaaggccatcagcaaagaccacctctacggaaccctggaccccaacaccagggaatggacagatgggctcttcacacacgtgctgagaaagatcatcgacagcgtgagaggcgagctgcagaagcgccagtggatcgtcttcgatggcgatgtggatccagagtgggttgagaacttgaactcagtgctggatgacaataagctcctaactttgcccaatggagagcgcctcagtcttccacccaatgtgagaataatgtttgaggtacaggacttgaaatacgcgaccttggccacagtgtcgcgctgcggcatggtctggttcagtgaggatgtgctgagcaccgacatgatcttcaacaacttcctggccaggctgcgcagcatcccgctggatgaaggggaggatgaggcacagcggcggcgtaagggcaaagaggatgagggggaggaggccgcttcccccatgctgcagatccaaagagatgcagctacgatcatgcaaccgtacttcacgtccaacggcctggtcaccaaggcgctagagcacgccttccagctggagcacatcatggacctaacacgcctgcgctgcctgggctcgctcttctccatgctgcaccaggcctgccgcaacgtggcgcagtataacgccaaccatcccgacttccccatgcagatcgagcagctggagcgctacattcagcgatatctggtttatgccatactctggtccctgtctggagacagccggctaaaaatgagagcagagctgggtgaatacatcagaagaatcacgaccgtgcctctgcccactgcgcccaacatacccattatcgattatgaggtgtccatcagcggagaatggtctccgtggcaggccaaggtgcctcagattgaagtggagacgcacaaggtggcagcccctgatgtcgtcgtgccaacgctggacacagtccgccacgaagccctcttgtacacttggctggccgaacacaagcccctggtcttgtgtggccctcctgggtctggcaagaccatgacactcttcagcgccctccgggccttgcctgacatggaggtggtgggtctcaacttctccagtgctactactccagagctgcttctgaagacttttgatcactactgcgagtacaggcgcacacctaatggggtggttttggctcctgttcaacttggaaagtggctggtgttgttctgtgatgaaatcaacttgccagatatggataaatatgggacccagagggtcatatccttcatcagacagatggtggagcacggaggcttttaccgtacctcagatcaaacatgggtgaagctggagagaatccagtttgttggggcttgtaatccccccacagaccctggaagaaagcccctctcacacaggttcctgcgccacgtgcctgtcgtgtatgtggattacccgggccccgcctccctcacacagatctacggcaccttcaaccgcgccatgctgaggctcattccatccctgcggacgtatgcagagccgctcactgctgccatggtggagttctacaccatgtctcaggagagattcacccaggatacacaacctcactatatctattcaccccgtgaaatgactaggtgggtgagaggcatctttgaagcgctgagacctctggagaccctgcctgttgaaggcctcattcggatttgggcacatgaagctctgcgtctcttccaagatagactcgtagaggatgaggagaggcgttggactgatgagaacatcgacacggttgctctgaagcacttccctaacatcgacagagagaaggcaatgagccgacccatcttgtacagcaactggctgtcaaaggattacatcccagtagaccaagaagagttaagagattatgtcaaagctaggctgaaggtcttttatgaagaagaacttgatgttccgctggtgctgtttaatgaagtcctagaccacgtgctgaggattgacagaatattccgtcaacctcaaggccacttgcttctgattggtgttagtggagcaggaaaaactaccctgtctcgtttcgtcgcctggatgaacggtttgagtgtgtaccagattaaggtccataggaagtacacaggggaagactttgatgaagatctacggacagtgttgagacgttctggctgtaaaaatgaaaagatagcatttataatggatgaatctaatgtgttagattctggattcctggagcgaatgaatacccttctggccaatggagaggtgcctggtctctttgaaggagacgagtatgccaccttgatgacgcagtgcaaagagggggcacagaaggaaggcctgatgctggactcgcacgaggagctctacaagtggttcactagccaggttatccgcaacctccacgtcgtgttcaccatgaacccgtcctcggagggactcaaggaccgggcagctacatcaccagcacttttcaacaggtgtgtgttgaattggtttggagactggtccaccgaagcactgtatcaggttggcaaagaattcacaagtaagatggatctggagaagccaaattacatcgtgcctgattacatgccagttgtgtatgataagctgccgcagccaccatcccatcgggaagccattgtgaacagctgtgtgtttgttcatcagactcttcaccaggcgaatgctcggctagcaaagcgaggcggcagaacgatggccatcacccctcgccactacctggacttcatcaatcactatgccaacctgttccacgagaagcggagcgagctggaggagcagcagatgcacttgaacgtggggctcaggaagatcaaagagacagtcgaccaggtagaagaactgcgtcgtgacttgaggataaagagccaagagctggaggtgaagaatgcagcagccaatgacaagctgaaaaagatggtgaaagaccagcaggaggctgaaaagaagaaggttatgagccaagaaatccaggaacagctgcataagcagcaggaggtaattgcagacaaacagatgagtgtcaaagaagatcttgataaggtggaacctgccgtcattgaggcccagaatgctgtgaagtcgatcaagaagcagcacctggtggaggtgaggtccatggccaaccctcctgctgctgtgaagctggcgctggagtccatctgcctgctgctgggggaaagcaccacagactggaagcagatccgctccatcatcatgcgggagaacttcatccccaccatcgtcaacttctctgcagaggagatcagtgacgccataagggagaagatgaagaaaaattacatgtccaatccaagttacaattatgaaattgtgaatcgggcttccctggcttgcggccctatggtgaaatgggcaattgcacagcttaactatgcagacatgttaaagagagtggagcccctacgcaatgagctgcagaagctggaagatgacgccaaggacaaccagcagaaggccaacgaggtggagcagatgatccgagacctggaagccagcatcgcccgctacaaggaggaatacgccgtcctgatctcagaggcccaggccatcaaggcagacctggcagctgtcgaggcaaaagtaaaccggagcactgctcttctgaagagcttgtctgctgaacgtgaacgatgggaaaaaacaagtgaaactttcaaaaaccagatgtccaccattgctggggactgtctcttgtcagctgcgttcattgcctacgcgggttactttgaccagcagatgcgtcagaacttgttcactacctggtcccatcacctacagcaagccaacatccagttccgtacagatattgccaggacggaatacctttccaatgctgatgagcgtcttcgctggcaggccagctccttgcctgctgatgacctttgcacagaaaatgccatcatgctgaaacgattcaataggtatccgctgatcattgacccctctggacaggccacagaattcattatgaatgaatataaggatcgtaagatcacacggaccagcttcctggatgacgccttcagaaagaacttagagagtgcactgagattcggtaacccccttctggtccaggatgtggaaagctacgatccagttttgaacccggtgctgaaccgtgaagtgcggcgaacaggggggagagtgctgatcactctcggggaccaggacatagacctgtcgccatcgtttgtcatcttcctgtccacccgggatccaactgtcgagttcccaccagatctctgttcccgggttacttttgtaaacttcacagttacccgtagcagtttacaaagccagtgtctaaatgaagtacttaaagcagaaagacctgatgtggacgagaaacgatctgatcttcttaaacttcaaggggaatttcagctccgtttgcgtcagctggaaaaatctctactacaagctctgaacgaggtgaaagggcgcattttggatgacgacacgatcataaccactctggagaacctgaagagagaggctgcagaggtcaccaggaaagttgaggagacggacattgtcatgcaggaggtggagaccgtgtcccagcagtacctcccgctctccaccgcctgcagcagcatctacttcaccatggagtccctcaagcagatacacttcttgtaccagtactccctccagtttttcctggacatttatcacaacgtcctatacgagaacccgaacctgaagggtgtcaccgaccacacacagcgcctgtccattataacaaaggacctcttccaggtggcgtttaaccgagtggctcgaggcatgctgcatcaggaccacattacctttgccatgctgctggcaagaatcaaactgaagggcaccgtgggggagcccacctacgatgcagaattccagcacttcttgagaggaaatgagattgtcctgagtgctggctccacccccaggatccagggcctgactgtggagcaggcggaggcggtggtgaggctgagctgccttcccgcgtttaaggacttgattgcaaaggttcaggcagacgagcaatttggcatctggctggacagcagctccccggagcagactgtgccctacctctggagtgaagaaacacctgcaacacccattggccaggccatccaccgcctgctcctgatccaggctttccggcccgatcgcctgttggccatggcccacatgtttgtttcaacaaaccttggggagtctttcatgtccatcatggagcagccgctcgacctgacccacattgtgggcacagaggtgaagcccaacactcctgtcttaatgtgctctgtgcctggttatgatgccagtggacatgtcgaggaccttgcagccgagcagaacacgcagatcacttcaattgcaatcggctctgcagaaggctttaaccaagcagataaggcaataaacaccgctgtaaagtcgggcaggtgggtgatgctgaagaatgtgcatctggccccagggtggctgatgcagctggagaagaagttgcattccctgcagccgcatgcctgcttccgactcttcctcaccatggagatcaaccccaaggtgcctgtgaatctgctccgtgcgggccgcatctttgtgttcgagccaccgccaggggtgaaggccaacatgctgaggacgttcagcagcattcccgtctcacggatatgcaagtctcccaacgagcgtgcccgcttgtacttcctgctggcctggtttcatgcgatcatccaagaacgcttacgatacgcaccactggggtggtcaaagaagtatgaatttggagagtctgacctgcggtcagcttgcgatacggtggacacgtggctggatgacacggccaagggcaggcagaacatctcaccggataagatcccgtggtctgcactaaagaccttaatggcccagtccatttatggcgggcgcgtggacaacgagtttgaccagcgtctgctcaacaccttcctggagcgcctgttcacaaccaggagtttcgacagtgagtttaagctggcatgcaaggtcgacggacataaagacattcaaatgccagatggcatcaggcgagaggagtttgtgcagtgggtggagttgctccccgacacccagacgccctcctggctgggcctgcccaacaacgccgagagagtcctccttaccacacagggtgtggacatgatcagtaaaatgctgaagatgcagatgttggaggatgaggacgacctggcctacgcagagactgagaagaagacgaggacagactccacgtccgacgggcgccctgcctggatgcggacactgcacaccaccgcgtccaactggctgcacctcatcccccagacgctgagccacctcaagcgcaccgtggagaatatcaaggatcctttgttcaggttctttgagagagaagtgaagatgggcgcaaagctgcttcaggacgttcgccaggaccttgcagatgtcgtccaggtgtgcgaaggaaagaagaagcagaccaactacttgcgcacgctgatcaacgagctagtgaaagggatcttgcctcggagctggtcccactacacggtgcctgccggcatgaccgtcatccagtgggtgtccgacttcagcgagaggatcaaacagctgcagaacatctcactggcagctgcatctggtggcgccaaggagctaaagaacatccacgtgtgcctgggtggcctgttcgtgcctgaggcgtacatcactgccaccaggcagtatgtggcccaggccaacagctggtccctggaggagctctgcctggaagtcaacgtcaccacctcacagggcgccacccttgacgcttgcagcttcggagtcacgggtttgaaacttcaaggggccacgtgcaacaacaacaagctgtcactgtccaatgccatctcaaccgcccttcccctgacgcagctgcgctgggtcaagcagacaaacaccgagaagaaggccagtgtggtaaccttacctgtctacctgaacttcacccgtgcagacctcatcttcaccgtggacttcgaaattgctacaaaggaggatcctcgcagcttctacgagcggggtgtcgcagtcttgtgcacagagtaaacttttctagctgcccctttctgtaatagtgaaagttggtatttaacatttattcatttttaaaatatttggaaggtctgagcttgtgaaaagaaagtggttggtctgaggttggaggaagctgaatggaatctgacggttgggagtggtggaaattggaaggataccaggaggtatttgggaaggccaatggcgtggctcctttgaggaaataaaacactaagcatgagccggcaaaaaaaaaaaaaaaaaaaaa

SEQ ID NO: 1426 - DNA, 5377 bp, Homo Sapiens
  NM_001379
ggctccgttccatccttctgcacagggtatcgcctctctccgtttggtacatcccctcctcccccacgcccggactggggtggtagacgccgcctccgctcatcgcccctccccatcggtttccgcgcgaaaagccggggcgcctgcgctgccgccgccgcgtctgctgaagcctccgagatgccggcgcgtaccgccccagcccgggtgcccacactggccgtcccggccatctcgctgcccgacgatgtccgcaggcggctcaaagatttggaaagagacagcttaacagaaaaggaatgtgtgaaggagaaattgaatctcttgcacgaatttctgcaaacagaaataaagaatcagttatgtgacttggaaaccaaattacgtaaagaagaattatccgaggagggctacctggctaaagtcaaatcccttttaaataaagatttgtccttggagaacggtgctcatgcttacaaccgggaagtgaatggacgtctagaaaacgggaaccaagcaagaagtgaagcccgtagagtgggaatggcagatgccaacagcccccccaaacccctttccaaacctcgcacgcccaggaggagcaagtccgatggagaggctaagcctgaaccttcacctagccccaggattacaaggaaaagcaccaggcaaaccaccatcacatctcattttgcaaagggccctgccaaacggaaacctcaggaagagtctgaaagagccaaatcggatgagtccatcaaggaagaagacaaagaccaggatgagaagagacgtagagttacatccagagaacgagttgctagaccgcttcctgcagaagaacctgaaagagcaaaatcaggaacgcgcactgaaaaggaagaagaaagagatgaaaaagaagaaaagagactccgaagtcaaaccaaagaaccaacacccaaacagaaactgaaggaggagccggacagagaagccagggcaggcgtgcaggctgacgaggacgaagatggagacgagaaagatgagaagaagcacagaagtcaacccaaagatctagctgccaaacggaggcccgaagaaaaagaacctgaaaaagtaaatccacagatttctgatgaaaaagacgaggatgaaaaggaggagaagagacgcaaaacgacccccaaagaaccaacggagaaaaaaatggctcgcgccaaaacagtcatgaactccaagacccaccctcccaagtgcattcagtgcgggcagtacctggacgaccctgacctcaaatatgggcagcacccaccagacgcggtggatgagccacagatgctgacaaatgagaagctgtccatctttgatgccaacgagtctggctttgagagttatgaggcgcttccccagcacaaactgacctgcttcagtgtgtactgtaagcacggtcacctgtgtcccatcgacaccggcctcatcgagaagaatatcgaactcttcttttctggttcagcaaaaccaatctatgatgatgacccatctcttgaaggtggtgttaatggcaaaaatcttggccccataaatgaatggtggatcactggctttgatggaggtgaaaaggccctcatcggcttcagcacctcatttgccgaatacattctgatggatcccagtcccgagtatgcgcccatatttgggctgatgcaggagaagatctacatcagcaagattgtggtggagttcctgcagagcaattccgactcgacctatgaggacctgatcaacaagatcgagaccacggttcctccttctggcctcaacttgaaccgcttcacagaggactccctcctgcgacacgcgcagtttgtggtggagcaggtggagagttatgacgaggccggggacagtgatgagcagcccatcttcctgacaccctgcatgcgggacctgatcaagctggctggggtcacgctgggacagaggcgagcccaggcgaggcggcagaccatcaggcattctaccagggagaaggacaggggacccacgaaagccaccaccaccaagctggtctaccagatcttcgatactttcttcgcagagcaaattgaaaaggatgacagagaagacaaggagaacgcctttaagcgccggcgatgtggcgtctgtgaggtgtgtcagcagcctgagtgtgggaaatgtaaagcctgcaaggacatggttaaatttggtggcagtggacggagcaagcaggcttgccaagagcggaggtgtcccaatatggccatgaaggaggcagatgacgatgaggaagtcgatgataacatcccagagatgccgtcacccaaaaaaatgcaccaggggaagaagaagaaacagaacaagaatcgcatctcttgggtcggagaagccgtcaagactgatgggaagaagagttactataagaaggtgtgcattgatgcggaaaccctggaagtgggggactgtgtctctgttattccagatgattcctcaaaaccgctgtatctagcaagggtcacggcgctgtgggaggacagcagcaacgggcagatgtttcacgcccactggttctgcgctgggacagacacagtcctcggggccacgtcggaccctctggagctgttcttggtggatgaatgtgaggacatgcagctttcatatatccacagcaaagtgaaagtcatctacaaagccccctccgaaaactgggccatggagggaggcatggatcccgagtccctgctggagggggacgacgggaagacctacttctaccagctgtggtatgatcaagactacgcgagattcgagtcccctccaaaaacccagccaacagaggacaacaagttcaaattctgtgtgagctgtgcccgtctggctgagatgaggcaaaaagaaatccccagggtcctggagcagctcgaggacctggatagccgggtcctctactactcagccaccaagaacggcatcctgtaccgagttggtgatggtgtgtacctgccccctgaggccttcacgttcaacatcaagctgtccagtcccgtgaaacgcccacggaaggagcccgtggatgaggacctgtacccagagcactaccggaaatactccgactacatcaaaggcagcaacctggatgcccctgagccctaccgaattggccggatcaaagagatcttctgtcccaagaagagcaacggcaggcccaatgagactgacatcaaaatccgggtcaacaagttctacaggcctgagaacacccacaagtccactccagcgagctaccacgcagacatcaacctgctctactggagcgacgaggaggccgtggtggacttcaaggctgtgcagggccgctgcaccgtggagtatggggaggacctgcccgagtgcgtccaggtgtactccatgggcggccccaaccgcttctacttcctcgaggcctataatgcaaagagcaaaagctttgaagatcctcccaaccatgcccgtagccctggaaacaaagggaagggcaagggaaaagggaagggcaagcccaagtcccaagcctgtgagccgagcgagccagagatagagatcaagctgcccaagctgcggaccctggatgtgttttctggctgcggggggttgtcggagggattccaccaagcaggcatctctgacacgctgtgggccatcgagatgtgggaccctgcggcccaggcgttccggctgaacaaccccggctccacagtgttcacagaggactgcaacatcctgctgaagctggtcatggctggggagaccaccaactcccgcggccagcggctgccccagaagggagacgtggagatgctgtgcggcgggccgccctgccagggcttcagcggcatgaaccgcttcaattcgcgcacctactccaagttcaaaaactctctggtggtttccttcctcagctactgcgactactaccggccccggttcttcctcctggagaatgtcaggaactttgtctccttcaagcgctccatggtcctgaagctcaccctccgctgcctggtccgcatgggctatcagtgcaccttcggcgtgctgcaggccggtcagtacggcgtggcccagactaggaggcgggccatcatcctggccgcggcccctggagagaagctccctctgttcccggagccactgcacgtgtttgctccccgggcctgccagctgagcgtggtggtggatgacaagaagtttgtgagcaacataaccaggttgagctcgggtcctttccggaccatcacggtgcgagacacgatgtccgacctgccggaggtgcggaatggagcctcggcactggagatctcctacaacggggagcctcagtcctggttccagaggcagctccggggcgcacagtaccagcccatcctcagggaccacatctgtaaggacatgagtgcattggtggctgcccgcatgcggcacatccccttggccccagggtcagactggcgcgatctgcccaacatcgaggtgcggctctcagacggcaccatggccaggaagctgcggtatacccaccatgacaggaagaacggccgcagcagctctggggccctccgtggggtctgctcctgcgtggaagccggcaaagcctgcgaccccgcagccaggcagttcaacaccctcatcccctggtgcctgccccacaccgggaaccggcacaaccactgggctggcctctatggaaggctcgagtgggacggcttcttcagcacaaccgtcaccaaccccgagcccatgggcaagcagggccgcgtgctccacccagagcagcaccgtgtggtgagcgtgcgggagtgtgcccgctcccagggcttccctgacacctaccggctcttcggcaacatcctggacaagcaccggcaggtgggcaatgccgtgccaccgcccctggccaaagccattggcttggagatcaagctttgtatgttggccaaagcccgagagagtgcctcagctaaaataaaggaggaggaagctgctaaggactagttctgccctcccgtcacccctgtttctggcaccaggaatccccaacatgcactgatgttgtgtttttaacatgtcaatctgtccgttcacatgtgtggtacatggtgtttgtggccttggctgacatgaagctgttgtgtgaggttcgcttatcaactaatgatttagtgatcaaattgtgcagtactttgtgcattctggattttaaaagttttttattatgcattatatcaaatctaccactgtatgagtggaaattaagactttatgtagtttttatatgttgtaatatttcttcaaataaatctctcctataaaccaaaaaaaaaaaaaaaaaaaaaaaaaa

SEQ ID NO: 1427 - DNA, 2150 bp, Homo Sapiens
  NM_001382
aagtatccgttcttggctgcctttctttaattgcgtttccagtactctctcggtgattctactcttgaacataggatgaaatttggaatcacacttctcttccacttccatccccaccctctaatgcccatattaaaaatggcggccgccgccttccgcagtaatggttgttcagcgaacaagatccgggcggaaacagtagataggcgggtgcagcggggcagaacataggttgccttagagaggttccccggtgtcccgacggcggctcaagtcagagttgctgggttttgctcagattggtgtgggaagagcctgcctgtggggagcggccactccatactgctgaggcctcaggactgctgctcagcttgcccgttacctgaagaggcggcggagccgggcccctgaccggtcaccatgtgggccttctcggaattgcccatgccgctgctgatcaatttgatcgtctcgctgctgggatttgtggccacagtcaccctcatcccggccttccggggccacttcattgctgcgcgcctctgtggtcaggacctcaacaaaaccagccgacagcagatcccagaatcccagggagtgatcagcggtgctgttttccttatcatcctcttctgcttcatccctttccccttcctgaactgctttgtgaaggagcagtgtaaggcattcccccaccatgaatttgtggccctgataggtgccctccttgccatctgctgcatgatcttcctgggctttgcggatgatgtactgaatctgcgctggcgccataagctgctgctacctacagctgcctcactacctctcctcatggtctatttcaccaactttggcaacacgaccattgtggtgcccaagcccttccgcccgatacttggcctgcatctggacttgggaatcctgtactatgtctacatggggctgctggcagtgttctgtaccaatgccatcaatatcctagcaggaattaacggcctagaggctggccagtcactagtcatttctgcttccatcattgtcttcaacctggtagagttggaaggtgattgtcgggatgatcatgtcttttccctctacttcatgatacccttttttttcaccactttgggattgctctaccacaactggtacccatcacgggtgtttgtgggagataccttctgttactttgctggcatgacctttgccgtggtgggcatcttgggacacttcagcaagaccatgctactattcttcatgccccaggtgttcaacttcctctactcactgcctcagctcctgcatatcatcccctgccctcgccaccgcatacccagactcaatatcaagacaggcaaactggagatgagctattccaagttcaagaccaagagcctctctttcttgggcacctttattttaaaggtggcagagagcctccagctggtgacagtacaccagagtgagactgaagatggtgaattcactgaatgtaacaacatgaccctcatcaacttgctacttaaagtccttgggcccatacatgagagaaacctcacattgctcctgctgctgctgcagatcctgggcagtgccatcaccttctccattcgatatcagctcgttcgactcttctatgatgtctgagtcccttgatcattgtcctttacctcacagtctctaggattcctgactcaggctgacctctctctctggtcccagactgcctccttgcccaggcctctctcactcttcatactcctccagattttgttctcagcattttcctttctctgtgatcattggcatcctgggcgtttcttgccctctgctgactactgattggattttacctatggctttctgcaacttgctactctctccctctccatcccatctttgcagcctcatagggtgggatacagcagctttttttgcagttatccacactcacatttcagagtcctgactctcaaggaaccactggtttttgggatagaacttgggccagggctaggaacacaggctccacggtgacatgtcatttgattgtaaattaagtgttctgattagtaagaactaagcagggggccacatgctctcaatggagacaataaagtgttgtctttttcttattgtttaaaaaaaaa

SEQ ID NO: 1428 - DNA, 2513 bp, Homo Sapiens
  NM_001384
cccggtagtcccacgtgtagcggagaaacagtagttaggatggctgaaggggatactcaccggctgaaggccgactgtgattccccctacccccacaaggcgattttgaccccctgagggctgctctagaggactcaggccccgaagctgtcccagggaggtccccgctgcatcccaccacccaagctgtgcctcatggagtcgatgtttagcagccctgccgaggcggcgctgcagcgagagaccggggtgccaggactgcttactcctcttccggacctggacggagtgtacgagctggagcgagtcgctggatttgtccgcgacctggggtgtgaacgagttgccttgcagttccctgaccagctattgggagatgctgtggctgtggctgcacgactggaggagacgacagggtcaaagatgttcattctgggtgacacagcctacggcagctgctgcgtggatgtgctgggtgctgagcaagctggagctcaggctctcatacattttggccctgcctgcttaagccctccagcccgcccactgcccgttgccttcgtgcttcgtcaacgttctgtggccttggagctctgtgtcaaggcctttgaggcccagaacccagaccccaaagcgcctgtggtgctgctgagtgagccggcctgtgcccatgccctggaggctttggctactctcctgcgcccacggtacctggacctgctagtctccagcccagcttttccccaaccagtgggttccctgagtccagagcctatgcccctagagcgttttgggcgccgcttcccccttgccccagggaggcgtctagaagagtatggtgccttctatgtagggggctctaaggccagccctgacccagaccttgacccagacctgagtcggctgctcttggggtgggcaccaggtcaacccttctcctcctgctgtccagatacagggaagactcaggatgagggtgcccgggctggacggctaagggcacgaagacgatatctggtagagagggccagagatgcccgcgtggtagggctgctggcaggcacactgggtgtagcccaacaccgtgaggcactggcccacttgcggaacctgactcaggctgctggcaagcgtagctatgtgttggccctggggcggcccacccctgccaagcttgccaacttccctgaggtggatgtctttgtgctattagcctgtcctctgggtgctctagccccccagctttctggtagcttcttccagcctatactggcaccatgtgagctggaagctgcctgcaaccctgcctggccacctccaggcctggctccccacctcacacattatgcggacttattgcctggctctcccttccacgtggctctcccaccacctgagtcagagctgtgggaaaccccagacgtgtcactcattactggagatctccgacccccacctgcctggaagtcatcaaatgatcatggaagcttggctctgaccccacggccccagctggagctggctgagagcagtcctgcagcctcattccttagttcccggagctggcaagggctggagccccgcctgggtcagacgccagtgacagaagctgtgagtggaagacgagggattgccatcgcctatgaggatgagggaagcggctgataccatgtggggctggagacatagatggacttatgaatggctgctaggacctttagtgctccctgcaccaacctcccatccccctgccaagatccttgaaggaccctggaaggagggagagcaggcagcccttcacaggataggatccgtctctgtcctgtcctggcactggcacaagctcagcacatgcccagtaatgcgtgttgtttggctgatggaataaagggcttagggacttccctgaggcctctggacccatctgtcttcctgagggcagcccaggacctttggccaatcccagttcccaggctgcagttgagggtctgtccttgtcaaaaggcaggtgctagacagtctagaccagggtttctcaaactcgtacttgacatttggggccagataattctttgttgtggggctgtctggtgtatggtagggtgctcagcagcatccctggcctctgcccactagacatcagaagcactcccccagttgtgacaaccaaaaatatctccagaccttggcaaatgttatctgtgggggaaaattgccctcaattgagaaccactggtctagctagacctgcactgtccagtacagtagccactaaatacatgtggctaaacttaaatttaagttaattaagattaaaagctcagtttctcagtcacattagtcattcaagtgttcagacagccacatgaggggacagtgcagctacaggatatgccatcatggcagaaagttctattggttggacagcgttggtctatactgactcttatttctcagggagatcacagcaacctaaataaaccagataccttttctcaaaaaaaaaaaaaaaa

SEQ ID NO: 1429 - DNA, 4567 bp, Homo Sapiens
  NM_001386
ggcgcatgcgccacggtggccgacttgaaccgaggcttttattgctgtagtttatttccacccccttccctcctgtttctctctctccttctctctctctctctctctctctcttttttttccgccctagctggggctgtgttggaggagaggaagaaagagagacagaggattgcattcatccgttacgttcttgaaatttcctaatagcaagaccagcgaagcggttgcacccttttcaatcttgcaaaggaaaaaaacaaaacaaaacaaaaaaaacccaagtccccttcccggcagtttttgccttaaagctgccctcttgaaattaattttttcccaggagagagatgtcttatcaggggaagaaaaatattccacgcatcacgagcgatcgtcttctgatcaaaggaggtaaaattgttaatgatgaccagtcgttctatgcagacatatacatggaagatgggttgatcaagcaaataggagaaaatctgattgtgccaggaggagtgaagaccatcgaggcccactcccggatggtgatccccggaggaattgacgtccacactcgtttccagatgcctgatcagggaatgacgtctgctgatgatttcttccaaggaaccaaggcggccctggctgggggaaccactatgatcattgaccacgttgttcctgagcctgggacaagcctgctcgctgcctttgaccagtggagggaatgggccgacagcaagtcctgctgtgactactctctgcatgtggacatcagcgagtggcataagggcatccaggaggagatggaagcgcttgtgaaggatcacggggtaaattccttcctcgtgtacatggctttcaaagatcgcttccagctaacggattgccagatttatgaagtactgagtgtgatccgggatattggcgccatagcccaagtccacgcagaaaatggcgacatcattgcagaggagcagcagaggatcctggatctgggcatcacgggccccgagggacatgtgctgagccgacctgaggaggtcgaggccgaagccgtgaatcgtgccatcaccatcgccaaccagaccaactgcccgctgtatatcaccaaggtgatgagcaaaagctctgctgaggtcatcgcccaggcacggaagaagggaactgtggtgtatggcgagcccatcactgccagcttgggaacggacggctcccattactggagcaagaactgggccaaggctgctgcctttgtcacctccccacccttgagccctgatccaaccactccagactttctcaactccttgctgtcctgtggagacctccaggtcacgggcagtgcccattgcacgtttaacactgcccagaaggctgtaggaaaggacaacttcaccctgattccggagggcaccaatggcactgaggagcggatgtccgtcatctgggacaaggctgtggtcactgggaagatggatgagaaccagtttgtggctgtgaccagcaccaatgcagccaaagtcttcaacctttacccccggaaaggccgcattgctgtgggatccgatgccgacctggtcatctgggaccccgacagcgttaaaaccatctctgccaagacacacaacagctctctcgagtacaacatctttgaaggcatggagtgccgcggctccccactggtggtcatcagccaggggaagattgtcctggaggacggcaccctgcatgtcaccgaaggctctggacgctacattccccggaagcccttccctgattttgtttacaagcgtatcaaggcaaggagcaggctggctgagctgagaggggttcctcgtggcctgtatgacggacctgtgtgtgaagtgtctgtgacgcccaagacagtcactccagcctcctcggccaagacgtctcctgccaagcagcaggccccacctgtccggaacctgcaccagtctggattcagtttgtctggtgctcagattgatgacaacattccccgccgcaccacccagcgtatcgtggcgccccccggtggccgtgccaacatcaccagcctgggctagagctcctgggctgtgccgtccactggggactggggatgggacacctgaggacattctgagacttctttcttccttcctttttttttttttgtttttttttttaagagcctgtgatagttactgtggagcagccagttcatggggtcccccttggggccccacaccccgtctctcaccaagagttactgattttgctcatccacttccctacacatctatgggtatcacacccaagactacccaccaagctcatacagggaaccacacccaacacttagacatgcgaacaagcagcccccagcgagggtctccttcgccttcaacctcctagtgtctgttagcatcttccttttcatggggggagggaagataaagtgaattgcccagagctgcctttttcttttctttttaaaaattttaagaagttttctttgtggggctggggaggggccggggtcagggagagtcttttttttttttttttttaaatactaaattggaacatttaattccatattaatacaaggggtttgaactggacatcctaatgatgcaattacgtcatcacccagctgattccgggtggttggcaaactcatcgtgtctgtcctgagaggctccacaatgcccacccgcatcgccattctgtagtcttcagggtcagctgttgataaaggggcaggcttgcgttattggcctagattttgctgcagattaaatcctttgaggattctcttctcttttaccatttttctgcgtgctctcactctctctttctctctctagctttttaattcatgaatattttcgtgtctgtctctctctctctctgtgtttcctccagcccttgtctcggagacggtgttttcctcccttgccccattatcttttcacctcccaggtctaccatttcatggtggtcgttgggtccgcctaaaggatttgagcgtttgccattgcaagcatagtgctgtgtcatcctggtccatgtaggactggtgctaaccacctgccatcatgaggatgtgtgctagagtgtgggaccctggccaagtgcaggaatgggccatgccgtctcacccacagtatcacacgtggaaccgcagacagggcccagaagctttagaggtatgaggctgcagaaccggagagattttcctctgtgcagtgctctctggctaaagtcacggtcaaacctaaacaccgagcctcattaacccaagtgaaccaaccaaagtcaccagttcagaagtgctaagctaataggagtctgacccgagggcctgctgcttcctggttaagtatcttttgagattctagaacacatgggagctttttattttcggggaaaaaccgtatttttttcttgtccaattatttctaaagacacactacatagaaagaggccctataaactcaaaaagtcattgggaaacttaaagtctattctactttgcaagaggagaaatgtgttttatgaacgatagatcacatcagaactcctgtggggaggaaaccttataaattaaacacatggcccccttagagaccacaggtgatgtctgtctccatccttccctctccttttctgtcacctttccccctagctggctcctttggacctacccctgtccttgctgacttgtgttgcattgtattccaaacgtgtttacaggttctcttaagcaatgttgtatttgcaggcttttctgaataccaaatctgctttttgtaaagcgtaaaaacatcacaaagtaggtcattccatcaccacccttgtctctctacacattttgcctttggggatctggttggggttttgggttttttgttgttgttgtttatttgttattttaaaggtaaattgcacttttaaaaaaataattggttgacttaatatatttgctttttttctcacctgcacttagaggaaatttgaacaagttggaaaaaaacaatttttgtttcaattctaagaaacacttgcagctctagtattcacttgagtcttcctgtttttcctgtaccgggtcatggtaatttttggttgttttggttgttttcttaaaaaacaagttaaaacctgacgatttctgcaggctgtgtaagcatgtttacctgttggcttgctttgtgtgtctgttaaatgaatgtcatatgtaaatgctaaaataaatcgacagtgtctcagaactgaataactgcagtgacttgatgctctaaaacagtgtaggatttaagaatagatggtttttaatcctggaaattgtgattgtgacccatgagtggaggaactttcagttctaaagctgataaagtgtgtagccagaagagtacttttttttttgtaaccactgtcttgatggcaaaataattatggtaaaaaacaagtctcgtgtttattattccttaagaactctgtgttatattaccatggaacgcctaataaagcaaaatgtggttgtttcaggaaaaaaaaaaaaaaaaaaaaaaaaaaa

SEQ ID NO: 1430 - DNA, 1888 bp, Homo Sapiens
  NM_001388
cggaattgccggtgccgccgccaccgctgtctgtgcgcccacctctgctgctaccatggggatcttagagaagatctcggagatcgagaaggagatcgctcggacacagaagaacaaggccactgagtatcatctgggcctgctgaaagctaagctcgccaagtatcgggcccagctcctggaaccgtccaaatcggcctcgtccaaaggagagggctttgatgtcatgaagtcgggtgatgcccgtgtggcgctgattggatttccctctgtgggtaagtccacattcttgagtctgatgacctccacggccagcgaggcagcgtcctatgagttcaccactctgacgtgtattcctggggtcattgaatacaaaggtgccaacatccagctcctggaccttcctggaatcattgaaggcgcagcccaaggaaaaggccgtggccggcaggtgatcgctgtggcgcgcacggctgacgtcatcatcatgatgctggatgccaccaagggagaggtgcagaggtctctgctggagaaggagctggagtctgtgggcatccgcctcaacaagcacaagcctaacatctacttcaagcccaagaaaggtggtggcatctcctttaactcgacagtcacgctgacccagtgctcggaaaagctggtgcagctcatcctgcacgaatacaagatcttcaatgcagaagtgcttttccgagaagactgctccccggacgagttcatcgatgtgatcgtgggcaaccgggtgtacatgccctgcctgtatgtttataacaaaatcgaccagatctccatggaagaggtggaccgcctggcccgaaaacccaacagtgtggtcatcagctgcggcatgaagctgaacctggactatctgctggagatgctttgggagtacttggccctgacctgcatctacaccaagaagagaggacagaggccagacttcacagacgccatcattctccggaaaggggcctcagtggagcacgtgtgccaccgcatccaccggtcactcgccagccagttcaagtacgccctggtgtggggcaccagcaccaagtacagtccgcagcgggtgggcctgacccacaccatggagcatgaggacgtcatccagatcgtgaagaagtaacggcgcctgccgggcctcccgcccacctgcctcgtctccctggggaggtggtcccactgggacacacaaacacccaaacagaaaaatacaaatacacgtaccccaggaaggggtccctcaagtctctgctatttacagaagtttcttcagtaggcagacgaagagtgtgttggggcaaaggggctcggttggaggcatttcccataagactgagccctctcatgggggttttgagtttgtagtgctgagcctgcatctgtgcctcccagccccctgcactgagggagcaagttgcccacatgcccgccagccagggcctaaagcagatggcatgctcagtgccaggctggtagctgggcctgtttgggtccctggaggctgtggctgctgtcatggcacctcactccctcagctcttgccagcttctctgacacttgggttgggggcccttccaggaggaaacccccttgggtgccccacacagggctctccatgatgggaaccagtggttagtggcttcaaaggcccagctgacaccctccacagcctaaggggtgtcctaaagtgcctccccctgtattccccctcccagggcagcccctgcccagcacaaaaccccaggaccctggctctgcacgcctggggcagggacttttgagtttaggatctgtattttctaagtccccagttctcctggctctcctttctgaaataaaggattgaaaacggttcctgttc

SEQ ID NO: 1431 - DNA, 5114 bp, Homo Sapiens
  NM_001397
aggtggtgcaacgcctggcccggcccatcccatcccggccacccgggcagcgggaccaggcgtctggggcacagcatgcggggcgtgtggccgcccccggtgtccgccctgctgtcggcgctggggatgtcgacgtacaagcgggccacgctggacgaggaggacctggtggactcgctctccgagggcgacgcataccccaacggcctgcaggtgaacttccacagcccccggagtggccagaggtgctgggctgcacggacccaggtggagaagcggctggtggtgttggtggtacttctggcggcaggactggtggcctgcttggcagcactgggcatccagtaccagacaagatccccctctgtgtgcctgagcgaagcttgtgtctcagtgaccagctccatcttgagctccatggaccccacagtggacccctgccatgacttcttcagctacgcctgtgggggctggatcaaggccaacccagtccctgatggccactcacgctgggggaccttcagcaacctctgggaacacaaccaagcaatcatcaagcacctcctcgaaaactccacggccagcgtgagcgaggcagagagaaaggcgcaagtatactaccgtgcgtgcatgaacgagaccaggatcgaggagctcagggccaaacctctaatggagttgattgagaggctcgggggctggaacatcacaggtccctgggccaaggacaacttccaggacaccctgcaggtggtcaccgcccactaccgcacctcacccttcttctctgtctatgtcagtgccgattccaagaactccaacagcaacgtgatccaggtggaccagtctggcctgggcttgccctcgagagactattacctgaacaaaactgaaaacgagaaggtgctgaccggatatctgaactacatggtccagctggggaagctgctgggcggcggggacgaggaggccatccggccccagatgcagcagatcttggactttgagacggcactggccaacatcaccatcccacaggagaagcgccgtgatgaggagctcatctaccacaaagtgacggcagccgagctgcagaccttggcacccgccatcaactggttgccttttctcaacaccatcttctaccccgtggagatcaatgaatccgagcctattgtggtctatgacaaggaataccttgagcagatctccactctcatcaacaccaccgacagatgcctgctcaacaactacatgatctggaacctggtgcggaaaacaagctccttccttgaccagcgctttcaggacgccgatgagaagttcatggaagtcatgtacgggaccaagaagacctgtcttcctcgctggaagttttgcgtgagtgacacagaaaacaacctgggctttgcgttgggccccatgtttgtcaaagcaaccttcgccgaggacagcaagagcatagccaccgagatcatcctggagattaagaaggcatttgaggaaagcctgagcaccctgaagtggatggatgaggaaacccgaaaatcagccaaggaaaaggccgatgccatctacaacatgataggataccccaacttcatcatggatcccaaggagctggacaaagtgtttaatgactacactgcagttccagacctctactttgaaaatgccatgcggtttttcaacttctcatggagggtcactgccgatcagctcaggaaagcccccaacagagatcagtggagcatgaccccgcccatggtgaacgcctactactcgcccaccaagaatgagattgtgtttccggccgggatcctgcaggcaccattctacacacgctcctcacccaaggccttaaactttggtggcataggtgtcgtcgtgggccatgagctgactcatgcttttgatgatcaaggacgggagtatgacaaggacgggaacctccggccatggtggaagaactcatccgtggaggccttcaagcgtcagaccgagtgcatggtagagcagtacagcaactacagcgtgaacggggagccggtgaacgggcggcacaccctgggggagaacatcgccgacaacgggggtctcaaggcggcctatcgggcttaccagaactgggtgaagaagaacggggctgagcactcgctccccaccctgggcctcaccaataaccagctcttcttcctgggctttgcacaggtctggtgctccgtccgcacacctgagagctcccacgaaggcctcatcaccgatccccacagcccctctcgcttccgggtcatcggctccctctccaattccaaggagttctcagaacacttccgctgcccacctggctcacccatgaacccgcctcacaagtgcgaagtctggtaaggacgaagcggagagagccaagacggaggaggggaaggggctgaggacgagacccccatccagcctccagggcattgctcagcccgcttggccacccggggccctgcttcctcacactggcgggttttcagccggaaccgagcccatggtgttggctctcaacgtgacccgcagtctgatcccctgtgaagagccggacatcccaggcacacgtgtgcgccaccttcagcaggcattcgggtgctgggctggtggctcatcaggcctgggccccacactgacaagcgccagatacgccacaaataccactgtgtcaaatgctttcaagatatatttttggggaaactattttttaaacactgtggaatacactggaaatcttcagggaaaaacacatttaaacacttttttttttaaggaaagaattggtatatttattatgttctgtttttctaaataacctgtggacaagggaagccccactgatttactccctctcttccccactccctgtgaggctgggctgaggcacggatccctgggccacagagcaagtctccaaatcagacagctgcctcagcccctgggatgtgtgatttcagctcctgtcacctcatgcaagggcgtggagaccagtagaggtgtggaggccaggcagagagaggagcctgctctgcggggggcccagctcatgggcactgccccttcagctagcctgcctccgtcccctgagtccaacagtgggagccctagctgggaagttctgatccccaaagccacagcaggggactgatggctatagcagaatgaggtcgggtcaggaccctcaaacaccatctgggaacaccaagcaccctgaatcgagactgcaggagccctgcggggtgagactgtgtcagagatacactgctggccacaagtgtcccctctcagtcccaccttttcgggctgtcccatgtctatctcaggggcccgttacctctctgcagcagtcccccatcccagccacaccagggtctgtccggccaaccctcttccccagggaaaggagaaaagagaaaacaggctgggcccggtggctcactcctgtaatcccagcactttgggaggttgaggtgggcggatcacctgaggtcaggagtttgagaccagcctggccaacgtggtgaaaccccatctctactaaaaaaaattacaaaaattagccgggagtggtggtgggcacctgtaatcccagttactcgggaggctgaggcaagagaatctcttgagctcaggaggcagaggttgcagtgagctgagattgcgccactgcactccagcctgggtgacagagggagactccgtcccaaaaaaaagaaaagagaaacagctgtcacctcccgcaggacccaaatcctctctctgagcaccgtcatccaccacatggctgggcctggctcccaggaccagtccagtcctctagtgccttatctgaggctgcagccgccagtctccaccccaaggagacagcccctgctcctagatgcccttggcctccgcagtgcagcccccaggtgtcctgactgaagcacaggccatagccccatttccccggtgcctgcagggctaacctccacgggagcccaggagctctggccggcaggtccatggcacagggcatcggaagactgcaaaactgctggacttaccctgggctgcagtccattgtcggcccctgggttgaatcaagatagtacttgcagctagatggatgcttttagccaggggacattgtgaggggaagattcctccacccagtctggcctgtggtgtctgtctcctccctgagaccacagcttctccagtagcagactcatgggcgccaccaagtggaagcacctggagcggcctctgccatccagtggggaagccaggccccgagacggaggtgggggcagcacgtgccctccacagccaccgctttcccgcctcagcagcccaggcctcctggcccagccctgcctggacagtgctctcccctcacccgggaagctggaatcctcctgcccgagaggaagcagacggcacagggacacccctgccaccttgggatctgcctccaagctggtgcagggtatcgagagtggattccagatggaggtcctggtcccagcacgcagcagtcctggtagctctgcagaggagacaggaacccgagaagtagctgaagcagaagccagccgcagtccccttgccacatagaggcgggcttctcccagccatggtgtcccctctgcctcccctcccccgaccctcctgccttccgcgtggagggtggtggtcctgtagtgtcagcaccagcaccatgggcttggaccccctccctggacacaggcaggtgtcctagggctgggggtgcagcccgagggaatggagaccacactcatggctcaggtctgccggggccggcagggggttggggaagaagagggctcaggcccagcaggggtggaagcccctgccactgccactacccgctccagagctttaaggaaaatgaagtgagacccctccccttaggcctggggagccatagggctggcttctctgtgggtgcgtggacgtggggttgggagctgggaatctattttttgtattatgttttgagctactgtagttttggcgtggcactattgtaatggaaataaaatacttgtacggagggcaaaaaaaaaaaaaaaaaa

SEQ ID NO: 1432 - DNA, 3050 bp, Homo Sapiens
  NM_001400
tttttttgcttctgccccagatctttcctggacagtgcgtctcagcagttcagatccgggggcccccagctgacagagggcgtggggggttaaggcattaacccctcccagcctcttcctgaagaaaccacccagccttggcgcggcgctgggtgacttcgcgtagcaggcagggaactggccgcggcgagcgggactggccattggagtgctccgctgcggagggaggggaccccgactcgagtaagtttgcgagagcactacgcagtcagtcgggggcagcagcaagatgcgaagcgagccgtacagatcccgggctctccgaacgcaacttcgccctgcttgagcgaggctgcggtttccgaggccctctccagccaaggaaaagctacacaaaaagcctggatcactcatcgaaccacccctgaagccagtgaaggctctctcgcctcgccctctagcgttcgtctggagtagcgccaccccggcttcctggggacacagggttggcaccatggggcccaccagcgtcccgctggtcaaggcccaccgcagctcggtctctgactacgtcaactatgatatcatcgtccggcattacaactacacgggaaagctgaatatcagcgcggacaaggagaacagcattaaactgacctcggtggtgttcattctcatctgctgctttatcatcctggagaacatctttgtcttgctgaccatttggaaaaccaagaaattccaccgacccatgtactattttattggcaatctggccctctcagacctgttggcaggagtagcctacacagctaacctgctcttgtctggggccaccacctacaagctcactcccgcccagtggtttctgcgggaagggagtatgtttgtggccctgtcagcctccgtgttcagtctcctcgccatcgccattgagcgctatatcacaatgctgaaaatgaaactccacaacgggagcaataacttccgcctcttcctgctaatcagcgcctgctgggtcatctccctcatcctgggtggcctgcctatcatgggctggaactgcatcagtgcgctgtccagctgctccaccgtgctgccgctctaccacaagcactatatcctcttctgcaccacggtcttcactctgcttctgctctccatcgtcattctgtactgcagaatctactccttggtcaggactcggagccgccgcctgacgttccgcaagaacatttccaaggccagccgcagctctgagaagtcgctggcgctgctcaagaccgtaattatcgtcctgagcgtcttcatcgcctgctgggcaccgctcttcatcctgctcctgctggatgtgggctgcaaggtgaagacctgtgacatcctcttcagagcggagtacttcctggtgttagctgtgctcaactccggcaccaaccccatcatttacactctgaccaacaaggagatgcgtcgggccttcatccggatcatgtcctgctgcaagtgcccgagcggagactctgctggcaaattcaagcgacccatcatcgccggcatggaattcagccgcagcaaatcggacaattcctcccacccccagaaagacgaaggggacaacccagagaccattatgtcttctggaaacgtcaactcttcttcctagaactggaagctgtccacccaccggaagcgctctttacttggtcgctggccaccccagtgtttggaaaaaaatctctgggcttcgactgctgccagggaggagctgctgcaagccagagggaggaagggggagaatacgaacagcctggtggtgtcgggtgttggtgggtagagttagttcctgtgaacaatgcactgggaagggtggagatcaggtcccggcctggaatatattttctacccccctggagctttgattttgcactgagccaaaggtctagcattgtcaagctcctaaagggttcatttggcccctcctcaaagactaatgtccccatgtgaaagcgtctctttgtctggagctttgaggagatgttttccttcactttagtttcaaacccaagtgagtgtgtgcacttctgcttctttagggatgccctgtacatcccacaccccaccctcccttcccttcatacccctcctcaacgttcttttactttatactttaactacctgagagttatcagagctggggttgtggaatgatcgatcatctatagcaaataggctatgttgagtacgtaggctgtgggaagatgaagatggtttggaggtgtaaaacaatgtccttcgctgaggccaaagtttccatgtaagcgggatccgttttttggaatttggttgaagtcactttgatttctttaaaaaacatcttttcaatgaaatgtgttaccatttcatatccattgaagccgaaatctgcataaggaagcccactttatctaaatgatattagccaggatccttggtgtcctaggagaaacagacaagcaaaacaaagtgaaaaccgaatggattaacttttgcaaaccaagggagatttcttagcaaatgagtctaacaaatatgacatctgtctttggcacttttgttgatgtttatttcagaatgttgtgtgattcatttcaagcaacaacatggttgtattttgttgtgttaaaagtacttttcttgatttttgaatgtatttgtttcagcagaagtcattttattggatttttctaacccgtgttaacaccattgaatgtgtatttcttaagaaaataccaccctcttgtgcccttaaaagcattactttaactggtagggaacgccagaaacttttcagtccagctattcattagatagtaattgaagatatgtataaatattacaaagaataaaaatatattactgtctctttagtatggttttcagtgcaattaaaccgagagatgtcttgtttttttaaaaagaatagtatttaataggtttctgacttttgtggatcattttgcacatagctttatcaacttttaaacattaataaactgatttttttaaagatc

SEQ ID NO: 1433 - DNA, 11974 bp, Homo Sapiens
  NM_001407
agcgaaccatcggggcggccgggagccatgttggagcggcgggaggcggcagcagcgtcggggatgctgtggtgggggcggaaaaagccagggccgcacgccggaggggctccggccgcggagtagatggtgcccagagggcggcgggggtgcggagagacaggcggaggggcgggggcccggggcggcggcaggggcccgggagggggcccgagcggcggggccagcccaaggcccggaccggggcggggggcggtggaggccgtgcagggaggcgggggatgatggcgaggcggccgccgtggcggggcctcgggggacggtcgacccccatactcctgctccttctcctctctttgttccccctcagccaggaggagctggggggcggtgggcaccagggctgggacccaggcttagctgccactacggggccaagggcgcatatcggtggcggagccttagctctttgtccggagtcttccggggtccgggaggatggggggcctggcctgggggtcagggagcctatcttcgtggggctccgagggagaaggcaaagcgcccggaatagtcgagggccccctgagcagccgaatgaggagctggggattgaacacggcgtccagccattgggcagccgcgaacgagagacaggacagggaccagggtctgtgttatactggcgcccagaggtctcctcttgcgggcggacaggacctttgcaaagaggtagtctgtcaccaggggctctgtcctcaggggtcccgggctcggggaacagctcgcccctcccttcagactttttgattcggcaccacggtcccaagccggtgtcctcccagcggaacgctgggacaggctcccgcaaaagagtgggcaccgcgcgctgctgtggggaattatgggcaacagggagcaagggtcagggcgagagagccacgacatccggagcagaaaggacagccccccggcggaactgtcttccaggggcctcgggatctggccccgagctggattcagcaccacgcacggcgaggacagctcctgcatcaggttcagcaccccgcgagtctcggacagctcccgagccggcgcccaagcgcatgcgctcccggggtctcttccgctgccgcttcctcccgcagcgccccgggccgcgtcccccgggactcccggcccgtcctgaagccaggaaagtaacctcggcgaaccgggcacgctttcgtcgcgccgcaaaccgccacccgcagtttccgcagtacaactaccagacgctggtgccggagaatgaggcagcaggcaccgcggtgctacgcgtggttgctcaggacccggacgccggcgaggccgggcgcctagtctactcgctggcggcactcatgaacagccgctcgctggagctgttcagcatcgacccgcagagcggccttatccgtacggcggcagctctggaccgcgagagcatggagcgtcactacctgcgtgtgaccgcgcaggaccacgggtcgccgcgcctctcggccaccacgatggtggccgtgacagtagccgaccgcaacgaccactcgccggtttttgagcaagcgcagtaccgggagacccttcgcgagaatgtggaggagggctaccctatcctgcagctgcgtgccactgacggcgacgcgccccccaacgccaacctgcgctaccgcttcgtggggccgccagctgcgcgcgctgcagctgccgccgccttcgagattgatccacgctccggcctcatcagcaccagcggccgagtggaccgcgagcacatggaaagctatgagctggtggtggaagccagcgaccagggccaggaacccgggccgcgctcggccactgtgcgcgtacacataactgtgctagacgagaacgacaatgctcctcagttcagcgagaagcgctacgtggcgcaggtgcgcgaggatgtgcgcccccacacagtcgtgctgcgcgtcacggccactgaccgggacaaggacgccaacggattggtgcactacaacatcatcagtggcaatagccgtggacactttgccatcgacagcctcactggcgagatccaggtggtggcacctctggacttcgaggcagagagagagtatgccttgcgcatcagggcgcaggatgctggccggccaccgctgtccaacaacacgggcctggccagcatccaggtggtggacatcaatgaccacattcctatttttgtcagcacgcccttccaagtttctgtcttggaaaatgctcccttgggtcactcagtcatccacattcaggcagtcgatgcagaccatggggagaatgccagattggagtactccctaactggtgtggcacctgatactccttttgtgataaacagcgccactggctgggtctctgtgagtggtcccctggaccgtgagtctgtggagcattacttctttggtgtggaggctcgagaccatggctcacccccactctctgcctcagccagtgtcaccgtgactgtgctggacgttaatgacaatcggcctgagttcacaatgaaggagtaccacctacgactgaatgaggatgcagctgtgggcaccagtgtggtcagcgtgaccgcagtagaccgtgatgccaacagtgccatcagctaccagatcacaggcggcaacacccggaatcgctttgccatcagcacccaggggggtgtgggtctggtgactctggctctgccactggactacaagcaggaacgctacttcaagctggtactaactgcatctgaccgtgcccttcatgatcactgctatgtgcacatcaacatcacagatgccaacactcatcggccggtctttcaaagtgcccactactcagtgagtgtgaatgaagatcggccaatgggtagcaccatagtggtcatcagtgcctctgatgatgacgtgggtgagaatgctcgtatcacctatctcctggaggacaacctgccccagttccgcattgatgcagactcaggagccattacattacaggccccattagactatgaggaccaggtgacctacaccctggctatcacagctcgggacaatggcatcccacagaaggcagacactacttatgtggaggtgatggtcaatgacgtgaatgacaatgctccacaatttgtggcctcccactatacagggctggtctctgaggatgccccacctttcaccagtgtcctgcagatctcagccactgaccgggatgctcatgccaatggccgggtccagtacactttccagaatggtgaagatggggatggagattttaccattgagcccacctctggaattgtccgtacagtaaggcggctagaccgggaggcagtatcagtgtatgagttgactgcctacgcagtggacagaggtgtgcccccactccggactccagtcagtatccaggtgatggtgcaggatgtgaacgacaatgcacctgtcttcccagctgaggagtttgaggtgcgggtgaaagagaatagcattgtgggctcagtggtggcccagatcactgcagtggaccctgacgaaggccccaatgcccatataatgtaccagatcgtggaggggaacatccctgagctgttccaaatggacatcttctctggagaactgacggcactcattgacctagactatgaggctcgccaagaatatgtgattgtggtgcaggccacatctgctcctttggtcagccgggccactgtgcacgtccgcctggttgaccagaatgacaacagccctgtgctcaacaacttccagatcctcttcaacaactatgtatccaaccgttcagacaccttcccgtcgggcattattgggcgcatcccagcttatgaccccgatgtctccgaccacctcttctactcctttgagcgtggcaatgagctgcagctgctggtagtcaaccagaccagtggggagctgcgactcagccgaaagctagacaataaccgcccactggtggcctccatgttggtgactgtcacagatggcctgcacagcgtgacggcgcagtgtgtgctgcgcgtggtcatcatcacggaggagttgctggccaacagcctgaccgtgcgccttgagaacatgtggcaggagcgcttcctgtcaccgctgctgggccgcttcctcgagggcgtggctgcggtgctcgctacgcccgctgaggacgtcttcatcttcaacatccagaacgacacagacgtagggggcaccgtgctcaatgtgagtttctcggcgctagctccacgtggggccggggcgggcgctgcagggccctggttcagctccgaggagctgcaggagcagttgtacgtgcgccgggcggcgctggcggctcgctccctgctcgacgtactgcccttcgacgacaacgtgtgcctgcgagagccctgtgagaactacatgaaatgcgtgtccgtgctccgctttgactcgtccgcgcccttcctggcctcggcctccacgctgttccgacccatccagcccatcgctggcctgcgctgccgctgcccgcccggattcacgggagacttttgcgagaccgagctcgacctctgctactccaacccatgtcgcaacggcggagcctgcgcgcggcgcgagggaggctacacgtgcgtctgccgcccgcgcttcaccggagaggactgcgagctggacaccgaggccggccgctgcgtgccgggcgtctgccgcaacgggggcacctgcaccgacgcgcccaacggcggctttcgctgccagtgcccggcaggcggcgccttcgagggcccgcgctgcgaggtggctgcgcgctccttcccgcccagttcgttcgtcatgtttcgcggcctgcggcagcgattccaccttacgctgtccctctcgttcgcgacagtgcagcagagcgggctgctcttctacaacgggcgcctgaacgagaagcacgacttcctggccctggaactcgtggctggccaagtgcggctcacatattccacgggtgaatccaacaccgtggtcagccccacagttccagggggcttgagtgacgggcaatggcatacagtgcatctgagatactacaacaagccccggacagatgccctagggggtgcacagggcccctccaaggacaaggtggctgtgctaagcgtggatgattgtgatgtggccgtggctctgcagtttggtgctgagattggcaactactcatgcgcggctgctggtgtgcaaacaagctccaagaagtccctggacctgacgggccctcttcttctgggaggtgtccccaacctccccgagaacttccccgtatcccataaggacttcatcggctgtatgcgggacctgcacattgatggccgccgagtggacatggcggcttttgtcgcaaataatggcaccatggcaggctgccaagccaagctacacttttgtgactcaggcccctgcaagaacagtggcttctgctcggagcgctggggcagcttcagctgcgactgccctgtgggcttcggcggcaaagactgtcagcttactatggcccatccccaccatttccgtggcaacggcacactgagctggaactttggaagtgacatggctgtgtctgtgccatggtacctggggctggcatttcggacacgggcaacgcagggggtcctgatgcaagtgcaggctgggccacacagcacgctcctttgccagctagatcgggggttactgtctgtgacagtgaccaggggctcgggccgtgcttcccatctccttctggaccaggtgactgtcagtgatggccggtggcacgatctgcggctggagttgcaggaggaaccaggtggccggcggggccaccatgtccttatggtctcactggactttagcctcttccaggacaccatggcggtggggagtgagctgcagggcctgaaggtaaagcagctccacgtgggaggcctgccccccggcagtgcagaggaggctcctcagggtctggttggctgcatccagggggtgtggctcggctccacaccctctggctccccggccctgctaccccccagccaccgagtgaatgcggagcctggctgtgttgtgaccaacgcctgtgcctctgggccctgcccacctcacgcagactgccgggacctctggcagaccttttcttgcacctgccagccaggttactacggcccaggctgtgtggatgcctgcctcctgaacccctgtcagaaccagggatcatgccggcacctgccaggagccccccatggctatacctgtgactgtgtgggtggctatttcgggcaccactgtgagcacaggatggaccagcagtgcccacggggctggtgggggagcccaacctgtggcccctgcaactgtgatgttcacaaaggttttgatcccaactgcaacaagacaaatgggcagtgtcactgcaaggagttccactaccgaccgcggggcagtgactcttgcctcccatgtgactgctaccctgtgggctccacctcgcgctcatgtgcaccccacagcgggcagtgcccctgtcgcccaggagcccttggccgccagtgcaacagctgtgacagtcccttcgcagaggtgacagccagcggctgccgggtgctctatgatgcctgccctaagtccctgagatctggtgtgtggtggccccagacaaagtttggcgtcctggccacagtgccctgtccccggggggccctgggtgctgctgtgcggctgtgtgatgaggcccagggttggctggagcccgacctcttcaactgtacctcccctgcctttcgagagctcagtctgctgctggatggcctagagctgaacaagacggcactggataccatggaggccaagaagctggctcagcggctacgggaggtgactggccacactgaccactattttagccaagatgttcgagtcactgcccgcctgctggcccacctgctggccttcgagagccatcagcagggcttcgggctgacagccacacaggatgcccacttcaatgagaatctgctgtgggccggctctgcactgcttgccccagagacaggggacttgtgggcggcgctggggcagcgggcccctgggggctccccaggcagcgcgggactggtgaggcacctggaggagtatgcagccacactcgcaaggaatatggaactcacatacctgaatcccatggggctggtgacgcctaatatcatgctcagcattgaccgcatggagcaccccagttctccccggggggcccgtcgctaccctcgctaccatagcaacctctttcgaggccaggatgcctgggatcctcacacccatgtgctgctgccttcccagtccccacggccatccccatctgaagttctgcccacaagcagcagcatagaaaactccaccacctcaagtgtggtccccccaccagccccgccagagccagagcctgggatctccattatcattctcctcgtttaccgcaccttagggggactgctccctgcccagttccaggcagaacgccgaggtgccaggcttcctcagaaccccgtcatgaactccccggtggtcagcgtggctgtgttccacggacgcaacttcctaaggggaatcctggagtcccccatcagcctagagtttcgcctgctacagacagcgaatcggagcaaggcgatctgtgtgcagtgggacccacctggcctggcggagcagcatggtgtgtggacagcacgggactgcgagctggtgcacaggaatgggtcccacgcacggtgtcgctgcagccggacagggacctttggggtcctcatggatgcctctccccgtgagaggctggagggcgacctggagctgctggctgtgttcacccacgtggtcgtggctgtgtctgtggctgcgctggtgctgactgcagccatcctgctgagcctgcgcagcctcaagtccaatgtgcgtgggatccatgccaatgtggcagccgccctgggggtggcagagctcctcttcctgctggggattcacaggacccacaatcagctggtgtgcactgcagtcgccatcctcctgcactacttcttcctcagcaccttcgcgtggctcttcgtgcaggggctgcacctctaccgcatgcaggttgagccacgcaacgtggaccgcggcgccatgcgcttctaccatgccctgggctggggcgtccctgctgtgctgctgggccttgctgtgggcctggaccctgagggctatgggaaccctgacttctgctggatctcagtccacgagcccctcatctggagctttgctggccctgttgtcctggtcatagtgatgaacgggaccatgtttctcctcgctgcccgcacatcctgctccacagggcagagggaggccaagaagacctctgcactgacccttcgcagctccttcctgctgcttctgctggtcagtgcctcctggctctttgggctcctggcagtcaaccacagcatcctagccttccactacctccatgctggactctgcggcctccagggcctggcggtgctgctgctcttctgtgtcctaaatgcagatgctcgggctgcctggatgccagcctgtctgggcaggaaggcagcgcctgaggaggcaaggccagcacctgggctgggacctggggcctacaacaacacggctctctttgaggagagtggcctcatccgcatcactctgggcgcctccaccgtctcctctgtgagcagtgcccgctccggccggacccaggaccaggacagccagcggggccgcagctacctcagggacaatgtcctggttcgacatggctcagccgctgaccacactgaccacagcctccaggctcatgctggccccactgacctggacgtggccatgttccatcgagatgctggcgcagactccgactctgacagtgacctgtccttggaggaggagaggagtctctccattccatcttcagaaagcgaggacaatggccggacgcgggggcgcttccaacggccactctgccgagcagcccagagtgagaggctcctcacccaccccaaagatgtggatggcaatgacctcctgtcctactggccagccctgggggagtgcgaggcagccccctgtgctctgcagacttggggctctgaaaggcgcctggggctggacaccagcaaggatgcagctaacaacaaccagccagacccggccctgaccagtggggatgagacttctctgggccgggcccagcgccagaggaaaggcatcctgaagaaccggttgcaatacccactggtgccacagacccgaggtgcccctgagctgtcctggtgccgtgcagccaccttgggccaccgtgctgtgccagctgcctcttacggtcgcatctatgctggcgggggcacgggcagcctttcacagccagccagccgctactcttctagagaacagctggacctgctcctccggcggcaactgagccgtgagcgactagaggaagcccctgcccctgttctacgtcccctgagccggccagggtcccaggaatgcatggatgctgcaccaggccgactggagcccaaagatcggggcagcaccctgccacggaggcagccacctcgggactaccctggcgccatggctggccgcttcgggtcacgggatgcgctcgacttaggggcacctcgagagtggttgagcacgctgcctccgccccgccgcacccgggaccttgacccacagcccccacctctgcccctgtctccccagcggcaactctcaagggaccccctcttgccatcccggccgctggactctctgtctaggagctcgaactctcgggagcagctggaccaggtgcctagccggcacccctcacgagaagcccttgggccactcccgcagctgctcagagctagggaggactcggtcagtggccccagccatggcccctccacagaacagttggacattctttcctccatccttgcctctttcaactcctcggccctctcctctgtgcaatcttcaagcacacccttgggccctcacaccactgccacaccttctgccacagcctctgtgcttgggccctccacgccacgttctgccacgtctcacagcatctcggagctgtcgccagactcagaagttcccagaagtgagggtcactcctgaggggatgacggcgtggacgaggaacagctgagggcgacagaggatctaggctaacaggagagactccaggagtgggggcagatcccaaggcagcctcctgctccccagtggtgggtgccccagctctacctggtgtggcagggctgaggctccatgtgcatctgtgagcatgcgtgtgacaggtgcagagacgggggactggagggagacttttatacgttttgtacctttgtaaccagagagatgcttatgttatttttcagcttttctgtctcctggggggtttgaggctgggctgggagggggagggagatagagggagagatgcagtttgaccccatttgggtcctgagcaaaccctatgctcatctctctctccttcctggggtggactcagatgggtgggacacatgccttcctccccctattccacccccaagttgatctgagtatcgtcaggggcccaaagtacagaattgttctttgctttttattgaatgctccaaaggccaaacttctggggctgggggttggtcttggaaacaggggtcctctgacttcctcatgggggcttgctcataccgcccctcctggtggatgtgtgtgtttattatgtggagtccctgccacttactgccttatgacctaggactgatgctgtggggtgctggtggagcagctgatgtcgtgtttacagagcaaggcttccctgtctcccacggggaggggctcgggcctctagtcagacattcctgcagagggtcggtggaggggtcattcacctgcccctgcagcaagcaaaagttgtctgtggtgccatttgattccctgacactgccccctgcttgaattgattccgaagggtagggtgggaaggtgagcaaagggagcagaaacaagggaattcaagacccagaatgtaggtgccactgcctcctatgtttacaggatcctccgtggccctaggcacctgggctgcaggaagtgactccgttccactcctcctttattcccttaaaaagggaaaaatgactgttacgaccctgttcacaaaactcttacttttgctattttgtctgctgtccagaactgaagactttaaaattttgttactgtttacaagtccagattcaaaaaatgtttttactttgtttacaactcaaaactttgagttttacactttgtttacagtagataattttttttcctttgtttccaagtgaaaggtagggaaagtgggagagggacttggaggacccacctgtgaggaccctgacctggccatcttgaggggttttctaacccccaggtctcccaggccgaaggtcagccttgagtcccgtttaacagcagatccagaagaccttgagagtaggcgtcctctaaccacgggggagagtggctgtgcagggctggggggtggtctgtgcagacacctcctcacccaccaccccatgcatactcttgggaagcagcttcctgggagattagaaattctacttccctgactggagctaaatcccaccagccaggacccaaactctccttaccgagaaggaccccagctcttgaagggctgagtggcctgctgggggtgggagggtgtctttactatgtcctaggtttcgtagatgcccctctctggggttcccctcctccagcccagcggccctctttcctgtctgtgtaaattgttccgtgaagccgcgctctgttttgggaataaacttctatagaaaacaaaaaaaaaaaaa

SEQ ID NO: 1434 - DNA, 4431 bp, Homo Sapiens
  NM_001412
gagtcgcggcgccatttgctgccgccgagcgtggacgcaggcggatctctgaagagctgggtcgccagcctctcccgcgcacgttgcctggcctccagcacctacttggtcccgcgcgctccctcgtgtcgcccctcggagcagcagccgccgcggtcgccgctacccggaaagaagtcagagacgccgcgaggtcgccgccaccgccatgcccaagaataaaggtaaaggaggtaaaaacagacgcaggggtaagaatgagaatgaatctgaaaaaagagaactggtattcaaagaggatggtcaggagtatgctcaggtaatcaaaatgttgggaaatggacggctagaagcaatgtgtttcgatggtgtaaagaggttatgtcacatcagaggaaaattgagaaaaaaggtttggataaatacctcggacattattttggttggtctccgagactaccaggataacaaagctgatgtaattttaaaatacaatgcagacgaagctagaagtctgaaggcatacggcgagcttccagagcatgctaaaatcaatgaaactgatacatttggtcctggagatgatgatgaaattcagtttgatgacattggagatgatgatgaagatattgatgacatctaaattgaactcaacattttacattccatcttttctgaagattgtcctacaatttggattttgatcatgacaaagaagattaaaatttcattagcatgaatgcaatttgttaaagcagactgatttgtttctaagatatttttggtttttttaaaactgataataatgctgaattatcttaagtgagatgttaagcccactttgttcttttaatgtaatggagcttatgggtagaagaccatgtctactaattacaaaaaaaaaaaaaaaccatgcattgctgcttttcctaccacttccagtaagaaaatgggtgttttgaagaaatcatttgccttgtcctcacggaatctgattaagccctggcctcttgattgtatagagtcattgtgtatattccagttacctagatattcccttgagattttgatacaatttgagggaggcagaagtctgcagttgaagaaaaaaaataagtctgtttgtcatatttaagtagcctgtggctatttttatactgattttgatatcatgttcttttcatagtcgtattttgccaccgtaaacataaaaaaaaaaaaaaagatttccaaaatgccgttttcagaacctgggttttaatagcagtattgaatttgtaagcttagtagttgcagaaattgaacactaggtggcactcagttatcttaacaggggaagtactgatacaattgttgacttttcttttactatgtgtaagaaataccccaaacatgaaaagattgttttgatcatatgcatgtatgtagaatatttttgcagagcagaaagattatgttagaagtgtgatttttattttcagaagtcatatacatgtaagctacaattttgagtgctttataaacacttaagatatatatataaattttaatttcatagcaacttgtaaaaaataaaatacttgttgaaaagcctttttcaacatatccctaagctaagggaagaggaaggaataacaactcagtgaaaagatggtctccagtttctgaatgaaaaagctacagctgagaaataaaataaaatgtcatgctgcagaatatgttatacccttattttgtgttaaggatatattttattatgtgaatggttttgtttttgttttttgtttttgttttttgcttgtattgggaattagctttactggtaacttccttatttagtttttagtggtcaactctaataaaatgaaactagggctgagctagttagccctcactagccaaactgaaactctatgcaacattaaaagaagagatccatcatgtagcttgtgacacttttattttattagtcaccggggaacttttcagtgatgaaaatacacagggtaataaaccttcacatggcttcaaaaggaaaacaagcaaatcttctctaatctactcttactataatttcctaagtgtacaccaaactctggatttaaaaatctgaagtactatagaacattaagttgaagaatggaaattaagagtacgtattcatggtttatatttcttattctatggagttcgtgaacacatctaggtggaatgcatctgagactaagggctggtttttaatcctcataagaaaccagccttgaagaattaacaattctcttcattggtattctaaacctcctaagatatttaggcttctgtacataaaagtgtttttgctaaatttacagtatatatagatcctttcatattattttactaagaatgtttgaactttgcatatttgatatagttcctggtaggaatagcacagctcaaacattagtttttctacttacctcctctaacacgtggtttgtctggagagtttctaaaaattcagctataaccccagttcatgtatttactggtgattgttcttgctgaggtagtaacagcccaatcttgggctgttaaatcctaggaaatctcgaatcatagtgattaaaatagttggggtaaagttgtagcttatatgcaatactacttggaggaattcttctactaatttgtatttaatgtggaaattgtatagtttcattgatttaatcataaataatggaaatggtctccaagaagttttatttttcatttttttgcttatacactctgattcctataatacagtgctataagctatgcacagaaaataaaatgtttgaaatccaagaataatggttcttactgctaagagggagtaatagttattactaatgattttgattgggttgcatttttgttgcaatgtttattccacttgcagttagaatatgaatatgttttatcactagtgtggctaaataaccaaacatttgtgtaaaaaaaaaaaaaagccaagatttcattgtttgttgaatatttcttaagcatctggcccctaaagagaccgcttcttaccaagcctgtaaactatgcatgatggaaattcttgtattttatttaggaatggctgttggtttactcaccacatctgtggaatcatggctataaatgtttgcttacaaactctttgtgacttgtaatttaacttaatctcatctaatgtaaatattagattatgatgttcagtaacatcttccataggtataaactgctgtcattattgatttcagagtaactctgagtaatcaaataggtaaaagcatgttttgagtaaaatagctagatttatactttacttgtatacagacttaacaacaaccggtattgactggattgacagctaaagtatcagaatgaaagcaaggtttttttgatgttacctgactgtcataaagatgaaaatgatttgtattggtatgaaatgcttatctttattctacttcgtaagggtaagttttatttatactctttggactcccatgaacttttgcacactgctttgtgtttttggtttaccctaaactaccatcctttttatctttgctttttttcttcctattcagaaaagagcaaaatgtgaaaagacacaagactctcaggtatagaatgaactgagcaatttggagaatgtattggactttgtcctctcttattcccccctcctagccctgcaagttgctaggtacttgtgaggcagtgtactggagaggggagagcatggatcctggggtcaaagggcctttgcccccacccttacttggccctctacctgcaggtgaccactggcacattctcctgcttgtctcagcttcaggttcttcacctctaagatggggatgatgaaaacagtacctgtcatgcagaattgttgggaggattgataatttagatgtttatacatgtaatgtacttagatcagtgtctgctcttttcacttgatatccagtactatgtaagatagaaggtgcatgtcttctgtattctgtatttcccatttcttttgcgtgcagtctttgattcgtacaatagaaggaacacgtagaatgtatatttgtacattcatgtcaacatagtatttgaaattgctaccaaactcatttaatttggcataagactaacagatgaagtctctcatttgcttgaagatattttacaaaataccaactgttctatatttctttagaaaaagattatagttattaatattgatacctctgataatattttattcttaaatcttcagtgattccttttactatagattcatgacagctaattagtactaactgatttagaggtttcctttcccatcatatggaatgatgtaaagaaatcagatacaaactactgcaattagaaaataaaatatgaacaactttcaacaatgta

SEQ ID NO: 1435 - DNA, 1886 bp, Homo Sapiens
  NM_001414
aagtgacgcacgaggtgctgtgactcgtgccagccccctaatctgcggaagtggagtgcggggagtgcgccggaagaggggtacggaagtgcgccggaagtggggtgcggaggtgtgcagcgcgctgtcagactggctcgcaggcggcgcggccggcggacccgttcgagacagcgcgggcggctcgggtcccctggggctccgcagcaggaggacgccatggacgacaaggagttaattgaatactttaagtctcagatgaaagaagatcctgacatggcctcagcagtggctgccatccggacgttgctggagttcttgaagagagataaaggggagacaatccagggtctgagggcgaatctcaccagtgccatagaaaccctgtgtggtgtggactcctctgtggcagtgtcctctggcggggagctcttcctccgcttcatcagtcttgcctccctggaatactccgattactccaaatgtaaaaagatcatgattgagcggggagaactttttctcaggagaatatcactgtcaagaaacaaaattgcagatctgtgccatactttcatcaaagatggagcgacaatattgactcacgcctactccagagtggtcctgagagtcctggaagcagccgtggcggccaagaagcgatttagtgtatacgtcacagagtcacagcctgatttgtcaggtaagaaaatggccaaagccctctgccacctcaacgtccctgtcactgtggtgctagatgctgctgtcggctacatcatggagaaagcagatcttgtcatagttggtgctgaaggagttgttgaaaacggaggaattattaacaagattggaaccaaccagatggctgtgtgtgccaaagcacagaacaaacctttctatgtggttgcagaaagtttcaagtttgtccggctctttccactaaaccagcaagacgtcccagataagtttaagtataaggcagacactctcaaggtcgcgcagactggacaagacctcaaagaggagcatccgtgggtcgactacactgccccttccttaatcactctgctgtttacagacctgggcgtgctgacaccctcagcagtcagcgatgagctcatcaagctctatctgtaacctgtgagccctttcctgccaaggtgcagcttacgtagttgaggcagggtgagtagctgcttgacaccccagtgagtcaggccaaaactgagatgtgtttaatgaagatttatggagtaaggacttaaaatcatacatcttggagaacctttcttactcatttcagtcccatctaaaaatgtgtcagctattctaaatcccaacttaaattgttcttacggtttctagaaactttccttttcagtttccagaaatacaagttagataattggctacttaactgatgaaagatgagcccaagtccacctgtcttcatcctcccctgcactccagactgatctgcctaaagcacgcgagatgcaggcgaaaagcagccacacccctctgccacaaatgaccaacagctggtcaggacgttacacgcggtgccttgtaagaggcaagaaacacttgccgaatctgcatctggcttccagtggtaagcacattcctcagcaggatcaagccaaacagtaaaaactaccaagagaacacgaggaaggcagaaacgatgtttagcaacagtattctgcatggttcactgcttaagaaaatgccttctggaatatttgtaaactgaaattctgtatgtgtaagagatgtttaaatatgtttgggtcctaaacagctttttaaaattatacttgggaataaattcagcatcttttcaaataaactctatgaaagacgctgaaaaaaaaaaaaaaaaa

SEQ ID NO: 1436 - DNA, 3486 bp, Homo Sapiens
  NM_001415
tttccttcctcttttggcaacatggcgggcggagaagctggagtgactctagggcagccgcatctttcgcgtcaggatctcaccaccttggatgttaccaagttgacgccactttcacacgaagttatcagcagacaagccacaattaacataggtacaattggtcatgtagctcatgggaaatccacagtcgtcaaagctatttctggagttcatactgtcaggttcaaaaatgaactagaaagaaatattacaatcaagcttggatatgctaatgctaagatttataagcttgatgacccaagttgccctcggccagaatgttatagatcttgtgggagcagtacacctgacgagtttcctacggacattccagggaccaaagggaacttcaaattagtcagacatgtttcctttgttgactgtcctggccacgatattttgatggctactatgctgaacggtgcagcagtgatggatgcagctcttctgttgatagctggtaatgaatcttgccctcagcctcagacatcggaacacctggctgctatagagatcatgaaactgaagcatattttgattctacaaaataaaattgatttggtaaaagaaagtcaggctaaagaacaatacgagcagatccttgcatttgtccaaggtacagtagcagagggagctcccattattccaatttcagctcagctgaaatacaatattgaagttgtttgtgagtacatagtaaagaaaattccagtacccccaagagactttacttcagagccccggcttattgttattagatcttttgatgtcaacaaacctggctgtgaagttgatgaccttaagggaggtgtagctggtggtagtatcctaaaaggagtattaaaggtgggccaggagatagaagtaagacctggtattgtttccaaagatagtgaaggaaaactcatgtgtaaaccaatcttttccaaaattgtatcactttttgcggagcataatgatctgcaatatgctgctccaggcggtcttattggagttggaacaaaaattgaccccactttgtgccgggctgacagaatggtggggcaagtacttggtgcagtcggagctttacctgagatattcacagaattggaaatttcctatttcctgcttagacggcttctaggtgtacgcactgaaggagacaagaaagcagcaaaggttcaaaagctgtctaagaatgaagtgctcatggtgaacataggatccctgtcaacaggagggagagttagtgctgtcaaggccgatttgggtaaaattgttttgaccaatccagtgtgcacagaggtaggagaaaaaattgcccttagccgaagagttgaaaaacactggcgtttaattggttggggtcagataagaagaggagtgacaatcaagccaacagtagatgatgactgaagaataccagttaaataatacattcggatggatttggaagttggaattcctcttaacaaccaaggggtttattttcaaagcaatattggggaattgatttcacagttcgttaccttagtaggtaacggtaaggttattctctttttttttttttttttttttggttatgaaaacttagggactaaaattaatataaaaattggcataatgttggattgaatctacattttggcagaagttaaacattcccacataatgtcaaaattatacatcatgcagttctgtttttttgtttgttttattttgttttgtttttgagtctggctctgtcacccaggctggagtgcagtggcgtgatctgcaacctctgccccccgggttcaagcgattctcctgcctcagcctcccgagtagctgagattacaggtgcgcgccaccacacttggctaatttttgtattattagtagagacggggtttcagcatgttggctaggccggtctctcctgacctcagggtgatcagcccacctcggcctcacaaagtgctgggattacaggcgtgagccaccttgcccagcccacatcatacagtttgaaatgaaactttgccacaaccagcctttgctgtagcacacacatatatcactgaacctgtttgaaataaagttttttttctttttcatgattcgtctttgagtacctccaggctgaaagactgttgtaccagtaaaaacttaaaggcacaaattctccttgaagaccttctcccttttatgtggccccatattttatgttgctttatctttgaaattttgcatgaaaaggaaatgaatggattcgaatgaaattgtcctttagagcatgattacttgttcccatggacaaatatttttctccccttgctcttcctggcctgaaacacgggaaaccagagtcaaaagttatctccctctccctgtgatgccttgagatttttttctgcgttgtttaatgcctgaaatccaagtcttcctccatgggaaaatactgttataccaaataattctagatgagtaacaaagatctttttaggccttcattttatgttttttcttaactgttatattatgattgtgacatagattatactactactaatttttggatgtttcaaaaggtcaagaagtaaaagatgttagaaagcaatgagtgagtccttttgatttttaacttattccccatgtccctatacttcgtgtgcttttcctttttttttttgagacggaggctcactccgtcacctaggctagagtacagtggcacgatcttggctcgctgcaacctctgcctccctgattcaagtgattctcgtgcttcagcctcccatgtagctgatattacaggcacttgccaccatacccggctaatttttgtatttttagtagagatggggtttcaccatgttgcccaggctggtcttgaactcctaacctcaggtgatccgcccgcctctgccttccaaagtgctgggattacaggcgtgagccactctgcccggcttatttttctttatgtttttgcttcgtaagaggttctgttgagcagtgatttgcaactcttgctgacgttgctggggaagctttaaaaaaaaaaaagatgccccacagagattctgattttaattgttctgatttaattggcttggagtagaattcaggcattgatatctttaaaaactccccagtgttgagaaacaaatttagagagttgagaagtaggtatattaaattacagaatcttactgagttttggtagactgataatacaatttgctttgcttttcttaaatttgcattgagatgggatttgaagcatattgtgctcttgtgaatgttgaagttgcattgtagaagtttagaagctctggctatgggttgcctaaattgatgttttgaggaagcatattaatgttataaacttcgctgactttgaaggttgtgttgtagcatgaggaacacaaataaaacaattctaaatcaaactaaaaaaaaaaaaaaaaaaaaaaa

SEQ ID NO: 1437 - DNA, 1844 bp, Homo Sapiens
  NM_001416
gcaggcggggccggggcggccaaaccaatgcgatggccggggcggagtcgggcgctctataagttgtcgataggcgggcactccgccctagtttctaaggatcatgtctgcgagccaggattcccgatccagagacaatggccccgatgggatggagcccgaaggcgtcatcgagagtaactggaatgagattgttgacagctttgatgacatgaacctctcggagtcccttctccgtggcatctacgcgtatggttttgagaagccctctgccatccagcagcgagccattctaccttgtatcaagggttatgatgtgattgctcaagcccaatctgggactgggaaaacggccacatttgccatatcgattctgcagcagattgaattagatctaaaagccacccaggccttggtcctagcacccactcgagaattggctcagcagatacagaaggtggtcatggcactaggagactacatgggcgcctcctgtcacgcctgtatcgggggcaccaacgtgcgtgctgaggtgcagaaactgcagatggaagctccccacatcatcgtgggtacccctggccgtgtgtttgatatgcttaaccggagatacctgtcccccaaatacatcaagatgtttgtactggatgaagctgacgaaatgttaagccgtggattcaaggaccagatctatgacatattccaaaagctcaacagcaacacccaggtagttttgctgtcagccacaatgccttctgatgtgcttgaggtgaccaagaagttcatgagggaccccattcggattcttgtcaagaaggaagagttgaccctggagggtatccgccagttctacatcaacgtggaacgagaggagtggaagctggacacactatgtgacttgtatgaaaccctgaccatcacccaggcagtcatcttcatcaacacccggaggaaggtggactggctcaccgagaagatgcatgctcgagatttcactgtatccgccatgcatggagatatggaccaaaaggaacgagacgtgattatgagggagtttcgttctggctctagcagagttttgattaccactgacctgctggccagaggcattgatgtgcagcaggtttctttagtcatcaactatgaccttcccaccaacagggaaaactatatccacagaatcggtcgaggtggacggtttggccgtaaaggtgtggctattaacatggtgacagaagaagacaagaggactcttcgagacattgagaccttctacaacacctccattgaggaaatgcccctcaatgttgctgacctcatctgaggggctgtcctgccacccagccccagccagggctcaatctctgggggctgaggagcagcaggaggggggagggaagggagccaagggatggacatcttgtcattttttttctttgaataaatgtcactttttgaggcaaaagaaggaaccgtgaacattttagacacccttttctttggggtaggctcttgccccaggcgccggctcttctcccaaaaaaaaaaaaaaaacactaatccatttccctaacctagtaacctccagatcccagaggctctcctcacctcagctgagctcctttgaaagtgattcaagggactatgtcactcagcctcatttgctggaccaaatctggagggagaacccctaaaacccctaagtgaggttgcccagggggttgtccccaggtggggggaagcaggggagagaaaatggtagccatttttacattgttttgtatagtatttattgattcaggaaacaaacacaaaattctgaataaaatgacttggaaactgcc

SEQ ID NO: 1438 - DNA, 4041 bp, Homo Sapiens
  NM_001417
ggccacatgtcgcgcatgtcttcccgtcggacggcgtgccacctcgccgcgcagctttacgaacctagagcagcgccgccccgcctcctgtctccgtcctcacctccccgccccctcccagcttcgcgtctcctagctcgacgcgcccgctataatcacgtgattgcctcatccgggtcttttgcgttctctttccctctcccaacatggcggcctcagcaaaaaagaagaataagaaggggaagactatctccctaacagactttctggctgaggatgggggtactggtggaggaagcacctatgtttccaaaccagtcagctgggctgatgaaacggatgacctggaaggagatgtttcgaccacttggcacagtaacgatgacgatgtgtatagggcgcctccaattgaccgttccatccttcccactgctccacgggctgctcgggaacccaatatcgaccggagccgtcttcccaaatcgccaccctacactgcttttctaggaaacctaccctatgatgttacagaagagtcaattaaggaattctttcgaggattaaatatcagtgcagtgcgtttaccacgtgaacccagcaatccagagaggttgaaaggttttggttatgctgaatttgaggacctggattccctgctcagtgccctgagtctcaatgaagagtctctaggtaacaggagaattcgagtggacgttgctgatcaagcacaggataaagacagggatgatcgttcttttggccgtgatagaaatcgggattctgacaaaacagatacagactggagggctcgtcctgctacagacagctttgatgactacccacctagaagaggtgatgatagctttggagacaagtatcgagatcgttatgattcagaccggtatcgggatgggtatcgggatgggtatcgggatggcccacgccgggatatggatcgatatggtggccgggatcgctatgatgaccgaggcagcagagactatgatagaggctatgattcccggataggcagtggcagaagagcatttggcagtgggtatcgcagggatgatgactacagaggaggcggggaccgctatgaagaccgatatgacagacgggatgatcggtcgtggagctccagagatgattactctcgggatgattataggcgtgatgatagaggtcccccccaaagacccaaactgaatctaaagcctcggagtactcctaaggaagatgattcctctgctagtacctcccagtccactcgagctgcttctatctttggaggggcaaagcctgttgacacagctgctagagaaagagaagtagaagaacggctacagaaggaacaagagaagttgcagcgtcagctggatgagccaaaactagaacgacggcctcgggagagacacccaagctggcgaagtgaagaaactcaggaacgggaacggtcgaggacaggaagtgagtcatcacaaactgggacctccaccacatctagcagaaatgcacgaaggagagagagtgagaagtctctagaaaatgaaacactcaataaggaggaagattgccactctccaacttctaaacctcccaaacctgatcagcccctaaaggtaatgccagcccctccaccaaaggagaatgcttgggtgaagcgaagttctaaccctcctgctcgatctcagagctcagacacagagcagcagtcccctacaagtggtgggggaaaagtagctccagctcaaccatctgaggaaggaccaggaaggaaagatgaaaataaagtagatgggatgaatgccccaaaaggccaaactgggaactctagccgtggtccaggagacggagggaacagagaccactggaaggagtcagataggaaagatggcaaaaaggatcaagactccagatctgcacctgagccaaagaaacctgaggaaaatccagcttccaagttcagttctgcaagcaagtatgctgctctctctgttgatggtgaagatgaaaatgagggagaagattatgccgaatagacctctacatcctgtgcttttctcctagtttctctccaccctggaacattcgagagcaaatcaaaacctctatccagacaagacaaaataaaactcaccatctcctgaagacctttcttacctttttttaaaaacaaaaaatgaaattattttgcatgctgctgcagcctttaaagtattgaagtaactggagaattgccaatacagccagagagaaagggactacagctttttagaggaaaagttgtggtgcgttatgtcaccatgcagttgccagtgtgattagtgcctaggggtctccatttagcagaaatggtaatgacagtgatataatgcctggaacctggttgggcagtaggggagggaggtagaaggaaaagtgtgagatttctaccttttagtttttatcctattgtggcatatatgaattctcaaacattatctgaataaattttccactcttggaaaggtagatttagcctcaagttgttctagtctccaggaggctgccagcccctcctcttatttaattctgagttttgggggccagcctagagggaattccttttttttttttaaccccccaggggggtagttgggagtgagactataggccataaagaatgggactgcattggaccaaaataaatgggaaaatcgtggtttgaaaagaagcttttgggaagtgatgagtcattttgcaccaggtaataggggaaaattgtgtgacctccagcaaacacatgaatggttatttcctggagccggaagcacttgggggtcgtggtaattcccagtgttttctgtgtcctagttttaccctttctaaacactgtcctttttgaaagttttgaatatatccacattctattgaaaccttgaaactaaaaatttagactcttatcatcatcttaagttcttcatgctactcttaacctcccaaaaagcagtatctaagtcacatacatgatgtcttgggcattttctcagccatggagaactctgaaaggaagaatcgctgcttttctcaagcaaatcggtttcttgatgtcttttggttctccttgcctgctcctgatgcttggaccccttttattgatcagagtgctctagaataatggatggtcttggatgatggataaatagggacagggacagttaaattgggagcctttcttacaaccttgatgggatttttccccccaagtttccttctccactgaaatgccacactaatgcttgttggattcatgaggtggccagaccaatgtgttgttttgttgttgtttttttaagcttcccttgagagaataaatggtaatggagagaactatttaacaaggtcctggtttctcttgcaacacagtagctaaacttgcctgcttttatatgcatttttgtagggatcagcttggtagacagtattagcggagaaacaccttgatcttggtttgcaagcccttctcccatcagtcctagattaggccctgttcagccatgcaggggtgttggtttatgcgtgctgcagcagtgggcataatgaatataatttacccagtggacaaaggtgtgtaccaagtgaatttaaataattggtgtggattggccagtagctaagaagtgggcttttaaagagtattgaagattgaaagggtttttctttcttttttaaaaaagaaaaacaaactattgattgtagataatgaaaagctagggtttgccctcttcatgtctactctccttccaaatagttatatccaaaactgtttttccctctcccctaccttgtcccccctattaaaatagaaacagggattgattaatgtcccgctcctgaatacatgtaaaatttgtacaaaaatatcttctatgaaaatgatttgtaatctgtagacttattacctgggagatgtcttgatgtaaaatcccatcctttgggttgtgggttttttgttttctccaaataaatctgatctttaaagttcaaaaaaaaaaaaaa

SEQ ID NO: 1439 - DNA, 6075 bp, Homo Sapiens
  NM_001419
ggtcgtgcgcgctgaggaggagccgctgccgccgtcgccgtcgccgccaccgccgccaccgctaccgaggccgagcggagccgttagcgccgcgccgccgccgcctcccgcccgccccggagcagccccgggcccgcccgcccgcatccagatttttgaaaaatacaatgtctaatggttatgaagaccacatggccgaagactgcaggggtgacatcgggagaacgaatttgatcgtcaactacctccctcagaacatgacccaggatgagttacgaagcctgttcagcagcattggtgaagttgaatctgcaaaacttattcgggataaagtagcaggacacagcttgggctatggctttgtgaactacgtgaccgcgaaggatgcagagagagcgatcaacacgctgaacggcttgaggctccagtcaaaaaccattaaggtgtcgtatgctcgcccgagctcagaggtgatcaaagacgccaacttgtacatcagcgggctcccgcggaccatgacccagaaggacgtagaagacatgttctctcggtttgggcggatcatcaactcgcgggtcctcgtggatcagactacaggtttgtccagaggggttgcgtttatccggtttgacaaacggtcggaggcagaagaggcaattaccagtttcaatggtcataaacccccaggttcctctgagcccatcacagtgaagtttgcagccaaccccaaccagaacaaaaacgtggcactcctctcgcagctgtaccactcgccagcgcgacggttcggaggccccgttcaccaccaggcgcagagattcaggttctcccccatgggcgtcgatcacatgagcgggctctctggcgtcaacgtgccaggaaacgcctcctccggctggtgcattttcatctacaacctggggcaggatgccgacgaggggatcctctggcagatgtttgggccgtttggtgccgtcaccaatgtgaaagtgatccgcgacttcaacaccaacaagtgcaaagggtttggctttgtgaccatgacaaactatgaagaagccgcgatggccatagccagcctgaacggctaccgcctgggggacaaaatcttacaggtttccttcaaaaccaacaagtcccacaaataactcgctcatgcttttttttgtacggaatagataattaagagtgaaggagttgaaacttttcttgttagtgtacaactcattttgcgccaattttcacaagtgtttgtctttgtctgaatgagaagtgagaaggtttttatactctgggatgcaaccgacatgttcaaatgtttgaaatcccacaatgttagaccaatcttaagtttcgtaagttatttcctttaagatatatattaaacagaaatctaagtagaactgcattgactaaccagtccctctggatggtggtgaacctgaagcatgctttaacctctaagactgtctaacacgcgtttcattcaatgtctccacagactgggtagcaaaaaaatcaccttttagttttagtttttaatctaaagatgttagacagatgctgagtgtgcgttttctcaaccgcttcaacattgtaagcgatgtatgctttggttgacaggaagttccttttccaggcaggtcccgttgccacctcctgctcactcagtcccgggctctgccgagtggtcctgggaatggcggcgggcccgtccagcgtgggccaccactggggccgggggccacgggctgcatgctgggcgggccctccagagaaggacacaaacgtgtttcgtaagcccaggcaccaatgggaatggaccaaagagtttcagggaaactccagtatattccagagtcagatctaagctccaggcacgcctgaagatgtgttgctactctgacatcccgagtttctgtccacacattgcatgcacagcgccccacacattggatactgttgttcacgataatttctcccgttttccagagcatttaacatagcttggaggcgtaaaatggctctgtattttaataacacagaaacatttgagcattgtatttctcgcatcccttctcgtgagcgcttagacctttttctattttagtcggattttgttttggaattttgcttttgtatgaacactcagcagaaaagtacttacttcttgccagttatctattaaccaaaacctttgatttgtagttttaaagattaaccctcaaagttctcttcataactgccttgacattttgggttgttctgttctgttaattttcttttgcttttttgtgttttttgtttgtttttacttttgcatttaagaccattaaatttgattttgttttgctcgaattttgttttgttttttattttaccttttctttctttttggctagggaaggtgcaggtggcccagcattcagggaggagtcgtaagatcttaagaaaccaatccttgcctcaagcaaaagcatttctgaatctgtgacgcaagaatgtgcagttacaggctggtggcttttaaaccaggagcccggaggaagggtgaaagagaaagcctgtgaaataggcagggccagatcacccaaaactcctcaggactgggatctggcgtttataaataactagtttacagagagaatcacaaacaggataacttagtaccagcagtttttaaccttgacgtgagactaaaacgtgaccgtaggctgttttttagttattgctctcatgagatgatggctgtatttatctgtttatttatacctatttatgtatttatttattgaagtgtgaaattgagcaataggcaggcaccaccgtccccagagcaggtcagcgtctcgagaggcccctggacaattgaggatgcccatcccctcccctttccctgatcttttactgaggggctgtgtgcgcgatccttgcaaattgatgatgttgccatccgtacccaggctgtgtctcataaaagtcggcctggtgccagagaggacctcctttctcccacagaatcccagatcctcaggaaaagccaaaaccgaggcccattgcccggattcgacacaaaagagggtccctgctctgttgcccgagagcagtctgcatcctgggaccagaatgctttcctggaaaaagaagcctttcaggtttccctgggccagcatcttctgatggaaggtgggagccaacacccttctgatggaaggtgggagccaacacccttctgatggaaggtgggagccaacacccttctgatggaaggtgggagccaacacccttctgatggaaggtgggagccaacacccttctgatggaaggcgggattcccgcttctgaaactccccctggagtctcactcccacacatgcccatagctagcattcaacagagaactctgtcttaagcttcaactgtgaaaatgatgacgggcttgtagcacctcagcttctttcctcgcccccttttatctgaatcctatcaattattctgatgctgggacaggtgagaagaaactgtgaagtatatgagcctttgaaagttccctgaagtttctcagttcaggaacattctcattgtatgtggtctccgctgtttgaacagccttctagctaaaaaattccaaagcctttatttgggagtcttagcttgcaagcttgtggaaggatttagcttaacaactgtcactcctgaaaagcaatctctgttccatcaaggttctagttgctggccctgtgtcctcaaagttcattacatcttatcaaggcctgtttgcaaaggggagatcccttttcttaaaaaaggctcaacccaaaagaaaccatttcttaaaaaattttacatagatcagttgtatttctatttagcaaaaatgagtgctctgcttttatttgggaatttcgatgaaaaagcgttcagagtagataatgttcatttatcaaaaatctggtttgggaaataccaaagaggctttgattgaattcccttttgacccgtgtgtaacttcctctggtagttagaccccaggcagctccgaatttgtgaacctgcttcctgatgaattctcccttgttcccccttggctctgccattatttcgttttcagtgtaatttgccaagccgcagttttctgtgctggctgtgcctctagtcgcagctctgtgactgattccctcccgggtgctgagtcccctccccggccaccatcctgcgtgaatatcctgaaattcatgggcttcctcgggggcccgcccgcaggtggtgctgggtgggttccgccaccttctcctggaaggtgagccttttcctggccaagggcagctgccttaacctctgagagtctgcgcttggccttagtcctggagacccagcctccagggactgaaccgtgctgctgttgggagccaagaccggccctttggagccggcagcccaggggtccctgctggatcagagaaatagaagcacccgaagacggttagtggcaattccttgacccggtttgcttccaaatgaaggccatttgtccaccaggcattgaaaagacatgacttacccagtccggcatcggacttgaaaaatcgaaattgacatcactcagctgttacatttcacatccgattcagcccccttttatttccatgtgcttttcgcagccttcctgtgttggatgaaagagaataagaattcagctgacaggaggcctctatcctgtccctccaccccaccctccacctcaatcccctcccatcttccccagacctacctcacctactaggacctgaggcagctccttagcagagacccctggggtttagctgactctgggggtcaggggttcctgtccccaaacttcgcaagacagccctgaagtcacaagtgctttcttttaagtggcattggcaattggcgtgtaatgatggcagtagaatctgaatctcggatcccaggcagggttcacatttccaaacctttttgatttcccctgacctctaatggctggatcctatttttctacaacctttcagtgacatcgttcaggtttctttcttggccatttaaaaaaacaaattttttttttctcacttgtaagtcaccgccagtacctaagttaggctaacggagactttgacaggactggatttttcttccaccagaagagaagccttttccgttggtttggggccacctctttgaccatgaccatgtgatgttccgtttacagtgacttgctttgggggaggggaggctctcttaaccgattcccatgttgtacagtagatggttagaccttttgtatattagtgtgttttaagttattgatttgttttatataaaataatttatttttcaggtgccatttttcattttaactttgtttttacatgggtttgttttcaataaagtctgacactggtgtccaaaagtcaacaataaaatgaatcccattgtgttcttttgaagatgcctatgtaacttttaagctttttaaattattttcagaaaaaaaaaaagaaaagcccttatcagttttccatcagcccattgcctttttattttttttttttaatccttgtgaataaatgttctttagtgttttaggaggaaaaagcaaacctagattttgataacccagaagacttcagattaataaagaagctttgaaagaagaccatttttcaaaattttagtgaagtgtgaatattttttgtcaatggctttctcaaagagaatgaaacttttgcaccattttcagagtttttatagagatgccaaattgatatatttacatgtaatggaaacatgaaaaagttttattaaacaattgttcatagctgtgtagacattttaattcagtttccaaagctctcaaaaaatcgtatttttgaagtacggagtgatgcggtttggggcgtggcttacagttccaacgactcaattgtcccgatactcagttctttctacaggtatcaggttcgtgttaaacgctgtatgttaactatgactggaattctgtgatattttggtaataaatgaagtgggatcattgcgaaaaaaaaaaaaaaaaaa

SEQ ID NO: 1440 - DNA, 850 bp, Homo Sapiens
  NM_001425
cgggagcaagagagaaggaggcccagacagtgagggcaggagggagagaagagacgcagaaggagagcgagcgagagagaaagggttctggattggaggggagagcaagggagggaggaaggcggtgagagaggcgggggcctcgggagggtgaaaggagggaggagaagggcggggcacggaggcccgagcgagggacaagactccgactccagctctgacttttttcgcggctctcggcttccactgcagccatgtcactcctcttgctggtggtctcagcccttcacatcctcattcttatactgcttttcgtggccactttggacaagtcctggtggactctccctgggaaagagtccctgaatctctggtacgactgcacgtggaacaacgacaccaaaacatgggcctgcagtaatgtcagcgagaatggctggctgaaggcggtgcaggtcctcatggtgctctccctcattctctgctgtctctccttcatcctgttcatgttccagctctacaccatgcgacgaggaggtctcttctatgccaccggcctctgccagctttgcaccagcgtggcggtgtttactggcgccttgatctatgccattcacgccgaggagatcctggagaagcacccgcgagggggcagcttcggatactgcttcgccctggcctgggtggccttccccctcgccctggtcagcggcatcatctacatccacctacggaagcgggagtgagcgccccgcctcgctcggctgcccccgccccttcccggcccccctcgccgcgcgtcctccaaaaaataaaaccttaaccgcggaaaaaaaaaaaaaaaaaaaaa

SEQ ID NO: 1441 - DNA, 2204 bp, Homo Sapiens
  NM_001428
gtggggccccagagcgacgctgagtgcgtgcgggactcggagtacgtgacggagccccgagctctcatgcccgccacgccgccccgggccatcccccggagccccggctccgcacaccccagttcggctcaccggtcctatctggggccagagtttcgcccgcaccactacagggccgctggggagtcggggccccccagatctgcccgcctcaagtccgcgggacgtcacccccctttccacgctactgcagccgtcgcagtcccacccctttccgggaggtgagggaatgagtgacggctctcccgacgaatggcgaggcggagctgagggggcgtgccccggaggcgggaagtgggtggggctcgccttagctaggcaggaagtcggcgcgggcggcgcggacagtatctgtgggtacccggagcacggagatctcgccggctttacgttcacctcggtgtctgcagcaccctccgcttcctctcctaggcgacgagacccagtggctagaagttcaccatgtctattctcaagatccatgccagggagatctttgactctcgcgggaatcccactgttgaggttgatctcttcacctcaaaaggtctcttcagagctgctgtgcccagtggtgcttcaactggtatctatgaggccctagagctccgggacaatgataagactcgctatatggggaagggtgtctcaaaggctgttgagcacatcaataaaactattgcgcctgccctggttagcaagaaactgaacgtcacagaacaagagaagattgacaaactgatgatcgagatggatggaacagaaaataaatctaagtttggtgcgaacgccattctgggggtgtcccttgccgtctgcaaagctggtgccgttgagaagggggtccccctgtaccgccacatcgctgacttggctggcaactctgaagtcatcctgccagtcccggcgttcaatgtcatcaatggcggttctcatgctggcaacaagctggccatgcaggagttcatgatcctcccagtcggtgcagcaaacttcagggaagccatgcgcattggagcagaggtttaccacaacctgaagaatgtcatcaaggagaaatatgggaaagatgccaccaatgtgggggatgaaggcgggtttgctcccaacatcctggagaataaagaaggcctggagctgctgaagactgctattgggaaagctggctacactgataaggtggtcatcggcatggacgtagcggcctccgagttcttcaggtctgggaagtatgacctggacttcaagtctcccgatgaccccagcaggtacatctcgcctgaccagctggctgacctgtacaagtccttcatcaaggactacccagtggtgtctatcgaagatccctttgaccaggatgactggggagcttggcagaagttcacagccagtgcaggaatccaggtagtgggggatgatctcacagtgaccaacccaaagaggatcgccaaggccgtgaacgagaagtcctgcaactgcctcctgctcaaagtcaaccagattggctccgtgaccgagtctcttcaggcgtgcaagctggcccaggccaatggttggggcgtcatggtgtctcatcgttcgggggagactgaagataccttcatcgctgacctggttgtggggctgtgcactgggcagatcaagactggtgccccttgccgatctgagcgcttggccaagtacaaccagctcctcagaattgaagaggagctgggcagcaaggctaagtttgccggcaggaacttcagaaaccccttggccaagtaagctgtgggcaggcaagcccttcggtcacctgttggctacacagacccctcccctcgtgtcagctcaggcagctcgaggcccccgaccaacacttgcaggggtccctgctagttagcgccccaccgccgtggagttcgtaccgcttccttagaacttctacagaagccaagctccctggagccctgttggcagctctagctttgcagtcgtgtaattggcccaagtcattgtttttctcgcctcactttccaccaagtgtctagagtcatgtgagcctcgtgtcatctccggggtggccacaggctagatccccggtggttttgtgctcaaaataaaaagcctcagtgacccatgagaataaaaaaaaaaaaaaaaaa

SEQ ID NO: 1442 - DNA, 5184 bp, Homo Sapiens
  NM_001430
gctttacactcgcgagcggaccgccacacgggtccggtgcccgctgcgcttccgccccagcgctcctgaggcggccgtacaatcctcggcagtgtcctgagactgtatggtcagctcagcccggcctccgactccttccgactcccagcattcgagccacttttttttttctttgaaaactcagaaaagtgactccttttccagggaaaaaggaacttgggttcccttctctccgtcctcttttcgggtctgacagcctccacccactccttccccggaccccgcctccgcgcgcaggttcctcccagtcacctttctccacccccgcccccgcacctagcccgccgcgcgccaccttccacctgactgcgcggggcgctcgggacctgcgcgcacctcggaccttcaccacccgcccgggccgcggggagcggacgagggccacagccccccacccgccagggagcccaggtgctcggcgtctgaacgtctcaaagggccacagcgacaatgacagctgacaaggagaagaaaaggagtagctcggagaggaggaaggagaagtcccgggatgctgcgcggtgccggcggagcaaggagacggaggtgttctatgagctggcccatgagctgcctctgccccacagtgtgagctcccatctggacaaggcctccatcatgcgactggcaatcagcttcctgcgaacacacaagctcctctcctcagtttgctctgaaaacgagtccgaagccgaagctgaccagcagatggacaacttgtacctgaaagccttggagggtttcattgccgtggtgacccaagatggcgacatgatctttctgtcagaaaacatcagcaagttcatgggacttacacaggtggagctaacaggacatagtatctttgacttcactcatccctgcgaccatgaggagattcgtgagaacctgagtctcaaaaatggctctggttttgggaaaaaaagcaaagacatgtccacagagcgggacttcttcatgaggatgaagtgcacggtcaccaacagaggccgtactgtcaacctcaagtcagccacctggaaggtcttgcactgcacgggccaggtgaaagtctacaacaactgccctcctcacaatagtctgtgtggctacaaggagcccctgctgtcctgcctcatcatcatgtgtgaaccaatccagcacccatcccacatggacatccccctggatagcaagaccttcctgagccgccacagcatggacatgaagttcacctactgtgatgacagaatcacagaactgattggttaccaccctgaggagctgcttggccgctcagcctatgaattctaccatgcgctagactccgagaacatgaccaagagtcaccagaacttgtgcaccaagggtcaggtagtaagtggccagtaccggatgctcgcaaagcatgggggctacgtgtggctggagacccaggggacggtcatctacaaccctcgcaacctgcagccccagtgcatcatgtgtgtcaactacgtcctgagtgagattgagaagaatgacgtggtgttctccatggaccagactgaatccctgttcaagccccacctgatggccatgaacagcatctttgatagcagtggcaagggggctgtgtctgagaagagtaacttcctattcaccaagctaaaggaggagcccgaggagctggcccagctggctcccaccccaggagacgccatcatctctctggatttcgggaatcagaacttcgaggagtcctcagcctatggcaaggccatcctgcccccgagccagccatgggccacggagttgaggagccacagcacccagagcgaggctgggagcctgcctgccttcaccgtgccccaggcagctgccccgggcagcaccacccccagtgccaccagcagcagcagcagctgctccacgcccaatagccctgaagactattacacatctttggataacgacctgaagattgaagtgattgagaagctcttcgccatggacacagaggccaaggaccaatgcagtacccagacggatttcaatgagctggacttggagacactggcaccctatatccccatggacggggaagacttccagctaagccccatctgccccgaggagcggctcttggcggagaacccacagtccaccccccagcactgcttcagtgccatgacaaacatcttccagccactggcccctgtagccccgcacagtcccttcctcctggacaagtttcagcagcagctggagagcaagaagacagagcccgagcaccggcccatgtcctccatcttctttgatgccggaagcaaagcatccctgccaccgtgctgtggccaggccagcacccctctctcttccatggggggcagatccaatacccagtggcccccagatccaccattacattttgggcccacaaagtgggccgtcggggatcagcgcacagagttcttgggagcagcgccgttggggccccctgtctctccaccccatgtctccaccttcaagacaaggtctgcaaagggttttggggctcgaggcccagacgtgctgagtccggccatggtagccctctccaacaagctgaagctgaagcgacagctggagtatgaagagcaagccttccaggacctgagcgggggggacccacctggtggcagcacctcacatttgatgtggaaacggatgaagaacctcaggggtgggagctgccctttgatgccggacaagccactgagcgcaaatgtacccaatgataagttcacccaaaaccccatgaggggcctgggccatcccctgagacatctgccgctgccacagcctccatctgccatcagtcccggggagaacagcaagagcaggttccccccacagtgctacgccacccagtaccaggactacagcctgtcgtcagcccacaaggtgtcaggcatggcaagccggctgctcgggccctcatttgagtcctacctgctgcccgaactgaccagatatgactgtgaggtgaacgtgcccgtgctgggaagctccacgctcctgcaaggaggggacctcctcagagccctggaccaggccacctgagccaggccttctacctgggcagcacctctgccgacgccgtcccaccagcttcactctctccgtctgtttttgcaactaggtatttctaacgccagcacactatttacaagatggacttacctggcagacttgcccaggtcaccaagcagtggcctttttctgagatgctcactttattatccctatttttaaagtacacaattgttttacctgttctgaaatgttcttaaattttgtaggatttttttcctccccaccttcaatgacttctaatttatattatccataggtttctctccctccttctccttctcacacacaactgtccatactaacaagtttggtgcatgtctgttcttctgtagggagaagctttagcttcattttactaaaaagattcctcgttattgttgttgccaaagagaaacaaaaatgattttgctttccaagcttggtttgtggcgtctccctcgcagagcccttctcgtttcttttttaaactaatcaccatattgtaaatttcagggtttttttttttttgtttaagctgactctttgctctaattttggaaaaaaagaaatgtgaagggtcaactccaacgtatgtggttatctgtgaaagttgcacagcgtggcttttcctaaactggtgtttttcccccgcatttggtggattttttattattattcaaaaacataactgagttttttaaaagaggagaaaatttatatctgggttaagtgtttatcatatatatgggtactttgtaatatctaaaaacttagaaacggaaatggaatcctgctcacaaaatcactttaagatcttttcgaagctgttaatttttcttagtgttgtggacactgcagacttgtccagtgctcccacggcctgtacggacactgtggaaggcctccctctgtcggctttttgccatctgtgatatgccataggtgtgacaatccgagcagtggagtcattcagcgggagcactgcgcgctatcccctcacattctctatgtactatgtatgtatgtattattattattgctgccaagagggtctgatggcacgttgtggggtcggggggtggggcggggaagtgctctaacttttcttaaggttttgttgctagcccttcaagtgcactgagctatgtgactcggatggtctttcacacggcacatttggacatttccagaactaccatgagatggtttagacgggaattcatgcaaatgaggggtcaaaaatggtatagtgaccccgtccacgtcctccaagctcacgaccttggagccccgtggagctggactgaggaggaggctgcacagcgggagagcagctggtccagaccagccctgcagcccccactcagccggcagccagatggccccgcaaggcctccagggatggcccctagccacaggccctggctgaggtctctgggtcggtcagtgacatgtaggtaggaagcactgaaaatagtgttcccagagcactttgcaactccctgggtaagagggacgacacctctggtttttcaataccaattacatggaacttttctgtaatgggtacaatgaagaagtttctaaaaacacacacaaagcacattgggccaactatttagtaagcccggatagacttattgccaaaaacaaaaaatagctttcaaaagaaatttaagttctatgagaaattccttagtcatggtgttgcgtaaatcatattttagctgcacggcattaccccacacagggtggcagaacttgaagggttactgacgtgtaaatgctggtatttgatttcctgtgtgtgttgccctggcattaagggcattttacccttgcagttttactaaaacactgaaaaatattccaagcttcatattaaccctacctgtcaacgtaacgatttcatgaacgttattatattgtcgaattcctactgacaacattataactgtatgggagcttaactttataaggaaatgtattttgacactggtatcttattaaagtattctgatcctaccactgaaaaaaaaaaaaaaaaaa

SEQ ID NO: 1443 - DNA, 4457 bp, Homo Sapiens
  NM_001431
gtcgcgggaggggcttccgccgcgagggggcggggccggccctcagagtcctctgacggccccagtcagggaatttcaatttgaaacctagcggagggaggaggcaggcgcggctgccggcggctgggactgaagagggacgggtcccgcggcgagcgagctcctgagcataagctgtggccatgactactgaagtaggctctgtgtctgaagtgaagaaggactctagccagttaggaacagatgcaaccaaggaaaaacctaaagaagtagcagaaaatcagcagaatcagtcttccgatccagaggaggaaaaaggttcccagccacctcctgcagctgaaagccaaagtagtctacgccgccagaagagagagaaggaaacatcggagagcaggggtatttctcggttcataccgccatggcttaagaagcaaaagtcatataccttagtagtggccaaagatggaggagataaaaaagagcctacccaagctgttgttgaagaacaggtcttagataaagaggaaccccttccagaagaacagagacaggctaagggtgatgctgaagaaatggctcagaagaaacaagagattaaagttgaagtcaaggaagaaaaaccctcagtgagcaaggaagaaaaaccctcagtgagcaaagtggagatgcagcctactgaattagtaagtaaggagagagaagagaaggtaaaagaaacacaggaagacaaattagaaggaggagcagcaaaaagggagaccaaggaagtgcagaccaatgagctgaaagcagagaaggcatctcaaaaagtcaccaagaagaccaaaactgtccagtgtaaagtgaccctcttagatggcaccgaatacagctgtgacctggagaaacatgccaagggacaagtgttatttgacaaagtgtgtgaacacctcaatctcttggagaaagactactttggacttttgtttcaggaaagccctgagcagaaaaactggttagatcctgctaaagaaataaagagacaactgagaaaccttccatggctattcacttttaatgtgaagttttatcctcctgatccttctcaattgactgaagatatcaccagatacttcttgtgccttcagctccggcaggacattgcctctggccgcctgccctgctcttttgtgactcatgctctcctgggatcctacaccctgcaggctgaacttggtgactatgacccagaagaacatggcagcatcgacctcagtgaattccagtttgcccctactcagactaaggagctggaagagaaggtggcagagctgcacaaaacccacaggggcttatcgccagcacaagctgattcccagttcttagaaaatgcaaagaggctttccatgtatggtgttgacctacatcatgccaaggactcagaaggtgtggacatcaagctgggcgtgtgtgctaatggacttctcatttacaaagacagactgcgaatcaatcgttttgcttggccgaaaatcttaaaaatttcctataaacgcagtaacttctacattaaagtcagaccggcagagctggaacagtttgagagtaccattggattcaaactgccaaaccaccgggcagcgaaaagactatggaaagtgtgcgtggagcatcatactttctacaggcttgtttctccagagcagccaccaaaagccaagttcctgaccttggggtccaaatttcgctatagtggccgcacccaagcacagacccgccaggccagcaccctcatagataggccagcaccacactttgagcgcacttctagtaaacgggtctccaggagtctagatggagctccgattggtgtcatggaccaaagtcttatgaaggattttcctggcgctgctggggagatttcagcctatggacctggacttgtcagcattgccgtggtacaagatggggacggcaggagggaagtgagaagcccaactaaagccccacatttgcagctcattgaaggaaagaaaaattccttgagagtagaaggggataatatttatgtcagacatagcaatttaatgttggaggaactggataaggcccaggaggacatactgaaacatcaggctagcattagtgaactcaagcgcaattttatggaatccacacctgagccgcgccctaatgaatgggaaaaacgacgtatcacacctctgtccctacagacacaagggagttcacatgagactctgaatatagtggaggagaagaagcgggcagaggttgggaaagacgaaagagtaatcacagaagaaatgaatggtaaagagatatcacctgggagtggtcctggggagattcgtaaggtggagcctgtgacacaaaaagactccacctccctgtcttctgagagcagcagcagcagcagtgagagtgaggaggaagacgtgggagagtaccgtccccaccaccgagtgaccgagggcaccatcagggaggaacaggagtatgaagaagaggtggaggaagaaccccgcccggcagccaaggtagtagagagggaggaagcagtgcccgaagccagcccagtcacacaagcaggtgccagtgtaatcacagtagaaacagtgatccaggaaaatgtaggtgcccaaaagatacccggagagaagagtgtacacgaaggcgctcttaagcaagacatgggagaagaagcagaggaagagccacagaaagttaacggagaggtgtcccatgttgacattgatgttttgccacaaattatttgttgttcagagccaccagtggtaaaaacagagatggtaacaatttctgatgcctcacaaaggacagaaatctccaccaaggaagtccccattgtccaaactgagaccaaaaccatcacatatgagtctccacagattgatggcggggctggtggtgattcgggcacgttactgaccgcacaaaccatcacatctgagtccgtgtcaacaacgacaaccacacacatcaccaagactgtaaaaggtggaatttctgaaacaagaattgagaaacgcattgtgatcacaggagatggagatattgatcatgaccaggcactggctcaggcgatcagggaagccagagagcagcaccctgacatgtcggtcacaagagtggtggtacacaaagaaacagagttggctgaggaaggggaagattaagtaagaaagtcattttttaaacaacactcaactttgtgaacccctgaagattttttgaccgttccaagtcttaatgccacaccactattccagcgaatttatgctacaactggtaacaatgaccagaagcctgaagaattaaaatgccaacaccaaacctttccttaccagctctggtctatattgctcccatgcatttaatatattattttgttttataaccacttctaaatattctcagttctttctttttgttgttgttaattaaggggttttggttttgttttctgtttactttgtgtgcaactacctgcttttaatgactcactttgatcaaatgacagtgaacaaagccagcccaagctggtaaggtgctgttcacttgaacaggtgctgttgcgcagaaaggaaactctgtgactaatttagatagtggctttccttcttctggattcttttcattgaattctcacagtaaatatttacggagttttcaaattgcagcaaatatactgtatgagaaaatattaatacagattaaaagcctttcttacatcttgaaaattttctaatatttgagaatttcacagggatgttttttatattggacccttttgactttccagtcctgtgactttctacttttagtagagagtcagaatctctggactggagaataatgaagaagttcactgactgtgcactgtgcttagagaccctgccgcaccacagtgccaatgcttgtcagacacatgcccttcggcagcattccagaacaggagggaagagaaagagaaaactttcttcccttctactaaaagattcaggcagcttaaaaccttagtgctttctttcttaacatacccacatttcaattctttccattatttgaacacttgggtagaactcttgctttgtattaaacctctttgtctacacatgtaaaacttaccttttgttattgagcaggcctatctctttcagatagttttatgattcacacaggtttgaggatgctggggagagggggagggggctgtggtggtgttctgttggttacaagaaagttataccatttaaagctggcaccagagacccgatagggacttattaactatattgaacattttttcctttgcctttgaccctatgtatagttacgatgccagattagatttatagcagcctcaagttgtattaaatgatattttgcttcctgtaatactattataaaataaagtttgtttattctctaaa

SEQ ID NO: 1444 - DNA, 1171 bp, Homo Sapiens
  NM_001436
gcgtcacgcagcgcacgtcgccgcgcgcctgcgctcttttccacgtgcgaaagccccggactcgtggagttgtgaacgccgcggactccggagccgcacaaaccagggctcgccatgaagccaggattcagtccccgtgggggtggctttggcggccgagggggctttggtgaccgtggtggtcgtggaggccgagggggctttggcgggggccgaggtcgaggcggaggctttagaggtcgtggacgaggaggaggtggaggcggcggcggcggtggaggaggaggaagaggtggtggaggcttccattctggtggcaaccggggtcgtggtcggggaggaaaaagaggaaaccagtcggggaagaatgtgatggtggagccgcatcggcatgagggtgtcttcatttgtcgaggaaaggaagatgcactggtcaccaagaacctggtccctggggaatcagtttatggagagaagagagtctcgatttcggaaggagatgacaaaattgagtaccgagcctggaaccccttccgctccaagctagcagcagcaatcctgggtggtgtggaccagatccacatcaaaccgggggctaaggttctctacctcggggctgcctcgggcaccacggtctcccatgtctctgacatcgttggtccggatggtctagtctatgcagtcgagttctcccaccgctctggccgtgacctcattaacttggccaagaagaggaccaacatcattcctgtgatcgaggatgctcgacacccacacaaataccgcatgctcatcgcaatggtggatgtgatctttgctgatgtggcccagccagaccagacccggattgtggccctgaatgcccacaccttcctgcgtaatggaggacactttgtgatttccattaaggccaactgcattgactccacagcctcagccgaggccgtgtttgcctccgaagtgaaaaagatgcaacaggagaacatgaagccgcaggagcagttgacccttgagccatatgaaagagaccatgccgtggtcgtgggagtgtacaggccaccccccaaggtgaagaactgaagttcagcgctgtcaggattgcgagagatgtgtgttgatactgttgcacgtgtgtttttctattaaaagactcatccgtctcccaaaaaaa

SEQ ID NO: 1445 - DNA, 2905 bp, Homo Sapiens
  NM_001439
accgaaagggaggggcggccactcggggactgtcccttgctccaggcgctcactttgcgggcggcactttttccaggttgttaatccagctaatggagaaggatagatgcacgctacttggtttagaaaaaaaaacaaaaatgagcaaacgagacgccccttccgttttatgataactaagctgcagggaaataaatcggctggccctactgcaatctactgcactcgagaaacatcacagaaaattctttgatttatcttaatagtgacaagtgagcctgcttctgtcaattactgaagctataaggagattttttaaaaattaaacttcaacacaatgaggtgttgccacatctgcaaacttcctgggagagtaatggggattcgagtgcttcgattatctttggtggtcatcctcgtattattactggtagctggtgctttgactgccttacttcccagtgttaaagaagacaagatgctcatgttgcgtagggaaataaaatcccagggcaagtccaccatggactcctttactctcataatgcagacgtacaacagaacagatctcttattgaaacttttaaatcattatcaggctgtaccaaatctgcacaaagtgattgtggtatggaacaatattggagagaaggcaccagatgaattatggaattctctagggccccaccctatccctgtgatcttcaaacaacagacagcaaacaggatgagaaatcgactccaggtctttcctgaactggaaaccaatgcagtgttgatggtagatgatgacacactcatcagcaccccagaccttgtttttgctttctcagtttggcagcaatttcctgatcaaattgtaggatttgttcctagaaagcacgtctctacttcatcaggtatctacagttatggaagttttgaaatgcaagcaccagggtctggaaatggtgaccagtactctatggtgctgattggagcctcattcttcaatagcaaatatcttgaattatttcagaggcaacctgcagctgtccatgctttgatagatgatactcaaaactgtgatgatattgccatgaattttatcattgccaagcatattggcaagacttcagggatatttgtgaagcctgtaaacatggacaatttggaaaaagaaaccaacagtggctattctggaatgtggcatcgagctgagcacgctctgcagaggtcttattgtataaataagcttgttaatatctatgatagcatgcccttaagatactccaacattatgatttcccagtttggttttccatatgccaactacaaaagaaaaatataaaagtaaaacaaacaaaaacaaacctgaaaactgcttggcatttgagtagcttctccatgctatgtatttttttaagcaacatcatgaattttatctactccagaagtctctacaatagaaaaaaaagtgcagtgcttctaggatataaaattcacattacttttgaaagccaagaagttggtcttatccagttaggtcttcttatgaagagttttcatccagggatataactccttggtcagtgattttattgtttacatcctgagactgttctacagtttctttgactcctggcatttgccttaaggacctatagcaagctgtttctaggatcagaaactcaagagaggcatttctctgctttttcactaaaggtcagttgttttaatttgaaacctgaaatgcctctttagcaaaagcctgtggtatggggtaaagccatgtaagaagagaatagtctcagtcacatatgaagaggaaaatttgcagctgccagtgctttccttgtggccctgccaaccagctcttccaggacgaactcagtccagcatggttttgatgtaaccatccatgcttttatttttgttaagtcttttgtgactgggacagttaattttagtagctgaagaacgtctagttgtttgcttgatatttgtgaacatttactgcatggatcacaaaacaatataccctgtatttcttacacgccacttatatgcagcaaggagtaaatgtgttactagattcgggtagtgcattttgtcactgaatctgaccttgagaatgtacattaattcttatattttacataatgtatgtgttgtttaagaaatgtataaaaaacctgaaaaaaatgagtaagaactggcagaagttaaaaccctttgtatcaaaagatctttattggtagagcactggttatcttctggatactaaaaagttgtattacaaagccaaacacttgcattcacaactttaaaaaaagatccaaggaactattcataatgatgaaatttcaactacatacaaggaggagaaaataagaacccagtcataacagaggaattctataggagtctgcatcaattcattcttaaggttgcctactctctgttatgtgaattagcgtctgtgtttcacccattgtctgtgtttagtccttgttcaccactaaggcaaggaattcttaactaggcctctgtttaccaacttctctttctcctcctttccctcttattcctccttctcctcttccttcttatataatgctagtatattctcaaaattgcaaagctgtgagaatattaaaataatcatggctaatgttccaataatgaggtctttgtgcatttagttccgcatatgatggttttttttttacattaaagagtatatgtgtcttaatgcagtcagattgtaaaaaacaaaaacaaagaaactaagaatcttactaaaaatcgataatgtcagttatctgttttgtccaatattggtagtacttttttgcctcttatgattcctctagcagataaataaaagaaacttttgccatccatgaaaaaaaaaaaaaaaaaa

SEQ ID NO: 1446 - DNA, 2105 bp, Homo Sapiens
  NM_001441
tccgggttttgcggcggagcgggcgggctgcgcgtgcggcggcttcaactgtcgcggtaggcagcagcaggctgaagggatcatggtgcagtacgagctgtgggccgcgctgcctggcgcctccggggtcgccctggcctgctgcttcgtggcggcggccgtggccctgcgctggtccgggcgccggacggcgcggggcgcggtggtccgggcgcgacagaggcagcgagcgggcctggagaacatggacagggcggcgcagcgcttccggctccagaacccagacctggactcagaggcgctgctagccctgcccctgcctcagctggtgcagaagttacacagtagagagctggcccctgaggccgtgctcttcacctatgtgggaaaggcctgggaagtgaacaaagggaccaactgtgtgacctcctatctggctgactgtgagactcagctgtctcaggccccaaggcagggcctgctctatggcgtccctgtgagcctcaaggagtgcttcacctacaagggccaggactccacgctgggcttgagcctgaatgaaggggtgccggcggagtgcgacagcgtagtggtgcatgtgctgaagctgcagggtgccgtgcccttcgtgcacaccaatgttccacagtccatgttcagctatgactgcagtaaccccctctttggccagaccgtgaacccatggaagtcctccaaaagcccagggggctcctcagggggtgaaggggccctcatcgggtctggaggctcccccctgggcttaggcactgatatcggaggcagcatccgcttcccctcctccttctgcggcatctgcggcctcaagcccacagggaaccgcctcagcaagagtggcctgaagggctgtgtctatggacaggaggcagtgcgtctctccgtgggccccatggcccgggacgtggagagcctggcactgtgcctgcgagccctgctgtgcgaggacatgttccgcttggaccccactgtgcctcccttgcccttcagagaagaggtctacaccagctctcagcccctgcgtgtggggtactatgagactgacaactataccatgccctccccggccatgaggcgggccgtgctggagaccaaacagagccttgaggctgcggggcacacgctggttcccttcttgccaagcaacataccccatgctctggagaccctgtcaacaggtgggctcttcagtgatggtggccacaccttcctacagaacttcaaaggtgatttcgtggacccctgcctgggggacctggtctcaattctgaagcttccccaatggcttaaaggactgctggccttcctggtgaagcctctgctgccaaggctgtcagctttcctcagcaacatgaagtctcgttcggctggaaaactctgggaactgcagcacgagatcgaggtgtaccgcaaaaccgtgattgcccagtggagggcgctggacctggatgtggtgctgacccccatgctggcccctgctctggacttgaatgccccaggcagggccacaggggccgtcagctacactatgctgtacaactgcctggacttccctgcaggggtggtgcctgtcaccacggtgactgctgaggacgaggcccagatggaacattacaggggctactttggggatatctgggacaagatgctgcagaagggcatgaagaagagtgtggggctgccggtggccgtgcagtgtgtggctctgccctggcaagaagagttgtgtctgcggttcatgcgggaggtggagcgactgatgacccctgaaaagcagtcatcctgatggctctggctccagaggacctgagactcacactctctgcagcccagcctagtcagggcacagctgccctgctgccacagcaaggaaatgtcctgcatggggcagaggcttccgtgtcctctcccccaaccccctgcaagaagcgccgactccctgagtctggacctccatccctgctctggtcccctctcttcgtcctgatccctccacccccatgtggcagcccatgggtatgacataggccaaggcccaactaacagtcaagaaacagctaaaaaaaaaa

SEQ ID NO: 1447 - DNA, 3452 bp, Homo Sapiens
  NM_001453
atgcaggcgcgctactccgtgtccagccccaactccctgggagtggtgccctacctcggcggcgagcagagctactaccgcgcggcggccgcggcggccgggggcggctacaccgccatgccggcccccatgagcgtgtactcgcaccctgcgcacgccgagcagtacccgggcggcatggcccgcgcctacgggccctacacgccgcagccgcagcccaaggacatggtgaagccgccctatagctacatcgcgctcatcaccatggccatccagaacgccccggacaagaagatcaccctgaacggcatctaccagttcatcatggaccgcttccccttctaccgggacaacaagcagggctggcagaacagcatccgccacaacctctcgctcaacgagtgcttcgtcaaggtgccgcgcgacgacaagaagccgggcaagggcagctactggacgctggacccggactcctacaacatgttcgagaacggcagcttcctgcggcggcggcggcgcttcaagaagaaggacgcggtgaaggacaaggaggagaaggacaggctgcacctcaaggagccgcccccgcccggccgccagcccccgcccgcgccgccggagcaggccgacggcaacgcgcccggtccgcagccgccgcccgtgcgcatccaggacatcaagaccgagaacggtacgtgcccctcgccgccccagcccctgtccccggccgccgccctgggcagcggcagcgccgccgcggtgcccaagatcgagagccccgacagcagcagcagcagcctgtccagcgggagcagccccccgggcagcctgccgtcggcgcggccgctcagcctggacggtgcggattccgcgccgccgccgcccgcgccctccgccccgccgccgcaccatagccagggcttcagcgtggacaacatcatgacgtcgctgcgggggtcgccgcagagcgcggccgcggagctcagctccggccttctggcctcggcggccgcgtcctcgcgcgcggggatcgcacccccgctggcgctcggcgcctactcgcccggccagagctccctctacagctccccctgcagccagacctccagcgcgggcagctcgggcggcggcggcggcggcgcgggggccgcggggggcgcgggcggcgccgggacctaccactgcaacctgcaagccatgagcctgtacgcggccggcgagcgcgggggccacttgcagggcgcgcccgggggcgcgggcggctcggccgtggacgaccccctgcccgactactctctgcctccggtcaccagcagcagctcgtcgtccctgagtcacggcggcggcggcggcggcggcgggggaggccaggaggccggccaccaccctgcggcccaccaaggccgcctcacctcgtggtacctgaaccaggcgggcggagacctgggccacttggcgagcgcggcggcggcggcggcggccgcaggctacccgggccagcagcagaacttccactcggtgcgggagatgttcgagtcacagaggatcggcttgaacaactctccagtgaacgggaatagtagctgtcaaatggccttcccttccagccagtctctgtaccgcacgtccggagctttcgtctacgactgtagcaagttttgacacaccctcaaagccgaactaaatcgaaccccaaagcaggaaaagctaaaggaacccatcaaggcaaaatcgaaactaaaaaaaaaaaatccaattaaaaaaaacccctgagaatattcaccacaccagcgaacagaatatccctccaaaaattcagctcaccagcaccagcacgaagaaaactctattttcttaaccgattaattcagagccacctccactttgccttgtctaaataaacaaacccgtaaactgttttatacagagacagcaaaatcttggtttattaaaggacagtgttactccagataacacgtaagtttcttcttgcttttcagagacctgctttcccctcctcccgtctcccctctcttgccttcttccttgcctctcacctgtaagatattattttatcctatgttgaagggagggggaaagtccccgtttatgaaagtcgctttctttttattcatggacttgttttaaaatgtaaattgcaacatagtaatttatttttaatttgtagttggatgtcgtggaccaaacgccagaaagtgttcccaaaacctgacgttaaattgcctgaaactttaaattgtgctttttttctcattataaaaagggaaactgtattaatcttattctatcctcttttctttctttttgttgaacatattcattgtttgtttattaataaattaccattcagtttgaatgagacctatatgtctggatactttaatagagctttaattattacgaaaaaagatttcagagataaaacactagaagttacctattctccacctaaatctctgaaaaatggagaaaccctctgactagtccatgtcaaattttactaaaagtctttttgtttagatttattttcctgcagcatcttctgcaaaatgtactatatagtcagcttgctttgaggctagtaaaaagatatttttctaaacagattggagttggcatataaacaaatacgttttctcactaatgacagtccatgattcggaaattttaagcccatgaatcagccgcggtcttaccacggtgatgcctgtgtgccgagagatgggactgtgcggccagatatgcacagataaatatttggcttgtgtattccatataaaattgcagtgcatattatacatccctgtgagccagatgctgaatagatattttcctattatttcagtcctttataaaaggaaaaataaaccagtttttaaatgtatgtatataattctcccccatttacaatccttcatgtattacatagaaggattgcttttttaaaaatatactgcgggttggaaagggatatttaatctttgagaaactattttagaaaatatgtttgtagaacaattatttttgaaaaagatttaaagcaataacaagaaggaaggcgagaggagcagaacattttggtctagggtggtttctttttaaaccattttttcttgttaatttacagttaaacctaggggacaatccggattggccctcccccttttgtaaataacccaggaaatgtaataaattcattatcttagggtgatctgccctgccaatcagactttggggagatggcgatttgattacagacgttcgggggggtggggggcttgcagtttgttttggagataatacagtttcctgctatctgccgctcctatctagaggcaacacttaagcagtaattgctgttgcttgttgtcaaaatttgatcattgttaaaggattgctgcaaataaatacactttaatttcagtcaaaaa

SEQ ID NO: 1448 - DNA, 9467 bp, Homo Sapiens
  NM_001457
gcggccaggggcgggcggccgcagagcagcaccggccgtggctccggtagcagcaagttcgaaccccgctcccgctccgcttcggttctcgctccttcggcccttgggcctccaaacaccagtccccggcagctcgttgcgcattgcgctctccccgccaccaggatgccggtaaccgagaaggatctagctgaggacgcgccttggaagaagatccagcagaacacgttcacacgctggtgcaacgagcacctcaagtgcgtgaacaaacgcatcggcaacctgcagaccgacctgagcgacgggctgcggctcatcgcgctgctcgaggtgctcagccagaagcgcatgtaccgcaagtaccatcagcggcccacctttcgccagatgcagctcgagaatgtgtccgtggcgctcgagttcctggaccgtgagagcatcaagctcgtgtccatcgatagcaaagccattgtggatgggaacctgaagctcatcttgggtctggtgtggacgctgatcctccactactccatctccatgcccgtgtgggaggatgaaggggatgatgatgccaagaagcagacgccaaagcagaggctgctggggtggattcagaacaagatcccctacttgcccatcaccaactttaaccagaactggcaagacggcaaagccctgggagccctggtagacagctgtgctccaggtctgtgcccagactgggaatcctgggacccgcagaagcctgtggataatgcacgagaagccatgcagcaggcagatgactggctgggtgtcccacaggtcatcactcctgaagaaatcattcacccggatgtggacgagcactcagttatgacttacctgtcccagttccccaaagccaagctcaagccgggggctcctctcaaacccaaactcaacccgaagaaagccagggcctatggcagaggaatcgagcccactggaaacatggtgaagcagccagccaagttcactgtggacaccatcagcgccgggcaaggagacgtgatggtgtttgttgaggacccagaagggaacaaagaggaggcacaagtgacccctgacagtgacaagaacaagacatactctgtggagtatctgcccaaggtcaccgggctacacaaagtcacagtcctctttgcaggacagcacatctccaagagcccatttgaagtgagtgttgacaaggcccagggagatgccagtaaagtcactgcaaaaggtccagggttggaagctgtagggaacatcgccaataagcccacctactttgacatctatacggcaggagctggtgtgggtgacattggtgtggaggtggaagatccccaggggaagaacaccgtggagttgctcgtggaagacaaaggaaaccaggtgtatcgatgtgtgtacaaacccatgcagcctggccctcacgtggtcaagatcttctttgctggggacactattcctaagagtcccttcgttgtgcaggttggggaagcctgcaatccaaatgcctgccgggccagtggccgaggcctacaacccaaaggcgtccgtatccgggagaccacagatttcaaggttgacaccaaagctgcaggaagtggggagctcggtgtaaccatgaagggtcctaagggtctggaggagctggtgaagcagaaagactttctggatggggtctacgcattcgagtattaccccagcaccccggggagatacagcattgccatcacatgggggggacaccacattccaaagagcccctttgaagttcaagttggccctgaagcgggtatgcagaaagtccgtgcttggggccctgggctccatggtgggattgtcgggcggtcagcggacttcgtggtagaatccattggctctgaagtggggtctctggggtttgccattgaaggcccctctcaggcaaagattgagtacaacgaccagaatgatggatcgtgtgatgtcaaatactggcccaaggagcctggcgaatatgctgttcacatcatgtgtgacgacgaagacatcaaggacagcccgtacatggccttcatccacccagccacgggaggctacaaccctgatctggttcgagcatacgggccaggtttggagaaatctggatgcattgtcaacaacctggccgagttcactgtggatcctaaggatgctggaaaagctcccttaaagatatttgctcaggatggggaaggccaacgcattgacatccagatgaagaaccggatggacggcacatatgcatgctcatacaccccggtgaaggccatcaagcacaccattgctgtggtctggggaggcgtgaacatcccgcacagcccctacagggtcaacatcgggcaaggtagccatcctcagaaggtcaaagtgtttgggccaggtgtggagagaagtggtctgaaggcaaatgaacctacacacttcacggtggactgtactgaggctggggaaggtgatgtcagtgttggcattaagtgtgatgcccgggtgttaagtgaagatgaggaagacgtggattttgacattattcacaatgccaatgatacgttcacagtcaaatatgtgcctcctgctgctgggcgatacactatcaaagttctctttgcatctcaggaaatccccgccagccctttcagagtcaaagttgacccttcccacgatgccagcaaagtgaaggcagaaggcccagggctcagcaaagcaggtgtggaaaatgggaaaccgacccacttcactgtctacaccaagggggctgggaaagccccgctcaacgtgcagttcaacagccctcttcctggcgatgcagtgaaggatttggatatcatcgataattatgactactctcacacggttaaatatacacccacccaacagggcaacatgcaggttctggtgacttacggtggcgatcccatccctaaaagccctttcactgtgggtgttgctgcaccgctggatctgagcaagataaaactcaatgggctggaaaacagggtggaagttgggaaggatcaggagttcaccgttgataccaggggggcaggaggccaggggaagctggacgtgacaatcctcagcccctctcggaaggtcgtgccatgcctagtgacacctgtgacaggccgggagaacagcacggccaagttcatccctcgggaggaggggctgtatgctgtagacgtgacctacgatggacaccctgtgcccgggagcccctacacagtggaggcctcgctgccaccagatcccagcaaggtgaaggcccacggtcccggcctcgaaggtggtctcgtgggcaagcctgccgagttcaccatcgataccaaaggagctggtactggaggtctgggcttaacggtggaaggtccgtgcgaggccaaaatcgagtgctccgacaatggtgatgggacctgctccgtctcttaccttcccacaaaacccggggagtacttcgtcaacatcctctttgaagaagtccacatacctgggtctcccttcaaagctgacattgaaatgccctttgacccctctaaagtcgtggcatcggggccaggtctcgagcacgggaaggtgggtgaagctggcctccttagcgtcgactgctcggaagcgggaccgggggccctgggcctggaagctgtctcggactcgggaacaaaagccgaagtcagtattcagaacaacaaagatggcacctacgcggtgacctacgtgcccctgacggccggcatgtacacgttgaccatgaagtatggtggcgaactcgtgccacacttccccgcccgggtcaaggtggagcccgccgtggacaccagcaggatcaaagtctttggaccaggaatagaagggaaagatgtgttccgggaagctaccaccgactttacagttgactctcggccgctgacccaggttgggggtgaccacatcaaggcccacattgccaacccctcaggggcctccaccgagtgctttgtcacagacaatgcggatgggacctaccaggtggaatacacaccctttgagaaaggtctccatgtagtggaggtgacatatgatgacgtgcctatcccaaacagtcccttcaaggtggctgtcactgaaggctgccagccatctagggtgcaagcccaaggacctggattgaaagaggcctttaccaacaagcccaatgtcttcaccgtggttaccagaggcgcaggaattggtgggcttggcataactgttgagggaccatcagagtcgaagataaattgcagagacaacaaggatggcagctgcagtgctgagtacattcctttcgcaccgggggattacgatgttaatatcacatatggaggagcccacatccccggcagccccttcagggttcctgtgaaggatgttgtggaccccagcaaggtcaagattgccggccccgggctgggctcaggcgtccgagcccgtgtcctgcagtccttcacggtggacagcagcaaggctggcctggctccgctggaagtgagggttctgggcccacgaggcttggtggagccagtgaacgtggtggacaatggagatggcacacacacagtaacctacaccccatctcaggagggaccttacatggtctcagttaaatatgctgatgaagagattcctcgcagtcccttcaaggtcaaggtccttcccacatatgatgccagcaaagtgactgccagtggccccggccttagttcctatggtgtgcctgccagtctacctgtggactttgcaattgatgcccgagatgccggggaaggcctgcttgctgttcaaataacggaccaagaaggaaaacccaaaagagccattgtccatgacaataaagatggcacgtatgctgtcacctacatccccgacaagactgggcgctatatgattggagtcacctacgggggtgacgacatcccactttctccttatcgcatccgagccacacagacgggtgatgccagcaagtgcctggccacgggtcctggaatcgcctccactgtgaaaactggcgaagaagtaggctttgtggttgatgccaagactgccgggaagggtaaagtgacctgcacggttctgaccccagatggcactgaggccgaggccgatgtcattgagaatgaagatggaacctatgacatcttctacacagctgccaagccgggcacatatgtgatctatgtgcgcttcggtggtgttgatattcctaacagccccttcactgtcatggccacagatggggaagtcacagccgtggaggaggcaccggtaaatgcatgtccccctggattcaggccctgggtgaccgaagaggcctatgtcccagtgagtgacatgaacggcctgggatttaagccttttgacctggtcattccgtttgctgtcaggaaaggagaaatcactggagaggtccacatgccttctgggaagacagccacacctgagattgtggacaacaaggacggcacggtcactgttagatatgcccccactgaggtcgggctccatgagatgcacatcaaatacatgggcagccacatccctgagagcccactccagttctacgtgaactaccccaacagtggaagtgtttctgcatacggtccaggcctcgtgtatggagtggccaacaaaactgccaccttcaccatcgtcacagaggatgcaggagaaggtggtctggacttggctattgagggcccctcaaaagcagaaatcagctgcattgacaataaagatgggacatgcacagtgacctacctgccgactctgccaggcgactacagcattctggtcaagtacaatgacaagcacatccctggcagccccttcacagccaagatcacagatgacagcaggcggtgctcccaggtgaagttgggctcagccgctgacttcctgctcgacatcagtgagactgacctcagcagcctgacggccagcattaaggccccatctggccgagacgagccctgtctcctgaagaggctgcccaacaaccacattggcatctccttcatcccccgggaagtgggcgaacatctggtcagcatcaagaaaaatggcaaccatgtggccaacagccccgtgtctatcatggtggtccagtcggagattggtgacgcccgccgagccaaagtctatggccgcggcctgtcagaaggccggactttcgagatgtctgacttcatcgtggacacaagggatgcaggttatggtggcatatccttggcggtggaaggccccagcaaagtggacatccagacggaggacctggaagatggcacctgcaaagtctcctacttccctaccgtgcctggggtttatatcgtctccaccaaattcgctgacgagcacgtgcctgggagcccatttaccgtgaagatcagtggggagggaagagtcaaagagagcatcacccgcaccagtcgggccccgtccgtggccactgtcgggagcatttgtgacctgaacctgaaaatcccagaaatcaacagcagtgatatgtcggcccacgtcaccagcccctctggccgtgtgactgaggcagagattgtgcccatggggaagaactcacactgcgtccggtttgtgccccaggagatgggcgtgcacacggtcagcgtcaagtaccgtgggcagcacgtcaccggcagccccttccagttcaccgtggggccacttggtgaaggaggcgcccacaaggtgcgggcaggaggccctggcctggagagaggagaagcgggagtcccagctgagttcagcatttggacccgggaagcaggcgctggaggcctctccatcgctgttgagggccccagtaaggccgagattacattcgatgaccataaaaatgggtcgtgcggtgtatcttatattgcccaagagcctggtaactacgaggtgtccatcaagttcaatgatgagcacatcccggaaagcccctacctggtgccggtcatcgcaccctccgacgacgcccgccgcctcactgttatgagccttcaggaatcgggattaaaagttaaccagccagcatcctttgctataaggttgaatggcgcaaaaggcaagattgatgcaaaggtgcacagcccctctggagccgtggaggagtgccacgtgtctgagctggagccagataagtatgctgttcgcttcatccctcatgagaatggtgtccacaccatcgatgtcaagttcaatgggagccacgtggttggaagccccttcaaagtgcgcgttggggagcctggacaagcggggaaccctgccctggtgtccgcctatggcacgggactcgaagggggcaccacaggtatccagtcggaattctttattaacaccacccgagcaggtccagggacattatccgtcaccatcgaaggcccatccaaggttaaaatggattgccaggaaacacctgaagggtacaaagtcatgtacacccccatggctcctggtaactacctgatcagcgtcaaatacggtgggcccaaccacatcgtgggcagtcccttcaaggccaaggtgacaggccagcgtctagttagccctggctcagccaacgagacctcatccatcctggtggagtcagtgaccaggtcgtctacagagacctgctatagcgccattcccaaggcatcctcggacgccagcaaggtgacctctaagggggcagggctctcaaaggcctttgtgggccagaagagttccttcctggtggactgcagcaaagctggctccaacatgctgctgatcggggtccatgggcccaccaccccctgcgaggaggtctccatgaagcatgtaggcaaccagcaatacaacgtcacatacgtcgtcaaggagaggggcgattatgtgctggctgtgaagtggggggaggaacacatccctggcagcccttttcatgtcacagtgccttaaaacagttttctcaaatcctggagagagttcttgtggttgcttttgttgcttgtttgtaattcattttatacaaagccctccagcctgtttgtggggctgaaaccccatccctaaaatattgctgttgtaaaatgccttcagaaataagtcctagactggactcttgagggacatattggagaatcttaagaaatgcaagcttgttcagggggctgagaagatcctgagtacactaggtgcaaaccagaactcttggtggaacagaccagccactgcagcagacagaccaggaacacaatgagactgacatttcaaaaaaacaaaactggctagcctgagctgctggttcactcttcagcatttatgaaacaaggctaggggaagatgggcagagaaaaaggggacacctagtttggttgtcatttggcaaaggagatgacttaaaatccgcttaatctcttccagtgtccgtgttaatgtatttggctattagatcactagcactgctttaccgctcctcatcgccaacacccccatgctctgtggccttcttacacttctcagagggcagagtggcagccgggcaccctacagaaactcagagggcagagtggcagccaggcccacatgtctctcaagtacctgtcccctcgctctggtgattatttcttgcagaatcaccacacgagaccatcccggcagtcatggttttgctttagttttccaagtccgtttcagtcccttccttggtctgaagaaattctgcagtggcgagcagtttcccacttgccaaagatcccttttaaccaacactagcccttgtttttaacacacgctccagcccttcatcagcctgggcagtcttaccaaaatgtttaaagtgatctcagaggggcccatggattaacgccctcatcccaaggtccgtcccatgacataacactccacacccgccccagccaacttcatgggtcactttttctggaaaataatgatctgtacagacaggacagaatgaaactcctgcgggtctttggcctgaaagttgggaatggttgggggagagaagggcagcagcttattggtggtcttttcaccattggcagaaacagtgagagctgtgtggtgcagaaatccagaaatgaggtgtagggaattttgcctgccttcctgcagacctgagctggctttggaatgaggttaaagtgtcagggacgttgcctgagcccaaatgtgtagtgtggtctgggcaggcagacctttaggttttgctgcttagtcctgaggaagtggccactcttgtggcaggtgtagtatctggggcgagtgttgggggtaaaagcccaccctacagaaagtggaacagcccggagcctgatgtgaaaggaccacgggtgttgtaagctgggacacggaagccaaactggaatcaaacgccgactgtaaattgtatcttataacttattaaataaaacatttgctccgtaaagttg

SEQ ID NO: 1449 - DNA, 1056 bp, Homo Sapiens
  NM_001459
tctctggctgtcacccggcttggccccttccacacccaactggggcaagcctgacccggcgacaggaggcatgaggggcccccggccgaaatgacagtgctggcgccagcctggagcccaacaacctatctcctcctgctgctgctgctgagctcgggactcagtgggacccaggactgctccttccaacacagccccatctcctccgacttcgctgtcaaaatccgtgagctgtctgactacctgcttcaagattacccagtcaccgtggcctccaacctgcaggacgaggagctctgcgggggcctctggcggctggtcctggcacagcgctggatggagcggctcaagactgtcgctgggtccaagatgcaaggcttgctggagcgcgtgaacacggagatacactttgtcaccaaatgtgcctttcagcccccccccagctgtcttcgcttcgtccagaccaacatctcccgcctcctgcaggagacctccgagcagctggtggcgctgaagccctggatcactcgccagaacttctcccggtgcctggagctgcagtgtcagcccgactcctcaaccctgccacccccatggagtccccggcccctggaggccacagccccgacagccccgcagccccctctgctcctcctactgctgctgcccgtgggcctcctgctgctggccgctgcctggtgcctgcactggcagaggacgcggcggaggacaccccgccctggggagcaggtgccccccgtccccagtccccaggacctgctgcttgtggagcactgacctggccaaggcctcatcctggggaggatactgaggcacacagaggggagtcaccagccagaggatgcatagcctggacacagaggaagttggctagaggccggtcccttccttgggcccctctcattccctccccagaatggaggcaacgccagaatccagcaccggccccatttacccaactctgtacaaagcccttgtccccatgaaattgtatataaatcatccttttctaccaaaaaaaaaaaaaaaaaaaaa

SEQ ID NO: 1450 - DNA, 2632 bp, Homo Sapiens
  NM_001461
aaaaaccaggaagttaaaagtggatgcagaagcgagcacagacggggctaggggtttcagagaaagtaattgagagtgctggcaacagcagctgaaatatagagaagttgtaggattaactttttcgcccaaagcagcttcagcccacgttttattcccatcgagggagggagaatgggtgccgctgagtgggcgggggagtggtccctgaaaggaggtggagtgctacagcccctccccgttggctctcgctgtttgtccgttgttggtttatactaatttgacaacagccgcctgttgagtctcctccagatcgcagctgaaggatctgttgagcgcttcaggaaaggcggacaggcgacactaacaggtgaagatctcgggagaccatgactaagaaaagaattgctgtgattgggggaggagtgagcgggctctcttccatcaagtgctgcgtagaagaaggcttggaacctgtctgctttgaaaggactgatgacatcggagggctctggaggttccaggaaaatcctgaagaaggaagggccagtatttacaaatcagtgatcatcaatacttctaaagagatgatgtgcttcagtgactatccaatcccagatcattatcccaacttcatgcataatgcccaggtcctggagtatttcaggatgtatgccaaagaatttgaccttctaaagtatattcgatttaagaccactgtgtgcagtgtgaagaagcagcctgattttgccacttcaggccaatgggaagtggtcactgaatctgaagggaaaaaggagatgaatgtctttgatggagtcatggtttgcactggccatcacaccaatgctcatctacctctggaaagcttccctggaattgagaagttcaaagggcagtacttccacagtcgagactataagaacccagagggattcactggaaagagagtcattataattggcattgggaattctggaggggatctggctgtagagattagccaaacagccaagcaggttttcctcagcaccaggagaggggcttggatcctgaatcgtgtaggggactacggatatcctgctgatgtgttgttctcttctcgacttacacattttatatggaagatctgtggccaatcattagcaaacaaatatttggaaaaaaagataaaccaaaggtttgaccatgaaatgtttggcctgaagcctaaacacagagctctgagtcagcatccaaccttaaatgatgacctgccaaatcgtatcatttctggcttggtgaaagtgaaaggaaatgtgaaggaattcacggagacagctgccatatttgaggatggctccagggaggatgacattgatgctgttatctttgccacaggctatagctttgactttccgtttctggaagattccgtcaaagtggtcaaaaacaagatatccctgtataaaaaggtcttccctcctaacctggaaaggccaactcttgcaatcataggcttgattcagcccttaggagccattatgcccatttcagagctccaaggacgctgggccactcaggtatttaaaggtctaaagacattgccctcacagagtgaaatgatggcagaaatatctaaagctcaagaggaaattgacaaaaggtatgtggagagccaacgccataccattcagggagactacatagataccatggaagagcttgctgatttggtgggggtcaggcccaatctgctgtctctggccttcactgaccccaagctggcattacacttattactgggaccctgcactccaatccactatcgtgtacagggccctggaaagtgggatggggctcgaaaagctatcctcaccacagatgatcgcatcaggaagcctctgatgacaagagtagttgaaaggagtagttctatgacttcaacaatgacaataggcaagtttatgctagctcttgccttctttgctataattatagcttacttctagttgtcctattgtcactgccctgtttttcattgggaagcttatctacagatgccttcagaatctgacgagattgactctcagtttcatattgcccagaaatctactttaatgtctctttcgaaagcattaattcactttcctttttcctacaatgaaacctgttttccatttgtattaactcatctcccttccactcatgatccgtcactcttccttgtggtaatccctagactgggagctcaggtactcttttagtcatctttgtatgtctttagcagagttcttgacatgtggtaggtgcttaataaatgtttgttgtttatcaaattttatggtagggagagtaagtcagcatcggtataaaatcgcttactccacgtaactcttcttctgatagggtttgattttctattagaagctcaattttagttttttttcatattataactaaatatgtttcctgagagataagagaaataatgttcctacaatagttgtatgtatctaagataagacatatagatgcttaagacattttgtttcacttgctattcactagtgtacttgaaacatggtcatttttagcccttttccttaggaaccatgtctttattttctcaataaagaaattactttcaact

SEQ ID NO: 1451 - DNA, 4876 bp, Homo Sapiens
  NM_001465
ccgcagttcttgagttccacatgcagagcagatgcgacagctagaagtgagtagggcccagaccctggcccaggaagatccactaaaggaggccatccttccgccttcttctgcaggagtcaggatggaaaggcagatgtaaagtccctcatggcgaaatataacacggggggcaacccgacagaggatgtctcagtcaatagccgacccttcagagtcacagggccaaactcatcttcaggaatacaagcaagaaagaacttattcaacaaccaaggaaatgccagccctcctgcaggacccagcaatgtacctaagtttgggtccccaaagccacctgtggcagtcaaaccttcttctgaggaaaagcctgacaaggaacccaagcccccgtttctaaagcccactggagcaggccaaagattcggaacaccagccagcttgaccaccagagaccccgaggcgaaagtgggatttctgaaacctgtaggccccaagcccatcaacttgcccaaagaagattccaaacctacatttccctggcctcctggaaacaagccatctcttcacagtgtaaaccaagaccatgacttaaagccactaggcccgaaatctgggcctactcctccaacctcagaaaatgaacagaagcaagcgtttcccaaattgactggggttaaagggaaatttatgtcagcatcacaagatcttgaacccaagcccctcttccccaaacccgcctttggccagaagccgcccctaagtaccgagaactcccatgaagacgaaagccccatgaagaatgtgtcttcatcaaaagggtccccagctcccctgggagtcaggtccaaaagcggccctttaaaaccagcaagggaagactcagaaaataaagaccatgcaggggagatttcaagtttgccctttcctggagtggttttgaaacctgctgcgagcaggggaggcccaggtctctccaaaaatggtgaagaaaaaaaggaagataggaagatagatgctgctaagaacaccttccagagcaaaataaatcaggaagagttggcctcagggactcctcctgccaggttccctaaggccccttctaagctgacagtgggggggccatggggccaaagtcaggaaaaggaaaagggagacaagaattcagccaccccgaaacagaagccattgcctcccttgtttaccttgggtccacctccaccaaaacccaacagaccaccaaatgttgacctgacgaaattccacaaaacctcttctggaaacagtactagcaaaggccagacgtcttactcaacaacttccctgccaccacctccaccatcccatccggccagccaaccaccattgccagcatctcacccatcacaaccaccagtcccaagcctacctcccagaaacattaaacctccgtttgacctaaaaagccctgtcaatgaagacaatcaagatggtgtcacgcactctgatggtgctggaaatctagatgaggaacaagacagtgaaggagaaacatatgaagacatagaagcatccaaagaaagagagaagaaaagggaaaaggaagaaaagaagaggttagagctggagaaaaaggaacagaaagagaaagaaaagaaagaacaagaaataaagaagaaatttaaactaacaggccctattcaagtcatccatcttgcaaaagcttgttgtgatgtcaaaggaggaaagaatgaactgagcttcaagcaaggagagcaaattgaaatcatccgcatcacagacaacccagaaggaaaatggttgggcagaacagcaaggggttcatatggctatattaaaacaactgctgtagagattgactatgattctttgaaactgaaaaaagactctcttggtgccccttcaagacctattgaagatgaccaagaagtatatgatgatgttgcagagcaggatgatattagcagccacagtcagagtggaagtggagggatattccctccaccaccagatgatgacatttatgatgggattgaagaggaagatgctgatgatggctccacactacaggttcaagagaagagtaatacgtggtcctgggggattttgaagatgttaaagggaaaagatgacagaaagaaaagtatacgagagaaacctaaagtctctgactcagacaataatgaaggttcatctttccctgctcctcctaaacaattggacatgggagatgaagtttacgatgatgtggatacctctgatttccctgtttcatcagcagagatgagtcaaggaactaatgttggaaaagctaagacagaagaaaaggaccttaagaagctaaaaaagcaggaaaaagaagaaaaagacttcaggaaaaaatttaaatatgatggtgaaattagagtcctatattcaactaaagttacaacttccataacttctaaaaagtggggaaccagagatctacaggtaaaacctggtgaatctctagaagttatacaaaccacagatgacacaaaagttctctgcagaaatgaagaagggaaatatggttatgtccttcggagttacctagcggacaatgatggagagatctatgatgatattgctgatggctgcatctatgacaatgactagcactcaactttggtcattctgctgtgttcattaggtgccaatgtgaagtctggattttaattggcatgttattgggtatcaagaaaattaatgcacaaaaccacttattatcatttgttatgaaatcccaattatctttacaaagtgtttaaagtttgaacatagaaaataatctctctgcttaattgttaactcagaagactacattagtgagatgtaagaattattaaatattccatttccgctttggctacaattatgaagaagttgaaggtacttcttttagaccaccagtaaataatcctccttcaaaaaataaaaataaaagaaaaaggaaaatcattcaggaagaaatgacctgtctaaaaaaacctaaggaagaataataatataagaaaggaaatttaaaaacattccacaagaagaaaaattattgtttatacttctacttatggttatatcttatattctctattcaagtgacctgtcttttaaaaaggcagtgctgtcttacctcttgctagtgggttaaatgttttcaaaaattatagcagtagtagaagttttgtataaaatttgtccttatttgttaattgtatataaatgttaattatttgatacgaatgttatgcatttagtatgcacattgaagtctaaactgtagaagagtctaaaacaagttctctttttgcagattcacatactaatggtttaattctgtgctctgtttaaagtactattataactagagtagatctgaatgaggataaccctaaaatcatgaggaatggaagaatggaccttgaaactacctaggcttttatgcatggcacctctttataatgaagacactttttaaagtttttgtttttgtttcaattaccgctagatttttttttctctttttttaaaatccattttactggaaagttggccagcagagggagtagaaattattaaaattctagtgtttggattgggcccttctctaacagtacatactcattcccaaagcaatccaaaaacaaaatgtgaaccatttgggtttcaaatgttaagaacactaaatagcatgatttaaaaaatgaaaaatgctaacacccaagaaaagaagatattaagtgctttttaacaactcctagagtacaaaatgagtacatcataatgctggctcttctactaatgaaccatcgagtgatattgaataaattatttatcttctcagtttccttatctgtaaattacaatattagactaagtaagtttttccaactcttcactaccaattaccttaggcttttataatgctccgcctacttcagtcccatgtttcagaagcttttgtctattttttaaactcattgattaaataatgattaatgcattctccacattttaatattgcaaaggcccattggagtttctgaagtggctccacagaattgaaataatttcaaataactgtaaaggaactgaaaatcttcacagagatgaagtggggtttccattaggtgctttgaaatttgataacaaatcatcaacttccactggtcaatatatagattttgggtgtctgaggccccaagattagatgccactaatctccaaagattccctccaattatgaaatattttaatgtctacttttagagagcactagccagtatatgaccatgtgattaatttcttttcacactagataaaattacctggttcaaaagtggtttttgtttattaaatttggtaataaatatatataatacacagacaggatagtttttatgctgaagtttttggccagctttagtttgaggactccttgataagcttgctaaactttcagagtgccctgagacacttccagccatccctcctcctgccttcattggggcagacttgcattgcagtctgacagtaattttttttctgattgagaattatgtaaattcaatacaatgtcagtttttaaaagtcaaagttagatcaagagaatatttcagagttttggtttacacatcaagaaacagacacacatacctaggaaagatttacacaatagataatcatcttaatgtgaaagatatttgaagtattaattttaatatattaaatatgatttctgttatagtcttctgtatggaattttgtcacttaagatgagctgcaaataaataataccttcaatggaaaaaaaaaaaaaaaaaaaaaaaaaaaaaaaaaaaaaaaaaaaaaaaaa

SEQ ID NO: 1452 - DNA, 3834 bp, Homo Sapiens
  NM_001466
gaggagagagggcagcagcgcgcggtgtctccggctgctcagtccgaccgcggcaagcaagcgggcaggcgcaccgccccctcccccgcccggcctccccaactctgcggccgcgagtaaagtttgcaaagaggcgcgggaggcggcagccgcagcgaggaggcggcggggaagaagcgcagtctccgggttgggggcgggggcggggggggcgccaaggagccgggtggggggcggcggccagcatgcggccccgcagcgccctgccccgcctgctgctgccgctgctgctgctgcccgccgccgggccggcccagttccacggggagaagggcatctccatcccggaccacggcttctgccagcccatctccatcccgctgtgcacggacatcgcctacaaccagaccatcatgcccaaccttctgggccacacgaaccaggaggacgcaggcctagaggtgcaccagttctatccgctggtgaaggtgcagtgctcgcccgaactgcgcttcttcctgtgctccatgtacgcacccgtgtgcaccgtgctggaacaggccatcccgccgtgccgctctatctgtgagcgcgcgcgccagggctgcgaagccctcatgaacaagttcggttttcagtggcccgagcgcctgcgctgcgagcacttcccgcgccacggcgccgagcagatctgcgtcggccagaaccactccgaggacggagctcccgcgctactcaccaccgcgccgccgccgggactgcagccgggtgccgggggcaccccgggtggcccgggcggcggcggcgctcccccgcgctacgccacgctggagcaccccttccactgcccgcgcgtcctcaaggtgccatcctatctcagctacaagtttctgggcgagcgtgattgtgctgcgccctgcgaacctgcgcggcccgatggttccatgttcttctcacaggaggagacgcgtttcgcgcgcctctggatcctcacctggtcggtgctgtgctgcgcttccaccttcttcactgtcaccacgtacttggtagacatgcagcgcttccgctacccagagcggcctatcatttttctgtcgggctgctacaccatggtgtcggtggcctacatcgcgggcttcgtgctccaggagcgcgtggtgtgcaacgagcgcttctccgaggacggttaccgcacggtggtgcagggcaccaagaaggagggctgcaccatcctcttcatgatgctctacttcttcagcatggccagctccatctggtgggtcatcctgtcgctcacctggttcctggcagccggcatgaagtggggccacgaggccatcgaggccaactctcagtacttccacctggccgcctgggccgtgccggccgtcaagaccatcaccatcctggccatgggccagatcgacggcgacctgctgagcggcgtgtgcttcgtaggcctcaacagcctggacccgctgcggggcttcgtgctagcgccgctcttcgtgtacctgttcatcggcacgtccttcctcctggccggcttcgtgtcgctcttccgcatccgcaccatcatgaagcacgacggcaccaagaccgaaaagctggagcggctcatggtgcgcatcggcgtcttctccgtgctctacacagtgcccgccaccatcgtcatcgcttgctacttctacgagcaggccttccgcgagcactgggagcgctcgtgggtgagccagcactgcaagagcctggccatcccgtgcccggcgcactacacgccgcgcatgtcgcccgacttcacggtctacatgatcaaatacctcatgacgctcatcgtgggcatcacgtcgggcttctggatctggtcgggcaagacgctgcactcgtggaggaagttctacactcgcctcaccaacagccgacacggtgagaccaccgtgtgagggacgcccccaggccggaaccgcgcggcgctttcctccgcccggggtggggcccctacagactccgtattttatttttttaaataaaaaacgatcgaaaccatttcacttttaggttgctttttaaaagagaactctctgcccaacacccccacaaggtttgtaattaaaactgtaaatagtctttgtaaatttaattatatatattttctatttaaaagaaaaaaggagaaaaaaaaacaggggtgtgggcgccaggactgaagaatgaggtgtgtgtgtgttggggagtgtagttggggggagggttctctttcttaagtgcccttcaaaacccgccccacttttggagttttttggtgatatggcagggctgggcctgatgggagaggcacccagcctgagcgctgtttttgttggctttgagtcgttaggagtttgttccattcaactaatataaaagccaaatttgtgagcctcctctctgacgctgggcctgtggaagccgttggatatttttgaacaggacttggattcgttttgtttccttcccccttttctttccctactcatttgtcctgtcttcttcactcactcttggaaaagtcccaacagagatgaagacgtggaaaaaaaaatcggggtcggggtgtgctggtggggagagggcagagatccggtgaggaatggcttccaccccctggcccattcccctgcaggctggaagatctttctcctgtctggcttctcttcttttcaattcgctgcaccaagtgcttccagtggcccaaaaatgctttttgaagtgtgttttgaaacagcccccaccaacatacaccccaccaggagtactgatcctgcctcccttcatgtctaggggaagcattcgcctttgagcacttgtttgcaaatctggggagtttgagacctcctagcatctcttcccttctttccctgcagtctattcactcccgcagccaaaaatctctggcgttcaggttagcagtttctgggttggtttgtgtgggtttttgttgttgtttggggcttatttttttcaaaaagtgataaagacgggtgggttggagggaggggactgatgggctggtgggctttttagttttcctttgagaaaaagactggtttatttaaaatttgtccagaaaaaaatgaaaaaaaaaaaaaaggtggtatctttgctttagaagaagtctctggataggccctttgtggctgtgggggtgggttgagtgtttacattacattctatatcacaagattgataggatgtttaaagcagatgtttcttatcttcccctgagcccctacaaataaagtcaagacttttctttttttgagacggagtcttgctctgtcgcccaggctggagtgcagtggtgcgatcttggctcactgcaacctccactgcagcgtttctcctgcctcagcctcccaagtagctgggactacaggcgcacgccaccactccttgctaatttttgtatttttagtagacacagggtttcaccatattggccaggctggtctcgaactcctgacctcgttatctgcctgcctcggcctcctaaagtgctgggattacaggagtgagccacagtgcctggcctgtcaagacttctcttaagttaacttcctgagaagtgatgtctaaaagtatctttgctggtgtgagaactccagtttccaacacatattatttccctcaactatttggaatattttagaattttaattccaaaggattagtttgaatacaagtatgccacataactcagttttcgccatcttccatttcttaacagtgtaaattaaaagctaataatcataataataaagtgcatttaattatctttgaaaaaaaaaaaaaaaa

SEQ ID NO: 1453 - DNA, 2117 bp, Homo Sapiens
  NM_001467
gcttgcgcagccttcgctagccccgccccgtcctattcgggctcccgcctctgttcaggacactgggtccccttggagcctccccaggcttaatgattgtccagaaggcggctataaagggagcctgggaggctgggtggaggagggagcagaaaaaacccaactcagcagatctgggaactgtgagagcggcaagcaggaactgtggtcagaggctgtgcgtcttggctggtagggcctgctcttttctaccatggcagcccagggctatggctattatcgcactgtgatcttctcagccatgtttgggggctacagcctgtattacttcaatcgcaagaccttctcctttgtcatgccatcattggtggaagagatccctttggacaaggatgatttggggttcatcaccagcagccagtcggcagcttatgctatcagcaagtttgtcagtggggtgctgtctgaccagatgagtgctcgctggctcttctcttctgggctgctcctggttggcctggtcaacatattctttgcctggagctccacagtacctgtctttgctgccctctggttccttaatggcctggcccaggggctgggctggcccccatgtgggaaggtcctgcggaagtggtttgagccatctcagtttggcacttggtgggccatcctgtcaaccagcatgaacctggctggagggctgggccctatcctggcaaccatccttgcccagagctacagctggcgcagcacgctggccctatctggggcactgtgtgtggttgtctccttcctctgtctcctgctcatccacaatgaacctgctgatgttggactccgcaacctggaccccatgccctctgagggcaagaagggctccttgaaggaggagagcaccctgcaggagctgctgctgtccccttacctgtgggtgctctccactggttaccttgtggtgtttggagtaaagacctgctgtactgactggggccagttcttccttatccaggagaaaggacagtcagcccttgtaggtagctcctacatgagtgccctggaagttgggggccttgtaggcagcatcgcagctggctacctgtcagaccgggccatggcaaaggcgggactgtccaactacgggaaccctcgccatggcctgttgctgttcatgatggctggcatgacagtgtccatgtacctcttccgggtaacagtgaccagtgactcccccaagctctggatcctggtattgggagctgtatttggtttctcctcgtatggccccattgccctgtttggagtcatagccaacgagagtgcccctcccaacttgtgtggcacctcccacgccattgtgggactcatggccaatgtgggcggctttctggctgggctgcccttcagcaccattgccaagcactacagttggagcacagccttctgggtggctgaagtgatttgtgcggccagcacggctgccttcttcctcctacgaaacatccgcaccaagatgggccgagtgtccaagaaggctgagtgaagagagtccaggttccggagcaccatcccacggtggccttccccctgcacgctctgcggggagaaaaggaggggcctgcctggctagccctgaacctttcactttccatttctgcgccttttctgtcacccgggtggcgctggaagttatcagtggctagtgaggtcccagctccctgatcctatgctctatttaaaagataacctttggccttagactccgttagctcctatttcctgccttcagacaaacaggaaacttctgcagtcaggaaggctcctgtacccttcttcttttcctaggccctgtcctgcccgcatcctaccccatccccacctgaagtgaggctatccctgcagctgcagggcactaatgacccttgacttctgctgggtcctaagtcctctcagcagtgggtgactgctgttgccaatacctcagactccagggaaagagaggaggccatcattctcactgtaccactaggcgcagttggatataggtgggaagaaaaggtgacttgttatagaagattaaaactagatttgatactgaacacaaaaaaaaaaaaaaa

SEQ ID NO: 1454 - DNA, 2156 bp, Homo Sapiens
  NM_001469
gcgcatgcgtggattgtcgtcttctgtccaagttggtcgcttccctgcgccaaagtgagcagtagccaacatgtcagggtgggagtcatattacaaaaccgagggcgatgaagaagcagaggaagaacaagaagagaaccttgaagcaagtggagactataaatattcaggaagagatagtttgatttttttggttgatgcctccaaggctatgtttgaatctcagagtgaagatgagttgacaccttttgacatgagcatccagtgtatccaaagtgtgtacatcagtaagatcataagcagtgatcgagatctcttggctgtggtgttctatggtaccgagaaagacaaaaattcagtgaattttaaaaatatttacgtcttacaggagctggataatccaggtgcaaaacgaattctagagcttgaccagtttaaggggcagcagggacaaaaacgtttccaagacatgatgggccacggatctgactactcactcagtgaagtgctgtgggtctgtgccaacctctttagtgatgtccaattcaagatgagtcataagaggatcatgctgttcaccaatgaagacaacccccatggcaatgacagtgccaaagccagccgggccaggaccaaagccggtgatctccgagatacaggcatcttccttgacttgatgcacctgaagaaacctgggggctttgacatatccttgttctacagagatatcatcagcatagcagaggatgaggacctcagggttcactttgaggaatccagcaagctagaagacctgttgcggaaggttcgcgccaaggagaccaggaagcgagcactcagcaggttaaagctgaagctcaacaaagatatagtgatctctgtgggcatttataatctggtccagaaggctctcaagcctcctccaataaagctctatcgggaaacaaatgaaccagtgaaaaccaagacccggacctttaatacaagtacaggcggtttgcttctgcctagcgataccaagaggtctcagatctatgggagtcgtcagattatactggagaaagaggaaacagaagagctaaaacggtttgatgatccaggtttgatgctcatgggtttcaagccgttggtactgctgaagaaacaccattacctgaggccctccctgttcgtgtacccagaggagtcgctggtgattgggagctcaaccctgttcagtgctctgctcatcaagtgtctggagaaggaggttgcagcattgtgcagatacacaccccgcaggaacatccctccttattttgtggctttggtgccacaggaagaagagttggatgaccagaaaattcaggtgactcctccaggcttccagctggtctttttaccctttgctgatgataaaaggaagatgccctttactgaaaaaatcatggcaactccagagcaggtgggcaagatgaaggctatcgttgagaagcttcgcttcacatacagaagtgacagctttgagaaccccgtgctgcagcagcacttcaggaacctggaggccttggccttggatttgatggagccggaacaagcagtggacctgacattgcccaaggttgaagcaatgaataaaagactgggctccttggtggatgagtttaaggagcttgtttacccaccagattacaatcctgaagggaaagttaccaagagaaaacacgataatgaaggttctggaagcaaaaggcccaaggtggagtattcagaagaggagctgaagacccacatcagcaagggtacgctgggcaagttcactgtgcccatgctgaaagaggcctgccgggcttacgggctgaagagtgggctgaagaagcaggagctgctggaagccctcaccaagcacttccaggactgaccagaggccgcgcgtccagctgcccttccgcagtgtggccaggctgcctggccttgtcctcagccagttaaaatgtgtttctcctgagctaggaagagtctacccgacataagtcgagggactttatgtttttgaggctttctgttgccatggtgatggtgtagccctcccactttgctgttccttactttactgcctgaataaagagccctaagtttgtactatatactgttaaaaaaaaaaaaaaaaaaaaaaa

SEQ ID NO: 1455 - DNA, 1335 bp, Homo Sapiens
  NM_001485
gacttttcgcctctcgctggcctctaccgagcgcgtctatgagcgcagcgttcccgccgtcgctgatgatgatgcagcgcccgctggggagtagcaccgccttcagcatagactcgctgatcggcagcccgccgcagcccagccccggccatttcgtctacaccggctaccccatgttcatgccctaccggccggtagtgctgccgccgccgccgccgccgccgcccgcgctgccccaggccgcgctgcagccagcgctgccgcccgcacaccctcaccaccagatccccagcctgcccacaggcttctgctccagcctggcgcagggcatggcgctcacctctacgctcatggccacgctccccggcggcttctccgcgtcgccccagcaccaggaggcggcagcggcccgcaagttcgcgccgcagccgctgcccggcggcggtaacttcgacaaggcggaggcgctgcaggctgacgcggaggacggcaaaggcttcctggccaaagagggctcgctgctcgccttctccgcggccgagacggtgcaggcttcgctcgtcggggctgtccgagggcaagggaaagacgagtcaaaggtggaagacgacccgaagggcaaggaggagagcttctcgctggagagcgatgtggactacagctcggatgacaatctgactggccaggcagctcacaaggaggaagacccgggccacgcgctggaggagaccccgccgagcagcggcgccgcgggcagcaccacgtctacgggcaagaaccggcggcggcggactgccttcaccagcgagcagctgctggagctagagaaggagttccactgcaaaaagtacctctccttgaccgagcgctcgcagatcgcccacgccctcaaactcagcgaggtgcaggtgaaaatctggttccagaaccgacgggccaagtggaaacgggtgaaggcaggcaatgccaattccaagacaggggagccctcccggaaccctaagatcgtcgtccccatccctgtccacgtcagcaggttcgctatcagaagtcagcatcagcagctagaacaggcccggccctgagggtccagaagggccagggcctggcacccacctggagaagcccccgcacccgagggaacccatggtggactccactgtgtttgaagcaacaaagtcacagcccagctgtggccatcccaagcaaattgagaatatattcactaaatgggcttaaaagactgcttttgaaggggcttacagccacaccagaagacacgctaaatatttattatactatcctactttgtacataaatatctctatagactgg

SEQ ID NO: 1456 - DNA, 590 bp, Homo Sapiens
  NM_001487
acacagcggtcacgtgacatggccccggggagccgaggtgagcgttccagcttccggagccggagggggcccggcgtacccagcccccagcccgacgtgaccatgctgtcccgcctcctaaaagaacaccaggccaagcagaatgaacgcaaggagctgcaggaaaagaggaggcgagaggctatcactgcagcgacctgcctgacagaagctttggtggatcacctcaatgtgggtgtggcccaggcctacatgaaccagagaaagctggaccatgaggtgaagaccctacaggtccaggctgcccaatttgccaagcagacaggccagtggatcggaatggtggagaacttcaaccaggcactcaaggaaattggggatgtggagaactgggctcggagcatcgagctggacatgcgcaccattgccactgcactggaatatgtctacaaagggcagctgcagtctgccccttcctagcccctgttccctcccccaaccctatccctcctacctcacccgcagggggaaggagggaggctgacaagccttgaataaaacacaagcctccgtttctcaaaaaaaaaaaa

SEQ ID NO: 1457 - DNA, 1698 bp, Homo Sapiens
  NM_001500
cccggccctccctgcacggcctcccgtgcgcccctgtcagactgtggcggccggtcgcgcggtgcgctctccctccctgcccgcagcctggagaggcgcttcgtgctgcacacccccgcgttcctgccggcaccgcgcctgccctctgccgcgctccgccctgccgccgaccgcacgcccgccgcgggacatggcacacgcaccggcacgctgccccagcgcccggggctccggggacggcgagatgggcaagcccaggaacgtggcgctcatcaccggtatcacaggccaggatggttcctacctggctgagttcctgctggagaaaggctatgaggtccatggaattgtacggcggtccagttcatttaatacgggtcgaattgagcatctgtataagaatccccaggctcacattgaaggaaacatgaagttgcactatggcgatctcactgacagtacctgccttgtgaagatcattaatgaagtaaagcccacagagatctacaaccttggagcccagagccacgtcaaaatttcctttgacctcgctgagtacactgcggacgttgacggagttggcactctacgacttctagatgcagttaagacttgtggccttatcaactctgtgaagttctaccaagcctcaacaagtgaactttatgggaaagtgcaggaaataccccagaaggagaccacccctttctatccccggtcaccctatggggcagcaaaactctatgcctattggattgtggtgaacttccgtgaggcgtataatctctttgcagtgaacggcattctcttcaatcatgagagtcccagaagaggagctaatttcgttactcgaaaaattagccggtcagtagctaagatttaccttggacaactggaatgtttcagtttgggaaatctggatgccaaacgagattggggccatgccaaggactatgtggaggctatgtggttgatgttgcagaatgatgagccggaggacttcgttatagctactggggaggtccatagtgtccgggaatttgtcgagaaatcattcttgcacattggaaaaaccattgtgtgggaaggaaagaatgaaaatgaagtgggcagatgtaaagagaccggcaaagttcacgtgactgtggatctcaagtactaccggccaactgaagtggactttctgcagggcgactgcaccaaagcgaaacagaagctgaactggaagccccgggtcgctttcgatgagctggtgagggagatggtgcacgccgacgtggagctcatgaggacaaaccccaatgcctgagcagcgcctcggagcccggcccgccctccggctacaatccccgcagagtctccggtgcagacgcgctgcggggatggggagcggcgtgccaatctgcgggtcccctgcggcccctgctgccgctgcgctgtcccggccgcaagagcggggccgccccgccgaggtttgtagcagccgggatgtgaccctccagggtttgggtcgctttgcgtttgtcgaagcctcctctgaatggctttgtgaaatcaagatgttttaatcacattcactttacttgaaattatgttgttacacaacaaattgtggggccttcaaattgtttttctcttttcatattaaaaatggtctttctgtgaactagcaaaaaaaaaaaaaaaaaaaaaaaaaaa

SEQ ID NO: 1458 - DNA, 1670 bp, Homo Sapiens
  NM_001504
ccaaccacaagcaccaaagcagaggggcaggcagcacaccacccagcagccagagcaccagcccagccatggtccttgaggtgagtgaccaccaagtgctaaatgacgccgaggttgccgccctcctggagaacttcagctcttcctatgactatggagaaaacgagagtgactcgtgctgtacctccccgccctgcccacaggacttcagcctgaacttcgaccgggccttcctgccagccctctacagcctcctctttctgctggggctgctgggcaacggcgcggtggcagccgtgctgctgagccggcggacagccctgagcagcaccgacaccttcctgctccacctagctgtagcagacacgctgctggtgctgacactgccgctctgggcagtggacgctgccgtccagtgggtctttggctctggcctctgcaaagtggcaggtgccctcttcaacatcaacttctacgcaggagccctcctgctggcctgcatcagctttgaccgctacctgaacatagttcatgccacccagctctaccgccgggggcccccggcccgcgtgaccctcacctgcctggctgtctgggggctctgcctgcttttcgccctcccagacttcatcttcctgtcggcccaccacgacgagcgcctcaacgccacccactgccaatacaacttcccacaggtgggccgcacggctctgcgggtgctgcagctggtggctggctttctgctgcccctgctggtcatggcctactgctatgcccacatcctggccgtgctgctggtttccaggggccagcggcgcctgcgggccatgcggctggtggtggtggtcgtggtggcctttgccctctgctggaccccctatcacctggtggtgctggtggacatcctcatggacctgggcgctttggcccgcaactgtggccgagaaagcagggtagacgtggccaagtcggtcacctcaggcctgggctacatgcactgctgcctcaacccgctgctctatgcctttgtaggggtcaagttccgggagcggatgtggatgctgctcttgcgcctgggctgccccaaccagagagggctccagaggcagccatcgtcttcccgccgggattcatcctggtctgagacctcagaggcctcctactcgggcttgtgaggccggaatccgggctcccctttcgcccacagtctgacttccccgcattccaggctcctccctccctctgccggctctggctctccccaatatcctcgctcccgggactcactggcagccccagcaccaccaggtctcccgggaagccaccctcccagctctgaggactgcaccattgctgctccttagctgccaagccccatcctgccgcccgaggtggctgcctggagccccactgcccttctcatttggaaactaaaacttcatcttccccaagtgcggggagtacaaggcatggcgtagagggtgctgccccatgaagccacagcccaggcctccagctcagcagtgactgtggccatggtccccaagacctctatatttgctcttttatttttatgtctaaaatcctgcttaaaacttttcaataaacaagatcgtcaggaccaaaaaaaaaaaaaaaaaaaaaaaaaaaaaaaaaaaaaaaaaaaaaaa

SEQ ID NO: 1459 - DNA, 1651 bp, Homo Sapiens
  NM_001514
acgactgcgtgggtgagtcgtctataaaaactcatctctgcgcgtctcttcgccacattcgcttcctgctttcggtgtgtctgttgtgtcttgttgcgggcaccgcagtcgccgtgaagatggcgtctaccagccgtttggatgctcttccaagagtcacatgtccaaaccatccagatgcgattttagtggaggactacagagccggtgatatgatctgtcctgaatgtggcttggttgtaggtgaccgggttattgatgtgggatctgaatggcgaactttcagcaatgacaaagcaacaaaagatccatctcgagttggagattctcagaatcctcttctgagtgatggagatttgtctaccatgattggcaagggcacaggagctgcaagttttgacgaatttggcaattctaagtaccagaatcggagaacaatgagcagttctgatcgggcaatgatgaatgcattcaaagaaatcactaccatggcagacagaatcaatctacctcgaaatatagttgatcgaacaaataatttattcaagcaagtatatgaacagaagagcctgaagggaagagctaatgatgctatagcttctgcttgtctctatattgcctgtagacaagaaggggttcctaggacatttaaagaaatatgtgccgtatcacgaatttctaagaaagaaattggtcggtgttttaaacttattttgaaagcgctagaaaccagtgtggatttgattacaactggggacttcatgtccaggttctgttccaacctttgtcttcctaaacaagtacagatggcagctacacatatagcccgtaaagctgtggaattggacttggttcctgggaggagccccatctctgtggcagcggcagctatttacatggcctcacaggcatcagctgaaaagaggacccaaaaagaaattggagatattgctggtgttgctgatgttacaatcagacagtcctatagactgatctatcctcgagccccagatctgtttcctacagacttcaaatttgacaccccagtggacaaactaccacagctataaattgaggcagctaacgtcaaattcttgaatacaaaactttgcctgttgtacatagcctatacaaaatgctgggttgagcctttcatgaggaaaaacaaaagacatggtacgcattccagggctgaatactattgcttggcattctgtatgtatatactagtgaaacatatttaatgatttaaatttcttatcaaatttcttttgtagcaatctaggaaactgtattttggaagatatttgaaattatgtaattcttgaataaaacatttttcaaaactcaagtttttgttatatgttacatgtaacttatgatacataattacaaataatgcaaatcattgcagctaataaagctgatagactttatttccattacttatatatacatagttttttattttaataaatttatggaaagagcaaaagcttttgagaaccattgttaacatcaacatcatagtttccagtttgaaaggatgtgtatgtgagatttattatgtatattattaaacaagaagtgatgagcttgggccttgaaaggcaccagcttgagagacattaaaatgttctaagtaaaaaaa

SEQ ID NO: 1460 - DNA, 1505 bp, Homo Sapiens
  NM_001516
ctctgcgctgaggtgctgggacagccatggtttcagacgaagatgaattgaatcttctggttattgtagttgatgccaacccaatttggtggggaaagcaagcattaaaggaatctcagttcactttatccaaatgcatagatgccgtgatggtgctgggaaattcgcatttattcatgaatcgttccaacaaacttgctgtgatagcaagtcacattcaagaaagccgattcttatatcctggaaagaatggcagacttggagacttcttcggagaccctggcaaccctcctgaatttaatccctctgggagtaaagatggaaaatacgaacttttaacctcagcaaatgaagttattgttgaagagattaaagatctaatgaccaaaagtgacataaagggtcaacatacagaaactttgctggcaggatccctggccaaagccctttgctacattcatagaatgaacaaggaagttaaagacaatcaggaaatgaaatcaaggatattggtgattaaggctgcagaagacagtgcgttgcagtatatgaacttcatgaatgtcatctttgcagcacagaaacagaatattttgattgatgcctgtgttttagactccgactcagggctcctccaacaggcttgtgacatcacgggaggactgtacctgaaggtgcctcagatgccttctcttctgcagtatttgctgtgggtgtttcttcccgatcaagatcagagatctcagttaatcctcccacccccagttcatgttgactacagggctgcttgcttctgtcatcgaaatctcattgaaattggttatgtctgttctgtgtgtttgtcaatattctgcaatttcagccccatttgtactacgtgcgagacagcctttaaaatttctctgcctccagtgctgaaagccaagaaaaagaaactgaaagtgtctgcctgaggataaaatattttccccatcttttagagctgttaatagaaattatatagcagattctttgttgggaagactgaaaaaaataaagataggtataggataatttttaatatggtgaccttacagaaaatatttcccaaacatccttttcatcctgtgcttctggaggactgatttgtttgagggaatcattctatgcattatatcctaaaatattctatgactggtttctgtccatgtttgtggctttcatttttttaatgggatgactattagtcaaagtcagcttgtcatgactcatcataggctttctaacctactccctgaatccgggtcctcattgtgaaatgcatgccatacgaaatttgaacgtagctttggaaaaagggactatttgtggagtaatggcattaatcaacatagaacatcttatttgaatcaacagttaacttcagtagtcatgtgaataaaattcttattgtctaaattgagacagcctcagatatttgcagatatttactttttgtctgatatcagtacatatttggacaaagt

SEQ ID NO: 1461 - DNA, 1736 bp, Homo Sapiens
  NM_001517
cttttccactcctccccttacctcccttctcttctgaattctccattctgggctcttgcctgtgaaatctttctttgctttccccatcttttcctcgcattttttcaccatctttccctcaatctccaggagccaatgcgagactttggctccgattaagcgacggcccgagactcggggtgcgcgaggaggatcgacagagtggtgatggagagcaccccttcaaggggactgaaccgagtacacctacaatgcaggaatctgcaggaattcttagggggcctgagccctggggtattggaccgattgtatgggcaccctgccacatgtctggctgtcttcagggagctcccatccttggctaagaactgggtgatgcggatgctctttctggagcagcctttgccacaggctgctgtagctctgtgggtaaagaaggaattcagcaaggctcaggaggaaagtacagggctgctgagcggcctccggatctggcacacacagctgctcccaggcgggctccagggcctcatcctcaaccccattttccgccagaacctccgcattgcccttctgggtggggggaaggcctggtctgatgacacaagtcagctgggaccagacaagcatgcccgggacgttccctcccttgacaagtacgccgaggagcgatgggaggtggtcttgcacttcatggtgggctcccccagtgcagctgtcagccaggacttggctcagctcctcagccaggctgggctcatgaagagtactgaacctggagagccgccctgcattacttccgctggcttccagttcctgttgctggacaccccggctcagctctggtactttatgttgcagtatttgcagacagcccagagccggggcatggacctggtagagattctctccttcctcttccagctcagcttctctactctgggcaaggattactctgtggaaggtatgagtgattctctgttgaacttcctgcaacatctgcgtgagtttgggcttgttttccagaggaagaggaaatctcggcgttactaccccacacgcctggccatcaatctctcatcaggtgtctctggagctgggggcactgtgcatcagccaggtttcattgtcgtggaaaccaattaccgactgtatgcctacacggagtcggagctgcagattgccctcattgccctcttctctgagatgctctatcggttccccaacatggtggtggcgcaggtgacccgggagagtgtgcagcaggcaatcgccagtggcatcacagcccagcagataatccatttcctaaggacaagagcccacccagtgatgctcaaacagacacctgtgctgccccccaccatcaccgaccagatccggctctgggagctggaaagggacagactccggttcactgagggtgtcctgtataaccagttcctgtcgcaagtggactttgagctgctgctggcccacgcgcgggagctgggcgtgctcgtgttcgagaactcggccaagcggctcatggtggtgaccccggccgggcacagcgacgtcaagcgcttttggaagcggcagaaacatagctcctgagagcgcgggacttggacacggacctcggcgggcgggactgggcggggcggggcatcagaactcaggtgttttttatttacgcgtcagggcttttcttgtttaataaagttatgatagctaaaaaaaaaaaaaaaaaaaaa

SEQ ID NO: 1462 - DNA, 3660 bp, Homo Sapiens
  NM_001519
cggctgcgctcaccggtaggccccgctcgggttccgccgaagcccagcccccgcaggtcgcccctccgacgccggcgcgccgcaagggaggccagctcgctcgcagtggggaggtcgcggctccagtcctcgcgtccccgccgtggtcccggtgcctgtcccatcccgcgggcgcggccgttgcgggcggcgcggcccgggcgcgcgcggcgaatctgcggctgcgaatcggctggagcggggcctcgcgagagcggcgaggcctgggcggctgggcctgggcgggcggcgcgggctgctccggaggctcgggtggcttgagagtcttgggaggctccgggcgctgcccgcgcggtcgccggcatgacgggccgcgtgtgccgcggttgcggcggcacggacatcgagctggacgcggcgcgcggggacgcggtgtgcaccgcctgcggctcagtgctggaggacaacatcatcgtgtccgaggtgcagttcgtggagagcagcggcggcggctcctcggccgtgggccagttcgtgtccctggacggtgctggcaaaaccccgactctgggtggcggcttccacgtgaatctggggaaggagtcgagagcgcagaccctgcagaatgggaggcgccacatccaccacctggggaaccagctgcagctgaaccagcactgcctggacaccgccttcaacttcttcaagatggccgtgagcaggcacctgacccgcggccggaagatggcccacgtgattgctgcctgcctctacctggtctgccgtacggagggcacgccgcacatgctcctggacctcagcgacctgctccaggtgaatgtgtacgtgcttggaaagacgtttcttctcttggcaagagagctctgcatcaatgcgccggccatagacccgtgcctgtatattccacgctttgcgcacctgctggaattcggggagaagaaccacgaggtgtccatgactgccctgaggctcctacagaggatgaagcgggactggatgcacacaggccggcgcccctcgggcctctgcggagcagcgctcctggttgcagccagaatgcatgacttcaggaggactgtgaaggaggtcatcagtgtggtcaaagtgtgtgagtccacgctgcggaagaggctcacggaatttgaagacacccccaccagtcagttgaccattgatgagttcatgaagatcgacctggaggaggagtgcgaccccccctcgtacacagctgggcagaggaagctgcggatgaagcagcttgaacaagtcctgtcaaaaaaactggaggaggttgaaggtgaaatatccagttaccaggatgcaattgagattgaactagaaaacagccggccaaaggccaaggggggcctggccagcctggcaaaagatggctccaccgaggacaccgcgtccagcttgtgtggcgaggaggacacagaggacgaggagctggaagccgcggccagccacctgaacaaagacttataccgggagctccttggtggtgcccccggcagctcggaagcagcaggaagccccgagtggggcggcagacctccggccctggggtccctgctggaccccctccccactgcagccagcctgggcatctcagactccatccgcgaatgcatctcctctcagagcagcgaccccaaagatgcttcaggagacggtgagctggacctcagtggcattgatgacctggagattgacaggtacatcctgaatgagtcggaagcccgcgtgaaggccgagctgtggatgagggagaacgccgagtacctgcgggaacagagggaaaaagaagcaagaatagcgaaagagaaggagctcggcatctacaaggaacacaagcccaagaagtcttgcaagcgacgggagccaattcaggccagtaccgccagggaggccatcgagaagatgctggagcagaagaagatctccagcaagatcaattatagcgtgctccggggcctcagcagcgccggcgggggcagtccgcacagggaggatgcacagcccgagcatagcgccagtgccaggaagctgtcacgaaggaggacgccggccagcagaagtggggctgaccctgtgaccagtgtggggaaaaggttgaggcctctggtgtctacgcagccagcaaagaaggtggccacgggagaggctttgctcccaagctctcccaccctcggagctgagcctgccaggccccaggcggtgctggtggagagcgggcccgtgtcataccacgccgacgaggaggctgacgaggaggagcctgacgaggaggacggggagccctgcgtcagtgccctgcagatgatgggcagcaacgactatggctgtgatggcgatgaggacgacggctactgaagtgtggcctccaggcaggtgatgtcctggcagggggcctcgcgggtctcctcagcatcagacgggcttccaggaccgcagcaggcaggccccagcgccgagactcctggtgacaggtggcacctgtcccacagccctcgtcccatgtggaacttaccattgggattgtgtttctattcagcaagggaaaccggaccaagcgtctgcatgtgtgtgatcagatgtgggccgggtgtgtgcagggctgggtcccgctgcctgccgtcgactcatccaaggaccctccaaggctggcagtgtggtgttgctactattaaggaaacaggcttggggcagccccactgctggtccaagtgtgtggagggctgagtgtgctggccctgtgactcaggaccagctctggagtctccagcccaccctccgcaccgtcccctcctgagcagcactcggcgccagcagcctctgccagagtggaagccagagccctgcaggtgtccggcgcagccgtgggagctgaggatctggcacttgagaggcagcagctccttgaaggtcctctgcctccagctgtggccctgcatccagatacctgcctcgtccgaggcagacacccccacccctgcctcctccagacccccctccccgctgcctgcaccgcctggagcagcatgggggtcagacccctgctccagggccacttgagttgtgggcccaggagccctgcggctgccggcaggtgaactgagtgcccgacagctgagaccggcgcccacccgtcctgagcatagctctgtaggcagtgcgggcatagcctgcatagtgtcctggcgctgggagttccccgtggacagagccagagggcagtggcgctccctgtcagagctggatcaggccccccatcgaggagggagggcagacggaggcccgagagcctccccaggcctcttcgtgggaaggccccagtaccactcgtaggaggtctcagctctggcatggctgccccggatgtggccgagggggcttcaccctgtgtccttaggagggggtggccttgaggcagagccgtgcctcactgacccccaggggcctcatcctccccatggaatgggctgtatgtcctgccccaacttggcccgcagcaggccagacccccctacccccgcccagagctcagtagccagcctgggtcctgccagggcttctcgagggcttgggggaagaatagatttagtaaagcaggaagatctgttgttacttaacaga

SEQ ID NO: 1463 - DNA, 7124 bp, Homo Sapiens
  NM_001520
cgttgcgcatgcgccccgggcgccgccgactgaagtagcaatggacgcgctggagtcgttgttggacgaagtcgctctggaggggctcgatggcctgtgtctgccagcgctgtggagccggctggagacgcgagtgccgcccttcccgctgcctttggaaccctgcacgcaggagtttctctggcgggccctcgccacgcacccgggcatcagcttctatgaggagcctcgggagcgacccgacctacagctccaggaccggtatgaagaaattgatttggaaactggaattttggagtctaggagggacccggtggctttggaggatgtctaccccattcatatgatcttagagaataaggatggcatccagggctcatgccgctactttaaggagaggaaaaacattaccaatgacatcagaaccaagtccttgcagcctcgctgtacaatggtggaagcctttgacaggtgggggaagaaactgatcatcgttgcctcccaggccatgcggtacagggccttgataggccaggagggggatcccgacctgaagctgcccgacttctcctactgcatcctggaacggctaggccggtccaggtggcaaggggagctccagcgagaccttcacaccactgctttcaaggttgatgctgggaagctgcactatcacagaaaaattttgaacaaaaacgggctgattacaatgcagtcccatgtgatccgattacccactggagcccagcaacactcaatcctcctcctactgaaccggtttcatgtggacaggaggagcaaatacgacatcctcatggagaagctttcggtcatgctgagcacacggactaaccacatagagacgctgggaaagctgagggaagagctggggctgtgcgaaaggacgtttaagcgtctgtaccagtatatgctgaacgccgggctagccaaggtggtgtctcttcgcttgcaagagatccaccctgaatgtggaccttgtaagacaaagaaagggaccgacgtcatggttcggtgcctcaagctgctgaaggaatttaaacggaatgaccatgatgatgacgaggacgaggaggtcatctccaagacagtgcctccagtggacattgtgttcgagcgggatatgctcacacagacctacgacctcattgagcgcagaggcacgaaaggaatttcccaagctgaaatccgagtggctatgaatgtgggaaaactagaagcaagaatgctgtgccgacttcttcaaagattcaaagttgtcaagggattcatggaagacgaaggtcggcagcgaaccaccaagtacatttcctgcgtgtttgcagaggagagcgacctaagccggcagtaccaaagagagaaggcccgcagcgagctcttgaccaccgtgagcctggcgtctatgcaggaggagtcgcttctgcctgaaggcgaggacaccttcctctctgagtcggacagtgaggaggagaggagcagcagcaagcggagaggcagagggtcccagaaagacacaagagcctctgcaaacctccggcccaagacccagcctcatcactccaccccaaccaagggtgggtggaaagttgtaaacctacacccattgaaaaagcagccgccctccttcccaggagctgctgaagagagagcctgccagagccttgccagcagggacagcctcttagataccagcagcgtctcagaacccaacgtgtcctttgtctcccactgtgcggacagcaacagtggtgacatagctgtgatcgaggaggtccggatggaaaacccaaaggagagtagcagttccctgaagactgggaggcacagctcaggccaagacaaaccacacgaaacttaccgactgctgaaacgcaggaatctgatcatagaagctgtcaccaatcttcgcttaatcgagagtttattcacgattcagaagatgatcatggatcaggagaagcaggaaggcgtgtccaccaagtgctgcaagaagtccattgtccgcttggtgcggaacctgtctgaggaaggtctcttgcgattgtatcggaccactgtcattcaagatggcatcaagaagaaggtggatctggtggtgcacccgtccatggaccagaacgaccctctagtgagaagtgccatcgagcaggtccgcttccggatctccaattcaagcacagccaacagggttaaaacttcccagcctccagtgccccaaggggaggcagaagaagacagtcaaggaaaagagggcccaagtggatcaggggactctcagctgagtgcttcctctagatcagaaagtggacggatgaaaaaaagtgataataaaatgggcataaccccgcttagaaattatcaccccattgtagttcccggactggggcgttctctaggatttctgcccaaaatgcctcgcctgcgggtggtccacatgtttctgtggtacctcatctacgggcaccctgccagcaacaccgtggagaagccaagcttcatcagtgaacggagaacgataaagcaggagtcaggcagggcaggcgtccggccgtcctcctctggaagtgcctgggaggcctgctctgaagccccatctaaaggcagccaagatggtgtcacctgggaggctgaagtggagcttgccacggagacagtgtatgtcgacgatgcctcgtggatgcgctacatccccccaatcccagtccacagggacttcggctttggctgggctctcgtcagcgacatcctcctctgccttcccctctccatcttcatccagattgtgcaagtcagctacaaggtggacaacctggaggaatttctgaacgacccgctgaagaagcacacgctgatccgctttctccccaggcccattcggcagcagcttctgtacaagaggcgttacattttttcggtggtggagaaccttcagaggctgtgctacatggggctgctacagtttggtcccacggaaaagtttcaggataaagatcaggtctttatcttcttgaagaagaatgcagtcattgttgacactaccatctgcgacccacattacaacctggcccgcagcagccggcccttcgagaggcgcctctatgtcctgaactcaatgcaggatgtggaaaactactggtttgacctgcagtgcgtctgcctcaacaccccactaggcgtggtgcgctgcccgcgcgtcaggaagaacagcagcacagaccagggcagcgacgaggagggcagcctgcagaaggagcaggagagcgccatggacaagcacaacctggagcgcaagtgcgccatgctggagtacaccactggaagccgtgaggtggtggatgaaggcttgatccctggagatgggctgggtgccgcagggctcgattccagcttctacggacacctcaagcgcaactggatctggaccagctacatcatcaaccaggccaaaaaggagaacactgccgcagagaatggactcacagtgaggctccagacatttctgtccaagcgcccaatgcccctcagtgccagaggcaacagcaggttgaatatttggggggaagcaagagtaggctccgagctctgtgctggctgggaagagcagtttgaggtggaccgagagccctcgctggaccgaaaccggagagtgaggggtgggaaaagccagaagcggaagcggctgaagaaggaccctgggaagaagatcaagagaaagaagaaaggagagttcccaggagaaaaaagcaaaaggctgcgctaccatgatgaagccgaccagagtgccctgcagcggatgacgcggcttcgtgtcacctggtctatgcaggaggatgggctgcttgtgctgtgccgcattgccagcaatgtcctcaacaccaaggtgaagggcccatttgtcacctggcaggtggtacgggacattttgcatgccacgtttgaagagtctttggataaaacatctcattccgttggacgaagagctcgctacatagtcaaaaacccacaggcctatctcaactataaagtgtgcctggccgaggtgtaccaggataaagcacttgttggagatttcatgaatcgaagaggtgactatgatgacccaaaggtttgtgccaacgagtttaaagaatttgtggagaagcttaaagaaaagttcagttcagccctaaggaattctaaccttgaaatcccagacacactccaggagctgttcgccaggtaccgagttttggcaattggggatgaaaaagatcaaaccaggaaagaggatgaacttaacagcgtggatgacatccactttctggtgcttcagaacctgatccagagcacgctggccctctcagacagtcagatgaagtcctaccagtcattccagactttccgcctctatcgggagtacaaggaccacgttcttgtgaaggccttcatggagtgccagaagaggagcttggtcaaccggcgccgggtcaaccacacgctgggccccaagaagaaccgggccctccccttcgtgccaatgtcctaccagctatcccagacctactacaggatttttacgtggcgatttccaagcaccatctgcacggagtcattccagtttttggacagaatgcgggctgccggcaagttggaccagcctgatcgtttctctttcaaagaccaggataataacgagcccacaaacgacatggtggccttttcactggacggccctggaggaaattgtgtggccgtcctgaccctcttctctctgggcctcatttctgtggatgtcaggatcccggagcagatcatcgtggtagacagctcaatggtggagaatgaggtcatcaaaagcttggggaaggacggcagcctggaggatgacgaggatgaagaggatgacttggacgaaggtgtagggggcaagcgccggagcatggaggtgaaacctgcgcaagcctcccacaccaactacctgctgatgaggggctactactcccccggcatcgtcagcacccgcaacctcaaccccaacgacagcattgtggtcaactcctgccagatgaagttccagctccgctgcacccctgtgcccgcccggctcaggcccgctgccgctcctctggaagagctaacaatgggaacctcctgcctccctgatacgttcaccaagctgataaacccccaggaaaacacctgcagcttggaggagtttgtcctccagctggagctgtctgggtatagtcccgaagacctgactgctgccttggagatcttggaagccattatagccacgggttgttttgggattgacaaggaggagctgcgcagacggttctcggccttggagaaggcaggtggtgggcgcaccaggacattcgcagattgcatccaggccctcctggagcagcatcaggtgctggaggtcggtggcaacactgcgcgcctggtagccatgggctctgcctggccttggctcctgcactccgtgcggctgaaagacagagaagacgccgacatccagagagaagacccccaggccagacccctggaggggtcttccagtgaggacagcccccccgaggggcaggcacctccttctcacagcccccggggcaccaagaggcgcgccagctgggccagtgagaatggggagaccgacgccgagggcacccagatgacccctgccaagaggccagcgctccaggactcaaatttggcccccagccttgggcccggagctgaagatggggcagaagcccaggccccatctccacccccagctcttgaagacaccgctgcagcgggagcagcacaggaagaccaagagggtgtcggtgagttcagttccccaggccaagagcagctgagcggccaggcgcagcctccagagggctctgaagaccccagagggttcacagagagtttcggagctgccaacatctcccaggcagcacgggaaagggactgtgagagtgtctgcttcatcggccggccgtggcgtgtcgtggatggccacctgaaccttcctgtatgcaagggtatgatggaggccatgctgtaccacatcatgaccaggcctggcatccccgagagctccctgctgcgccactaccagggggtcctgcagcccgtcgccgtgctggagttgctccagggcctggagtccctcggctgcatccggaagcgctggctgagaaagccaaggcctgtctcgctcttctctacacccgtggtggaagaggtggaagtgccctccagcctggacgagagccccatggctttctatgagcccaccttggactgtaccctccggctgggccgtgtgttcccccacgaggtcaactggaacaagtggatccacctctaggacccctgtgggcgtcccctccctcccagccaccgcctgccacaccactcctgcctggtgctcggcagaccccactgtgccctggccttgggtctgccgagcctcctgcagcaggggacgggtgctttggccagagtcacagactgacacgtttcccactgtactggaactctggaaagaggggctccccgacctgcccatcccccaggctcttctgggccttccccttgggaactggcctcatcacactgggagttggtgcttcttgtctctgggtctccagagtttgccccgcctgtgcacacctcacattccagactctagccatctcggcaggatctcctggctccttgagtgcccaggtgccaccaagaggaagggccttgtgggatacaccttgcagaatagggatcggtgtgccccgctgcgaggggccccccatgggggctgtggcccctccgcaggcaggacatcccaacccctggctgggactgaaccacccagagcggagcggctcccttttcagccttgtgagtcacctggcaggccccagctgggctggctgtccgtgtccctcagcctggctggtgattccttgcaggccagaaatgaagagtccctgtaggttttggttttgtttgttttattttgttctttcaccttttttcctcattaaaaaaaaaaagtccctgtggagtgtacttatttattttttgattaaagggaagtaaaatgcaaaaaaaaaaaaaaaaaa

SEQ ID NO: 1464 - DNA, 3935 bp, Homo Sapiens
  NM_001521
gcagcgtccctggcgccgctgaagacgccctggaactcggctggcttcggagggctcggtgactctggccgcgctgcattatggaatacagagtctaagagaaaactagcccggcaccgactccggaccaagcacacgtgtttaccttgtgcactggggtgggggcgtcagtgaagagcagctaacaagatttcgtcataagaccgcgaccagacaggcggcgccatcttcgaacttagacttccggaaggactttggcgaggcttgagtgtgcgtcagaatcccctgaagagcttgttaaaacacaaggtgctggccccatccagaattgctgattcggggcagccattttggggggtgctgatggatacctgcggggtcggctatgttgccctgggggaggccggccccgtggggaacatgactgtggtagactctcctggacaagaggtgctaaatcagcttgatgtcaagacctcttcagaaatgaccagtgcagaggcttccgtagagatgtcattacctacccctttgcctggatttgaggattctcctgatcagaggaggctccctccagagcaggaaagcctctccagactggaacagccagatctttcttcagagatgtcaaaggtctcaaagcctagggcctcaaagcctggccggaagagaggtggtaggacacgaaaaggccccaaaaggccccaacagcctaatcctccatcagccccactggttcctggtctcttagatcaatccaaccctctgtccacccccatgcctaagaaacgaggtcgaaagtccaaggcagagctgctgctgctgaagttgtcaaaagacctagatcggccagaatctcaatctccaaagaggccccctgaggactttgagaccccttctggggaacgaccccgccgaagggctgcccaagtggcacttctgtatcttcaggaactggctgaagagctctcaacagccctgcctgcccctgtgtcctgtcctgagggccccaaggtgagcagccccaccaaaccgaagaagatccggcagccagcagcctgtccaggtggagaagaggtggatggtgctccacgggatgaagacttttttctccaggttgaggctgaagatgtggaagaaagtgagggcccaagtgagagctcatctgaacctgagcctgtagtgccccgaagcaccccacgaggatctacttcagggaaacagaaaccacactgccgaggaatggctcccaatggcttaccaaatcatatcatggctcctgtttggaagtgcctccatctcaccaaggacttccgagagcagaaacattcatactgggagtttgctgagtggattcctttagcctggaagtggcacttgttatctgagcttgaggccgctccctacctgccccaggaggagaagtctccattgttttctgtacaacgtgaagggctacctgaagatggcaccctctaccgaataaacagatttagctcgatcacagcacatccagagcgctgggatgtgtccttcttcacggggggaccgctctgggctctggactggtgcccagtgccagagggggcaggagcctcgcaatatgtggctcttttctccagccctgacatgaatgagacacacccactgagccagcttcattcgggtcctgggctgctccagctctggggccttgggaccttgcagcaagaaagctgtcctggcaacagggcccactttgtctatgggattgcttgtgacaacggctgcatctgggacctcaagttctgccccagtggagcatgggaacttccaggcacccctcggaaggctcctctcctgccccggttgggtctcttggctctggcctgctcagacgggaaagtactgctattcagtctaccccatccggaggccctgctggctcagcaacccccagatgcagtgaagcctgccatatataaggtacaatgtgtggcaactctgcaggtggggtctatgcaagctacagacccctctgagtgtggtcagtgccttagcctggcctggatgcctaccaggccccaccaacacctagctgctggatattataatggcatggtggttttctggaaccttcccactaactcacccctgcagcggatacggctctctgatggctccttaaagctctaccccttccagtgtttcctagcccatgaccaggctgtgcgtacccttcaatggtgcaaagctaacagccatttccttgtctctgcggggagtgaccggaaaatcaaattctgggaccttcgacgtccttacgaacccataaactctatcaagcgcttcttgagtacagaactggcctggctgcttccctacaatggtgtcactgtggctcaggacaactgctatgcctcttatggactctgtgggattcattatattgacgctggttaccttggtttcaaggcctacttcactgctcctcgaaaaggcaccgtttggagtctttcaggatccgactggcttgggacaatagctgcaggagatatatccggggagctcattgctgctatattaccagatatggcactgaatccaataaatgtcaagcgacctgtagagcgaagatttcctatatataaagcagatctgataccgtatcaggacagtcctgaaggtccagaccattcttctgcttcatctggggtccccaaccctcctaaggctcgaacttacactgaaactgtcaaccatcactacttgctctttcaagacacagatttgggttcattccatgatctgctccgtagagaaccaatgctgcgcatgcaggagggagaggggcattctcaactctgcctggacaggctgcagctggaggctattcataaggtacgtttcagcccaaacctggactcctatggatggctggtatctggggggcagtcagggctggttcgaatccattttgtccgtggactcgcctccccactgggccaccgtatgcagcttgaaagccgagcccacttcaatgctatgttccaaccatcctcccccactagacggcctggcttctctccaaccagccatcgccttctgcccactccctagccttggcccacaccagatccttggagtgaagtcggtcaagaacaaatggcccctatgcacagagccataggaactgggggccttccctggacagtgatcatgccaggcctggacctttaggcctgcctccccaggactccttagatcccactctttctacagacttctgtgatcacagccccctgcgggcaggggggctctccctccaccaactctcaaggctcctcagcctaagactatggctcatgagaaacactcaggcctgacctaggcttgggagtcaaactgctcatattgagcatattgttaagtgggtaaagccaagtaaaggtactgggtgtttttgtgaccacttgtgaatgggtgtatggagaactgaaaagggtatctgcatgaaggctcctgtctgactattccaggatccaatattactgccttctgaaacttcctctttagggtaaccatcatgtatgcccacgagggtgatagtaattcgtgagactgaagttgcttagagtacttctttgaccaaggaataccacagacaccctaccgatagaacagtggctcagatcttacttgctcctgcttacgaagtattcccaatcactggtcatctgaccctacttgaacactcctgaacagtcatgttttttaaaatcttcctttatatcaagtcagagagtatacttctataaatttcactcatggatgttaggaaatctagtcatcttccctgtgattgccctgttaagtatttaaccatagctatcatgtgtttcccaaatcttctctagattaaatatcttcagttacttcaaaaaaaaaaaaaaaaa

SEQ ID NO: 1465 - DNA, 4082 bp, Homo Sapiens
  NM_001530
gcgcgcgccggcctgggcaggcgagcgggcgcgctcccgccccctctcccctccccgcgcgcccgagcgcgcctccgcccttgcccgccccctgacgctgcctcagctcctcagtgcacagtgctgcctcgtctgaggggacaggaggatcaccctcttcgtcgcttcggccagtgtgtcgggctgggccctgacaagccacctgaggagaggctcggagccgggcccggaccccggcgattgccgcccgcttctctctagtctcacgaggggtttcccgcctcgcacccccacctctggacttgcctttccttctcttctccgcgtgtggagggagccagcgcttaggccggagcgagcctgggggccgcccgccgtgaagacatcgcggggaccgattcaccatggagggcgccggcggcgcgaacgacaagaaaaagataagttctgaacgtcgaaaagaaaagtctcgagatgcagccagatctcggcgaagtaaagaatctgaagttttttatgagcttgctcatcagttgccacttccacataatgtgagttcgcatcttgataaggcctctgtgatgaggcttaccatcagctatttgcgtgtgaggaaacttctggatgctggtgatttggatattgaagatgacatgaaagcacagatgaattgcttttatttgaaagccttggatggttttgttatggttctcacagatgatggtgacatgatttacatttctgataatgtgaacaaatacatgggattaactcagtttgaactaactggacacagtgtgtttgattttactcatccatgtgaccatgaggaaatgagagaaatgcttacacacagaaatggccttgtgaaaaagggtaaagaacaaaacacacagcgaagcttttttctcagaatgaagtgtaccctaactagccgaggaagaactatgaacataaagtctgcaacatggaaggtattgcactgcacaggccacattcacgtatatgataccaacagtaaccaacctcagtgtgggtataagaaaccacctatgacctgcttggtgctgatttgtgaacccattcctcacccatcaaatattgaaattcctttagatagcaagactttcctcagtcgacacagcctggatatgaaattttcttattgtgatgaaagaattaccgaattgatgggatatgagccagaagaacttttaggccgctcaatttatgaatattatcatgctttggactctgatcatctgaccaaaactcatcatgatatgtttactaaaggacaagtcaccacaggacagtacaggatgcttgccaaaagaggtggatatgtctgggttgaaactcaagcaactgtcatatataacaccaagaattctcaaccacagtgcattgtatgtgtgaattacgttgtgagtggtattattcagcacgacttgattttctcccttcaacaaacagaatgtgtccttaaaccggttgaatcttcagatatgaaaatgactcagctattcaccaaagttgaatcagaagatacaagtagcctctttgacaaacttaagaaggaacctgatgctttaactttgctggccccagccgctggagacacaatcatatctttagattttggcagcaacgacacagaaactgatgaccagcaacttgaggaagtaccattatataatgatgtaatgctcccctcacccaacgaaaaattacagaatataaatttggcaatgtctccattacccaccgctgaaacgccaaagccacttcgaagtagtgctgaccctgcactcaatcaagaagttgcattaaaattagaaccaaatccagagtcactggaactttcttttaccatgccccagattcaggatcagacacctagtccttccgatggaagcactagacaaagttcacctgagcctaatagtcccagtgaatattgtttttatgtggatagtgatatggtcaatgaattcaagttggaattggtagaaaaactttttgctgaagacacagaagcaaagaacccattttctactcaggacacagatttagacttggagatgttagctccctatatcccaatggatgatgacttccagttacgttccttcgatcagttgtcaccattagaaagcagttccgcaagccctgaaagcgcaagtcctcaaagcacagttacagtattccagcagactcaaatacaagaacctactgctaatgccaccactaccactgccaccactgatgaattaaaaacagtgacaaaagaccgtatggaagacattaaaatattgattgcatctccatctcctacccacatacataaagaaactactagtgccacatcatcaccatatagagatactcaaagtcggacagcctcaccaaacagagcaggaaaaggagtcatagaacagacagaaaaatctcatccaagaagccctaacgtgttatctgtcgctttgagtcaaagaactacagttcctgaggaagaactaaatccaaagatactagctttgcagaatgctcagagaaagcgaaaaatggaacatgatggttcactttttcaagcagtaggaattggaacattattacagcagccagacgatcatgcagctactacatcactttcttggaaacgtgtaaaaggatgcaaatctagtgaacagaatggaatggagcaaaagacaattattttaataccctctgatttagcatgtagactgctggggcaatcaatggatgaaagtggattaccacagctgaccagttatgattgtgaagttaatgctcctatacaaggcagcagaaacctactgcagggtgaagaattactcagagctttggatcaagttaactgagctttttcttaatttcattcctttttttggacactggtggctcattacctaaagcagtctatttatattttctacatctaattttagaagcctggctacaatactgcacaaacttggttagttcaattttgatcccctttctacttaatttacattaatgctcttttttagtatgttctttaatgctggatcacagacagctcattttctcagttttttggtatttaaaccattgcattgcagtagcatcattttaaaaaatgcacctttttatttatttatttttggctagggagtttatccctttttcgaattatttttaagaagatgccaatataatttttgtaagaaggcagtaacctttcatcatgatcataggcagttgaaaaatttttacaccttttttttcacattttacataaataataatgctttgccagcagtacgtggtagccacaattgcacaatatattttcttaaaaaataccagcagttactcatggaatatattctgcgtttataaaactagtttttaagaagaaattttttttggcctatgaaattgttaaacctggaacatgacattgttaatcatataataatgattcttaaatgctgtatggtttattatttaaatgggtaaagccatttacataatatagaaagatatgcatatatctagaaggtatgtggcatttatttggataaaattctcaattcagagaaatcatctgatgtttctatagtcactttgccagctcaaaagaaaacaataccctatgtagttgtggaagtttatgctaatattgtgtaactgatattaaacctaaatgttctgcctaccctgttggtataaagatattttgagcagactgtaaacaagaaaaaaaaaatcatgcattcttagcaaaattgcctagtatgttaatttgctcaaaatacaatgtttgattttatgcactttgtcgctattaacatcctttttttcatgtagatttcaataattgagtaattttagaagcattattttaggaatatatagttgtcacagtaaatatcttgttttttctatgtacattgtacaaatttttcattccttttgctctttgtggttggatctaacactaactgtattgttttgttacatcaaataaacatcttctgtggaccaggcaaaaaaaaaaaaaaaaaaaaaaa

SEQ ID NO: 1466 - DNA, 7860 bp, Homo Sapiens
  NM_001531
agaatcttctgtaggcctttctcttgccttcttttattcacaactgatgacactgcatatcttcccctgttcttattgggagaaggccttgtgtgtcaccaagaggttctcagaagggacctgtcagtttttggttaaaagaacccggaaagagaaggactatgggggaactgatggcgttcctgttacctctcatcattgtgttaatggtgaagcacagcgattcccggacgcactctctgagatattttcgcctgggcgtttcggatcccatccatggggtccctgaatttatttcggttgggtacgtggactcgcaccctatcaccacatatgacagtgtcactcggcagaaggagccacgggccccatggatggcagagaacctcgcgcctgatcactgggagaggtacactcagctgctgaggggctggcagcagatgttcaaggtggaactgaagcgcctacagaggcactacaatcactcagggtctcacacttaccagagaatgattggctgtgagctgctggaggatggaagcaccacaggatttctgcagtatgcatatgacgggcaggatttcctgatcttcaataaagacaccctctcctggctggctgtagataatgtggctcacaccatcaagcaggcatgggaggccaatcagcatgagttgctgtatcaaaagaattggctggaagaagaatgtattgcctggctaaagagattcctggagtatgggaaagacaccctacaaagaacagagcccccactggtcagagtaaatcgcaaagaaacttttccaggggttacagctctcttctgcaaagctcatggcttttaccccccagaaatttacatgacatggatgaaaaacggggaagaaattgtccaagaaattgattatggagacattcttcccagtggggatggaacctatcaggcgtgggcatcaattgagcttgatcctcagagcagcaacctttactcctgtcatgtggagcactgcggtgtccacatggttcttcaggtcccccaggaatcagaaactatccctcttgtgatgaaagctgtctctgggtccattgtccttgtcattgtgctggctggagttggtgttctagtctggagaagaaggccccgagagcaaaatggagccatctaccttccaacaccagatcgatgattgcagatccctcttttccagttctccttcctctaggagccatgttatcctctgtcccccatagagtcaagcctagtgcttgaaggtcctgacgacacccacaacatacatgagagtaatgggattgagcatttatggcagcaacagaggagccacaaaatgttctttgttctttggctccaaaaagactgtcagctttcagtctcttttgatggactgttttatcagagttgactttaaatacagcttgtctcatgacacaacgcttccctacattctatttgtcaatgatgatttgcaactagttggagattctcagagcaggaaggaatcttttcaaccagagcaggaactgtcttctgcaatgccttggacttgagcctccagcctccacttgaacaccatgtgaagggaacctcagtacttcataaaatggcctttctcattcatctttcatgggaacatttattgtacaagcgctttgaatatcatgggcaccatgactgtgaccctacaggtaggattggatcactccatgagagtagccggcaggtttctacaatggcctgggaatggactgattatttttatacattttctggcctgagagaaagccaaagtcccctgctgttcacagcaaccctgcctgggagcttggaatcttggtaatctgcccggttggatctatggaggtagtctcaccctttttgtcttttgtgggaaattaagagaaataattatcagacatatcatcacctccagtggaactacagagacctggacccagctgcactattttaatgtaaaaataacagtatggccaggtgcagtggctcacgcctgtaatcccatcactttgagcagccaaggcgggcggatcacgaggtcaggagattaagaccatcctggccaatatggtgaaaccctgtctctactaaaatacaaaaaattagctgggcatggtgttgcgtgcctgtagtcccagctacttgggaggctgagacaggggaattgcttgaacccgggaggcagagattgcagtgagccgagatcacgccactgcactccagcctggcgacagagtgagactctatctcaaaataataataataataataataataataataataataataacagtatatttggtgtcaggagagggctcaattctcatttctgcctttcctgtgctggctcatggtagctgggcatgacttgccttcctacataggttgtcttcatacatatgcactgggaatcaataaaagcccatggtgagaatgaacatccccttaatgttccttactatccccaacccctgaggcctcacctactgccctgccatgtggagctacttgccctggggctgccagtcacacattcctcggtcctacttctctgaccccgtttgactctgcacctgagccctaatgcttacttcagtgacctgaactttgacaagtggcttttgtcctgcacctcaggtttgacctctgctctcccttgaccttgactgtgacatttgacctttggctttaatcattacagcctcagataaaggtaccttcagcccgggcacagtggctcacgcctgtaatcctagcactttgggaggctgaggcaggcggattccctgagctcaggagttcaagaccagcctgggcaacacggtgaaaccctgtctctactaaaatacaaataattagctgggcatggtggcatgtgcctatagtcccagctacttgggaggctaaggcaggagaatcacttgaatctataaggcagaggtggcagtgagccgagatcacaccactgcactccagcctgggcaacggagcaagactctgtctccaaaaaaaaaaagaaagataccctcagtgtgccaggcctctaagagctcacctgccaggcttcctccttgctccactgtcccatgtaattccatatatgaagctaccactgtacatctctcttttccggtgcctgttgagttgcatagaagcacagttgtgtttattttgtttttagggttgccatgggcaatttccgtgccacttttaagcagtgttgcactgtgaagagaatgtaggcaagtttatttctggaatggtttcttcttacaatcagaatagttaggatgtaatatatttttgggtgggcatttaaagtgaaaaggtacatatttacatagacacaggtgataatgtatctatgtaaatgccttttgattctgcaactgcaggatactctcatcaaagacacagataaaaagcctctgtgtttccaaggccttgccctacacctaacacataatatgtccaaatggatgaagaggaggcaaggacaaggatgtgatgacaaaacattctgttatgcacttgtagcatttatgtttcttcctgggggattttataatactaaaagaatcataatataaagagatgattaaaaaaaaaatactgccgggcacggtggctcatgcctgtaatcccagcattttgggaggccgaggtgggcagatcacctgaggtcgggagttcgagaccagcctgaccaacatggagaaaccctgtctctaccaaacatacaaaattagccggggatggtggcgcatgcctataatcccagctactcgggagtctgaggcagaagaaccgcttgaacccgggaggcagaggttgtggtgagccgagatcgcgccatcgcactctagcctgggcaacaagagtgaaactccatctcaaaaaaataaaaataaaataagtaagtaatacctaaaattctgcaaccttcattttactatagatggttgaagattatattacttcttaattgttttagccttgttattgcttcattacttcatggttgttgagtacagatgctcagtaatcataacctatgaaatatttgacaccatgatctaaacattaaaaacaaataactgtgctattgccacagctatgttttggctttgaattttctttactgaatattttggatcaagaacactagatgagaaacctgttcaactctgttcttttttttttttttaactccactgtatttattacctgtttttgttttttttgtttgtttgtttttgatgtgcatatagaccaagatgtggtaaatttaaatggcagatgtttttgatgtggtacatttaagggagagaaagcagtttaaagagcagggtgaaaaatccaacaagactccatcgagagtttctgagctctcccatcaggggccagtcctcctttcctctctcctcttactcccatgatttccaagttgtgatcctttccttatttctgaggaatgacttggtttctcctcttctttttttggcctgagagaagatgtttttgcacttgtagctatgaggaacagattgtccactagggaggccagctgatcattttctgccagagtcacacagagcagtcacaccttattttgaaaaccactgtctggggtctttgtcctcacatatgcaggtctagtgtccccacaaagtgatcagatggatatataaagtggagtgccaatgtattaatttactgtgagaaacacaattgctaagtgggtcagatatctgtctcagctggtcagtacaccttccagcaggaaaatctacataagaacaactaaatcacaatctgtagagtgcttgatgaccccagaattggtgcaaggggacacattcttgcttgttagcacctgctctctggagtttgctattttctcacacacagtgtattagttcacagaatgttctccaaggaggacagggggctttgcccatagccatgtgctgtgggcagcagagctaggaagaagcacaggcatctcccagcccaggtgtttcccacttaactgcattgcccttttcatcttttttttttccccaatagcttcaggacattcagtacattgtgctttttagaggttgatgattccactgcctgagctgccttcacctctctttctttggaaattgccatctttgagcattgtatgtctctgtaacatctctgcatctccttttcactctggcctccctttctccattgtccttctagcttctggttgccccaaaccccacagactgtgtaacaaaacccaaaacctattggtttaaaacaatacccattttattttctttcatagtttctatgggtcaggaatttggatatggcttgggtaagcagttctggcttctcatggagttggaggcaagtggtggctggaacagaaatggggcagccaggggtggtggccaggcatcagctacatctcctccatgtagtctcaggaactctccatgtaatctctctgtgtgggttgggcttcctcacaacatggtggcctcagggcagtcactgcttacatggcagctagcttccctcagagtgagtatcccaagagatcacagtcaaagtgcatagcatttatataatctaatcttggaagtcacaaaatgtcattcttgtgatactctcattggtgaagaagtcataaaatcctgctcaggttcaaaaagagggtgtatagaacccaacactcaataggaagattgtcagagttacattgtaagaagagcatgtagttgggagatatcattgtggccattttgggaaagatgcaacatgtcacaatgtcatgttctccatcgtctccccgttccaccttgtactggtttccaagggtagtcgtttaaaagtaccacaaaaactgggtggcttggaacaacagaaatttattgtttcacagttctggaggccagaagttcaaaatgaagtgttggcagaaacatgctgcctctaaagggactgggaaaggatctgttccaggcttccctcctatcttctggttgttccttgccttctggctgcgtaactctagtcttcatttggtgttctccctgcatgcatggctttgtgtccaaatttccttttttcatgaggccatcagtcatactggattagggacccactctactactgcaggatgacctcaccttcccaaattacatctgcaacaaccctatttccaaagaaggccacattctgaggtactgggggttataacttcaacatgaattttttggaggaaacaattcaactcctaacacatctctacccaacctctgtaggttccctcaatccaccaaaattttttggctccactggattatctagcagttaggaaaccaagatcattaaatgaattcaccgcaactacagtgagactgactaccttagcttacctctgtgaaaggagttaagccaaaggaatctgtggaattttggagagtttgggagcatttgggggcaggaggcaaatgttcttcctttaaatcacaacacttagttctcttccatttataagactcacccctccatcccaacccctgcaccacaggacaaggaagtgttcttggtcttcaactttcatccctgatggtgaaagcagttgctcctgacctatttgcccaccagcttctcctctggagcctgaggcttctgatgcctgcctggctggttctcagtaagaaggtcaagttcaaccagaggggagatgctgatgcctttcagtacttaaatatgagttcagaccctggggcctggacataagatttggggtcccctggatataagatttctgaaaacactcagactgtggagacccctgctgagggagaagccccaaactgtggcttcaggggaatgcaccaaggctctcattgaggccaccttctccaacaagctcccctcctgcttccccatggctggcatggctgaggaaaaaggacactgagcacagcccgtgcatgagcggcttgccatgcaacaggataaaacccataatgccactcagcaagccttggttgtaaatctagtttgattacatttgtaatcaaatgatggccatttgttctgtttctggtttgtgaaccaactgaagacataagcagggcctcagctaacccacaaatagcacatgtgtgcaaactggaaaaatgaacccttcttctgggaggacgccagcccaggccaggtcacccggcttggccagcagaacacagagtagattttggtcccgtttgttccccagtggggtatctatccttgtgcagggcacaagcctacatggtggctctggtcatatcattagaaaatagacagaaatgggctgcacaccagaatgaatgaattgaattgaaagggaggagtgatggtggaaaaaaaaacaagtcaattcatttagactggtagaaccagaaccactgtgtagtacatccaaacggttaaaattccctggaagatgttacataatcctatcatggtgtttatttatggaaatctattttaaaaattttatgtaatactgcacagtctgtttgcatgatgccttgtacgtagtagcaactcagtaaatactttttgaatgaactagtatagtattttaattagctagtcttcatgtactggtacaaaagaacagtgtcatcttacagctgaagtcatagaggggaaatatcccactcaagatcatataacattccaggtactcaggatgaatggtttgaggactggtctgaattcttcaaaggtttcagctgtattaacattctccatctaataaactttatcttgtcattgca

SEQ ID NO: 1467 - DNA, 2529 bp, Homo Sapiens
  NM_001532
ggtggcgcgaccctctgtccccgcctcggggcggagcccaggtcccagcctgcggagcgcgagacacgccgaaatccgcccgaggctacctgtgcgactccagccgccctgcaccggaatctggggagacccgccccccgccccaccggtctgcggccctccgccccagcgcaggtgcaggtgcggcttctctgcccctttcaccccaggcgcatccgccgcggcggccatggcgcgaggagacgccccgcgggacagctaccacctggtcgggatcagcttcttcatcctggggctgggcaccctccttccctggaacttcttcatcaccgccatcccgtacttccaggcgcgactggccggggccggcaacagcacagccaggatcctgagcaccaaccacacgggtcccgaggatgccttcaacttcaacaattgggtgacgctgctgtcccagctgcccctgctgctcttcaccctcctcaactccttcctgtaccagtgcgtcccggagacggtgcgcattctgggcagcctgctggccatactgctgctctttgccctgacagcagcgctggtcaaggtggacatgagccccggacccttcttctccatcaccatggcctccgtctgcttcatcaactccttcagtgcagtcctacagggcagcctcttcgggcagctgggcaccatgccctccacctacagcaccctcttcctcagcggccagggcctggctgggatctttgctgcccttgccatgctcctgtccatggccagtggcgtggacgccgagacctctgccctggggtactttatcacgccctgtgtgggcatcctcatgtccatcgtgtgttacctgagcctgcctcacctgaagtttgcccgctactacctggccaataaatcatcccaggcccaagctcaggagctggagaccaaagctgagctcctccagtctgatgagaacgggattcccagtagtccccagaaagtagctctgaccctggatcttgacctggagaaggagccggaatcagagccagatgagccccagaagccaggaaaaccttcagtcttcactgtcttccagaagatctggctgacagcgctgtgccttgtgttggtcttcacagtcaccctgtccgtcttccccgccatcacagccatggtgaccagctccaccagtcctgggaagtggagtcagttcttcaaccccatctgctgcttcctcctcttcaacatcatggactggctgggacggagcctgacctcttacttcctgtggccagacgaggacagccggctgctgcccctgctggtctgcctgcggttcctgttcgtgcccctcttcatgctgtgccacgtgccccagaggtcccggctgcccatcctcttcccacaggatgcctacttcatcaccttcatgctgctctttgccgtttctaatggctacctggtgtccctcaccatgtgcctggcgcccaggcaggtgctgccacacgagagggaggtggccggcgccctcatgaccttcttcctggccctgggactttcctgtggagcctccctctccttcctcttcaaggcgctgctctgaagtggcccctccaggctctttggcagcctcttctcgacgtctccttccggagctgagatccagcccagggcgaatggcgagcttggctcaggcctctgcggggtggaggcccctgggcctgaggctgccagcagcgggcaggagctgctcttcatccacttggagtgctgcggggaagaaatcaccaccggtcattctaaccctcacccaggaatgggggtgactcgcacaagacctcatggaaagggtgatgactagggaaaagagggtgcagggcacggctgctccccaccaccaggtctgcatttgttcatcatcatcaggagcagaggtgaccagagggttcagagtgggaggcggggccagcccaggccaggagcgcctcatcttcccaggcctcagccacccagggtaaaaggtgccagggaagttgtgggcacctgagaggaggaacagatgtggaggacctgagggtgctcaaagggccaggctcagcctcaagcagtgttttcattgccaacacttactgtacccactccgcagagcccagctgggcctgggccccagggccacagctagcctgcatgtgtgtactgcactttacagtttgcaaagctcttccatacccactctctcaccgaagcctaattgaggctcttggaaggagtcaggcaaggattgtgcttcccccattatacaggtgacaaaactgagtcctggggaaagtgactggtccgtggtagagccgggacccaatcccctctctctcctccctgttggtgctgttcttcctgcccaacacctgtttctcttttcctcaaggggtttggggcaggagcctgggcacttactccccgtttttgctgtttctccttctgaccctgctcttgggtctaataaccccatttatttgtaaaaaaaaaaaaaaa

SEQ ID NO: 1468 - DNA, 1919 bp, Homo Sapiens
  NM_001537
cgagaagcagcggcccggggcgactgagcggacaaacggaagtgtaggttacggtctgagacatcaccgccaagctgggcatcggggagatggccgagactgaccccaagaccgtgcaggacctcacctcggtggtgcagacactcctgcagcagatgcaagataaatttcagaccatgtctgaccagatcattgggagaattgatgatatgagtagtcgcattgatgatctggaaaagaatatcgcggacctcatgacacaggctggggtggaagaactggaaagtgaaaacaagatacctgccacgcaaaagagttgaaggttgctaataatttatactggaatctggcatttttccaagccaagagaagatcgaatggctttttgcagctaactactatgtgtagacaggttttatattataaagtatgcattcttatcacctagtatatagttagtttgtagagtgatttccccccagtttcttgaacatggtatcttcacatcttggaccttggtcagttgtgctattcattattaaacactaaaactttggcggttcttgcataacattgtcagattttttagtgtatttctgtgaagtcattttttttcttgtcattccttttgtagtagttgctgtttggataaaagttgatgtgtgattttttattaaacaaatagtaaacccttcaattatagttagtcttggtgaagtaagatgtttgtagactttagagttctttaattcttggcacaacgtgactgttgagctaacaccaaatagtgtgttggcaatacttttcaaatggctgaaaacacctaaaaattgttcattcagaaatatctgtcactgctctgttgccaaaactcagaatagaacttagacgtatgtctgagtccctgagatcacatgctaaagtcgatgaaaagtaaccactgccactgtcttgtgtcagaacttttacagtacagaaaataacagaatagccttctgtaatgaggcgtttgttagagttttgcatgagattctaatacttcagtaggaccctacctacgtggttcatctacaatggttaccataaaaaatctggcaggattttaaaactcaatcagtctttcctttgagctagtgacttgaaaagaaagagagaaggaaaagagaccatattaagtccatgccagttgcttggctagaatatgatcaacgacttgtagtagactcaagtttttaaaaaacactattttacttaaactgtttcttatctaaattcttgcagagtgtcaatgttatcattgattatagaagacagggataatacctttatctctggccactcaaaaatgcagtgccaggagtgctaaacctagaggccaatactgatgacctggaaggtgatccatatgattgtcaccacaaagtgcttttacacaaaaacttgaaaatttgaaaaacatgatttttttaagtttctcatctcaccagtcttggtgtttatattgcaaatctatcaaagtaagaaataatttgtgctgtatacaaattacatggggaacataaaggagtgagatccttctgtgataaaatgaattcaccactctggttacccaactacagaacctcctttgatcaggccagtaggttgtgatgcaggctggagcccccgaatgccccacacacactgcagcattgaccagaccatccgaaacctgcgtccctggtgatgttctcaagcctcggaagtggcaaatggaaatgatatggccggttgcggttgtaggagagttgtgacttaggcaggagtcgacctcctcaagtaatggaacgatttcaaaggcaggctgccctgaccaaaaatatctgccatgaataaaggtgcctgaaatcctaaaaaaaaaaaagaaaaaaaaaaaaaaa

SEQ ID NO: 1469 - DNA, 1538 bp, Homo Sapiens
  NM_001539
ggacttccggcgggtgacgcgcccgggttcggctacaaaagaggacggctgcggcgcgccgggcggaactttccagaacgctcggtgagaggcggaggagcggtaactaccccggctgcgcacagctcggcgctccttcccgctccctcacacaccggcctcagcccgcaccggcagtagaagatggtgaaagaaacaacttactacgatgttttgggggtcaaacccaatgctactcaggaagaattgaaaaaggcttataggaaactggctttgaagtaccatcctgataagaacccaaatgaaggagagaagtttaaacagatttctcaagcttacgaagttctctctgatgcaaagaaaagggaattatatgacaaaggaggagaacaggcaattaaagagggtggagcaggtggcggttttggctcccccatggacatctttgatatgttttttggaggaggaggaaggatgcagagagaaaggagaggtaaaaatgttgtacatcagctctcagtaaccctagaagacttatataatggtgcaacaagaaaactggctctgcaaaagaatgtgatttgtgacaaatgtgaaggtagaggaggtaagaaaggagcagtagagtgctgtcccaattgccgaggtactggaatgcaaataagaattcatcagataggacctggaatggttcagcaaattcagtctgtgtgcatggagtgccagggccatggggagcggatcagtcctaaagatagatgtaaaagctgcaacggaaggaagatagttcgagagaagaaaattttagaagttcatattgacaaaggcatgaaagatggccagaagataacattccatggtgaaggagaccaagaaccaggactggagccaggcgatattatcattgtgttagatcagaaggaccatgctgtttttactcgacgaggagaagaccttttcatgtgtatggacatacagctcgttgaagcactgtgtggcttccagaagccaatatctactcttgacaaccgaaccatcgtcatcacctctcatccaggtcagattgtcaagcatggagatatcaagtgtgtactaaatgaaggcatgccaatttatcgtagaccatatgaaaagggtcgcctaatcatcgaatttaaggtaaactttcctgagaatggctttctctctcctgataaactgtctttgctggaaaaactcctacccgagaggaaggaagtggaagagactgatgagatggaccaagtagaactggtggactttgatccaaatcaggaaagacggcgccactacaatggagaagcatatgaggatgatgaacatcatcccagaggtggtgttcagtgtcagacctcttaatgggccagtgaataacactcactgctggcatttaatgtgcagtagtgaatgagtgaaggactgtaatcataatatgctcactacttgctcttgtttttgttttaataaactatagtagtgttttaaaaagttaaatgaagaataaacgcaaatataaaagc

SEQ ID NO: 1470 - DNA, 888 bp, Homo Sapiens
  NM_001545
gcatggcggccaccaggtgcctgcgctggggcctgagccgagccggagtctggctgctcccaccgcccgcacggtgcccacgccgggcgctgcacaagcagaaagacggcactgagttcaagagcatctacagcctggacaagctctaccccgaatctcagggctcggacaccgcctggagggtcccgaatggtgcaaagcaagccgacagtgacatccctctagatcgcttgacaatatcttattgtcggagtagtggtcctggggggcagaatgtgaacaaagtgaattccaaggcagaagtcaggttccatttggcaactgccgagtggatcgcggagcccgtgcggcagaagatagccatcacgcataaaaacaagatcaacaggttaggagagttgatccttacctctgagagcagccgctatcagttccggaatctggcagattgcctgcagaaaattcgagacatgatcactgaggccagccagacaccgaaggagccaacaaaagaagatgttaaacttcatagaatcaggatagaaaacatgaatcgggaaaggctgagacaaaagagaattcattctgctgtaaagacaagcaggagggtcgacatggactgaaatcaccctctgcagctgggagggctcttctgggcgtccgggcagctgcagctgagaggactttcacaccataaggagatttctgtttttctttttggctgttaatgcttgtctataacattggagccatcacaagaatgttcatttggaatgaaggctgcaggcactggttgcagacgtctttataggcagtcaccatgttgtcaaaccttaataatgcacctcatgtattagtcacaataaaaatcagaactcaaaaaaaaaa

SEQ ID NO: 1471 - DNA, 3505 bp, Homo Sapiens
  NM_001547
agtttcactttcccttttgtaacgtcagctgaagggaaacaaacaaaaaggaaccagaggccacttgtatatataggtctcttcagcatttattggtggcagaagaggaagatttctgaagagtgcagctgcctgaaccgagccctgccgaacagctgagaattgcactgcaaccatgagtgagaacaataagaattccttggagagcagcctacggcaactaaaatgccatttcacctggaacttgatggagggagaaaactccttggatgattttgaagacaaagtattttaccggactgagtttcagaatcgtgaattcaaagccacaatgtgcaacctactggcctatctaaagcacctcaaagggcaaaacgaggcagccctggaatgcttacgtaaagctgaagagttaatccagcaagagcatgctgaccaggcagaaatcagaagtctggtcacctggggaaactatgcctgggtctactatcacatgggccgactctcagacgttcagatttatgtagacaaggtgaaacatgtctgtgagaagttttccagtccctatagaattgagagtccagagcttgactgtgaggaagggtggacacggttaaagtgtggaggaaaccaaaatgaaagagcgaaggtgtgctttgagaaggctctggaaaagaagccaaagaacccagaattcacctctggactggcaatagcaagctaccgtctggacaactggccaccatctcagaacgccattgaccctctgaggcaagccattcggctgaatcctgacaaccagtaccttaaagtcctcctggctctgaagcttcataagatgcgtgaagaaggtgaagaggaaggtgaaggagagaagttagttgaagaagccttggagaaagccccaggtgtaacagatgttcttcgcagtgcagccaagttttatcgaagaaaagatgagccagacaaagcgattgaactgcttaaaaaggctttagaatacataccaaacaatgcctacctgcattgccaaattgggtgctgctatagggcaaaagtcttccaagtaatgaatctaagagagaatggaatgtatgggaaaagaaagttactggaactaataggacacgctgtggctcatctgaagaaagctgatgaggccaatgataatctcttccgtgtctgttccattcttgccagcctccatgctctagcagatcagtatgaagacgcagagtattacttccaaaaggaattcagtaaagagcttactcctgtagcgaaacaactgctccatctgcggtatggcaactttcagctgtaccaaatgaagtgtgaagacaaggccatccaccactttatagagggtgtaaaaataaaccagaaatcaagggagaaagaaaagatgaaagacaaactgcaaaaaattgccaaaatgcgactttctaaaaatggagcagattctgaggctttgcatgtcttggcattccttcaggagctgaatgaaaaaatgcaacaagcagatgaagactctgagaggggtttggagtctggaagcctcatcccttcagcatcaagctggaatggggaatgaagaatagagatgtggtgcccactaggctactgctgaaagggagctgaaattcctccaccaagttggtattcaaaatatgtaatgactggtatggcaaaagattggactaagacactggccataccactggacagggttatgttaacacctgaattgctgggtcttgagagagcccaaggagttctgggagagggaccagattggggggtaggtccacgggcttggtgatagaattatttctcgattgacttcttgagtgcaatttgaactgtaacatttgcttagtcacctttagtggagtaatctactgggcttgtttctatatttatataaagcagccaaatccttcatgtaatattgaagtccatttttgcaatgttgttccatacttggagtcattttgcatcccatagaggttagtcctgcatagccagtaatgtgctaagttcatccaaaagctggcggaccaaagtctaaatagggctcagtatcccccatcgcttatctctgcctccttcctcctccttcccagtctatcatcaaccttgagtattctacacaatgtgaattcaagtgcctgattaattgaggtggcaacatagtttgagacgagggcagagaacaggaagatacatagctagaagcgacgggtacaaaaagcaatgtgtacaagaagactttcagcaagtatacagagagttcacctctactctgccctcctcatagtcataatgtagcaagtaaagaatgagaatggattctgtacaatacactagaaaccaacataatgtatttctttaaaacctgtgtgaaaaaataaatgttccaccagtagggataggggaaaagtaaccaaaagagagaaagagaaaggaatgctggtttatctttgtagattgtaatcgaatggagaaatttgcagtattttagccactattaggaattttttttttttgtaaaatgaagactgaactctgttcaaatgctttcatgaacctggtttgagacggtaggaaagcaacaaaacgtgggaacctggtgactaagggcctggtgcaaggacttgggaaatgtcattgataatagatggtggggttttcccccctttagaaatgttggatattaagtgatataaacacttcttttaactccgaaaatcttctgagaaatcacaaaattcacggtatgcttggaacgattgagattttctaggtagatgctgaatagcctagacatcaaagttggtgtgaaccaaaatagagtcagctgacccagcatcagccacactctgggttggaaaatgtttgcctgttggaattaatttaagcttaagtatatatcaacattattttattgtgcaattaaaacaatacaaattcatggttttttaaagttaaaaattctaaccactgtaacaacagtttttgtgttattttctgtattaaacatcttgttgcacgcatttgaggtcatcagggtgcaaaatttgtattcctgaaaatgtcatatattttcattaataaataacctaaatatgataaaacataaagcagtgttctggttcatctggaattttgctgtactttaaatctttcagactcagctactgataaatgaaacgttacacaggtgtgaaccaaatccaaataacctcgactggtctactatcataatcacctgaacagaacaaaactttttcctcagctttaagagtccagggcttcggataacagctgccatctgccacctgctaccattgacctacgtgaacacagacattctgtctccaccttgatggtgggtgggctgctccccttttctttgttaaattttgtgctttcatcacattttctctattctgacctctgttatgagaaataaaagtcactgattccattttaaaaaaaaaaa

SEQ ID NO: 1472 - DNA, 1876 bp, Homo Sapiens
  NM_001548
ttacaccattggctgctgtttagctcccttatataacactgtcttggggtttaaacgtaactgaaaatccacaagacagaatagccagatctcagaggagcctggctaagcaaaaccctgcagaacggctgcctaatttacagcaaccatgagtacaaatggtgatgatcatcaggtcaaggatagtctggagcaattgagatgtcactttacatgggagttatccattgatgacgatgaaatgcctgatttagaaaacagagtcttggatcagattgaattcctagacaccaaatacagtgtgggaatacacaacctactagcctatgtgaaacacctgaaaggccagaatgaggaagccctgaagagcttaaaagaagctgaaaacttaatgcaggaagaacatgacaaccaagcaaatgtgaggagtctggtgacctggggcaactttgcctggatgtattaccacatgggcagactggcagaagcccagacttacctggacaaggtggagaacatttgcaagaagctttcaaatcccttccgctatagaatggagtgtccagaaatagactgtgaggaaggatgggccttgctgaagtgtggaggaaagaattatgaacgggccaaggcctgctttgaaaaggtgcttgaagtggaccctgaaaaccctgaatccagcgctgggtatgcgatctctgcctatcgcctggatggctttaaattagccacaaaaaatcacaagccattttctttgcttcccctaaggcaggctgtccgcttaaatccagacaatggatatattaaggttctccttgccctgaagcttcaggatgaaggacaggaagctgaaggagaaaagtacattgaagaagctctagccaacatgtcctcacagacctatgtctttcgatatgcagccaagttttaccgaagaaaaggctctgtggataaagctcttgagttattaaaaaaggccttgcaggaaacacccacttctgtcttactgcatcaccagatagggctttgctacaaggcacaaatgatccaaatcaaggaggctacaaaagggcagcctagagggcagaacagagaaaagctagacaaaatgataagatcagccatatttcattttgaatctgcagtggaaaaaaagcccacatttgaggtggctcatctagacctggcaagaatgtatatagaagcaggcaatcacagaaaagctgaagagaattttcaaaaattgttatgcatgaaaccagtggtagaagaaacaatgcaagacatacatttccactatggtcggtttcaggaatttcaaaagaaatctgacgtcaatgcaattatccattatttaaaagctataaaaatagaacaggcatcattaacaagggataaaagtatcaattctttgaagaaattggttttaaggaaacttcggagaaaggcattagatctggaaagcttgagcctccttgggttcgtctacaaattggaaggaaatatgaatgaagccctggagtactatgagcgggccctgagactggctgctgactttgagaactctgtgagacaaggtccttaggcacccagatatcagccactttcacatttcatttcattttatgctaacatttactaatcatcttttctgcttactgttttcagaaacattataattcactgtaatgatgtaattcttgaataataaatctgacaaaatattagttgtgttcaacaattagtgaaacagaatgtgtgtatgcatgtaagaaagagaaatcatttgtatgagtgctatgtagtagagaaaaaatgttagttaactttgtaggaaataaaacattggacttacactaaaaaaaaaaaaaaaaaa

SEQ ID NO: 1473 - DNA, 2246 bp, Homo Sapiens
  NM_001552
aaagtccgggggagccggtcccgggcagccgctcagccccctgcccctcgccgcccgccgcctgcctgggccgggccgaggatgcggcgcagcgcctcggcggccaggcttgctcccctccggcacgcctgctaacttcccccgctacgtccccgttcgcccgccgggccgccccgtctccccgcgccctccgggtcgggtcctccaggagcgccaggcgctgccgccgtgtgccctccgccgctcgcccgcgcgcccgcgctccccgcctgcgcccagcgccccgcgcccgcgcccagtcctcgggcggtcatgctgcccctctgcctcgtggccgccctgctgctggccgccgggcccgggccgagcctgggcgacgaagccatccactgcccgccctgctccgaggagaagctggcgcgctgccgcccccccgtgggctgcgaggagctggtgcgagagccgggctgcggctgttgcgccacttgcgccctgggcttggggatgccctgcggggtgtacaccccccgttgcggctcgggcctgcgctgctacccgccccgaggggtggagaagcccctgcacacactgatgcacgggcaaggcgtgtgcatggagctggcggagatcgaggccatccaggaaagcctgcagccctctgacaaggacgagggtgaccaccccaacaacagcttcagcccctgtagcgcccatgaccgcaggtgcctgcagaagcacttcgccaaaattcgagaccggagcaccagtgggggcaagatgaaggtcaatggggcgccccgggaggatgcccggcctgtgccccagggctcctgccagagcgagctgcaccgggcgctggagcggctggccgcttcacagagccgcacccacgaggacctctacatcatccccatccccaactgcgaccgcaacggcaacttccaccccaagcagtgtcacccagctctggatgggcagcgtggcaagtgctggtgtgtggaccggaagacgggggtgaagcttccggggggcctggagccaaagggggagctggactgccaccagctggctgacagctttcgagagtgaggcctgccagcaggccagggactcagcgtcccctgctactcctgtgctctggaggctgcagagctgacccagagtggagtctgagtctgagtcctgtctctgcctgcggcccagaagtttccctcaaatgcgcgtgtgcacgtgtgcgtgtgcgtgcgtgtgtgtgtgtttgtgagcatgggtgtgcccttggggtaagccagagcctggggtgttctctttggtgttacacagcccaagaggactgagactggcacttagcccaagaggtctgagccctggtgtgtttccagatcgatcctggattcactcactcactcattccttcactcatccagccacctaaaaacatttactgaccatgtactacgtgccagctctagttttcagccttgggaggttttattctgacttcctctgattttggcatgtggagacactcctataaggagagttcaagcctgtgggagtagaaaaatctcattcccagagtcagaggagaagagacatgtaccttgaccatcgtccttcctctcaagctagccagagggtgggagcctaaggaagcgtggggtagcagatggagtaatggtcacgaggtccagacccactcccaaagctcagacttgccaggctccctttctcttcttccccaggtccttcctttaggtctggttgttgcaccatctgcttggttggctggcagctgagagccctgctgtgggagagcgaagggggtcaaaggaagacttgaagcacagagggctagggaggtggggtacatttctctgagcagtcagggtgggaagaaagaatgcaagagtggactgaatgtgcctaatggagaagacccacgtgctaggggatgaggggcttcctgggtcctgttccctaccccatttgtggtcacagccatgaagtcaccgggatgaacctatccttccagtggctcgctccctgtagctctgcctccctctccatatctccttcccctacacctccctccccacacctccctactcccctgggcatcttctggcttgactggatggaaggagacttaggaacctaccagttggccatgatgtcttttcttctttttcttttttttaacaaaacagaacaaaaccaaaaaatgtccagatgaaaaaaaaaaa

SEQ ID NO: 1474 - DNA, 1124 bp, Homo Sapiens
  NM_001553
gccgctgccaccgcaccccgccatggagcggccgtcgctgcgcgccctgctcctcggcgccgctgggctgctgctcctgctcctgcccctctcctcttcctcctcttcggacacctgcggcccctgcgagccggcctcctgcccgcccctgcccccgctgggctgcctgctgggcgagacccgcgacgcgtgcggctgctgccctatgtgcgcccgcggcgagggcgagccgtgcgggggtggcggcgccggcagggggtactgcgcgccgggcatggagtgcgtgaagagccgcaagaggcggaagggtaaagccggggcagcagccggcggtccgggtgtaagcggcgtgtgcgtgtgcaagagccgctacccggtgtgcggcagcgacggcaccacctacccgagcggctgccagctgcgcgccgccagccagagggccgagagccgcggggagaaggccatcacccaggtcagcaagggcacctgcgagcaaggtccttccatagtgacgccccccaaggacatctggaatgtcactggtgcccaggtgtacttgagctgtgaggtcatcggaatcccgacacctgtcctcatctggaacaaggtaaaaaggggtcactatggagttcaaaggacagaactcctgcctggtgaccgggacaacctggccattcagacccggggtggcccagaaaagcatgaagtaactggctgggtgctggtatctcctctaagtaaggaagatgctggagaatatgagtgccatgcatccaattcccaaggacaggcttcagcatcagcaaaaattacagtggttgatgccttacatgaaataccagtgaaaaaaggtgaaggtgccgagctataaacctccagaatattattagtctgcatggttaaaagtagtcatggataactacattacctgttcttgcctaataagtttcttttaatccaatccactaacactttagttatattcactggttttacacagagaaatacaaaataaagatcacacatcaagactatctacaaaaatttattatatatttacagaagaaaagcatgcatatcattaaacaaataaaatactttttatcacaaaaaaaaaaaaaaaa

SEQ ID NO: 1475 - DNA, 4131 bp, Homo Sapiens
  NM_001556
gtgacgtcagagcaggaagtgtttgaggaagtcgcgccgcgctgcccgcgttaagattcccgcattttaatgttttcaggggggtgtcatagccccgggtttggccgccccagccccgccttccccgccccggggagcccgccccctgccccgcgtccctgccgacagagttagcacgacatcagtatgagctggtcaccttccctgacaacgcagacatgtggggcctgggaaatgaaagagcgccttgggacagggggatttggaaatgtcatccgatggcacaatcaggaaacaggtgagcagattgccatcaagcagtgccggcaggagctcagcccccggaaccgagagcggtggtgcctggagatccagatcatgagaaggctgacccaccccaatgtggtggctgcccgagatgtccctgaggggatgcagaacttggcgcccaatgacctgcccctgctggccatggagtactgccaaggaggagatctccggaagtacctgaaccagtttgagaactgctgtggtctgcgggaaggtgccatcctcaccttgctgagtgacattgcctctgcgcttagataccttcatgaaaacagaatcatccatcgggatctaaagccagaaaacatcgtcctgcagcaaggagaacagaggttaatacacaaaattattgacctaggatatgccaaggagctggatcagggcagtctttgcacatcattcgtggggaccctgcagtacctggccccagagctactggagcagcagaagtacacagtgaccgtcgactactggagcttcggcaccctggcctttgagtgcatcacgggcttccggcccttcctccccaactggcagcccgtgcagtggcattcaaaagtgcggcagaagagtgaggtggacattgttgttagcgaagacttgaatggaacggtgaagttttcaagctctttaccctaccccaataatcttaacagtgtcctggctgagcgactggagaagtggctgcaactgatgctgatgtggcacccccgacagaggggcacggatcccacgtatgggcccaatggctgcttcaaggccctggatgacatcttaaacttaaagctggttcatatcttgaacatggtcacgggcaccatccacacctaccctgtgacagaggatgagagtctgcagagcttgaaggccagaatccaacaggacacgggcatcccagaggaggaccaggagctgctgcaggaagcgggcctggcgttgatccccgataagcctgccactcagtgtatttcagacggcaagttaaatgagggccacacattggacatggatcttgtttttctctttgacaacagtaaaatcacctatgagactcagatctccccacggccccaacctgaaagtgtcagctgtatccttcaagagcccaagaggaatctcgccttcttccagctgaggaaggtgtggggccaggtctggcacagcatccagaccctgaaggaagattgcaaccggctgcagcagggacagcgagccgccatgatgaatctcctccgaaacaacagctgcctctccaaaatgaagaattccatggcttccatgtctcagcagctcaaggccaagttggatttcttcaaaaccagcatccagattgacctggagaagtacagcgagcaaaccgagtttgggatcacatcagataaactgctgctggcctggagggaaatggagcaggctgtggagctctgtgggcgggagaacgaagtgaaactcctggtagaacggatgatggctctgcagaccgacattgtggacttacagaggagccccatgggccggaagcaggggggaacgctggacgacctagaggagcaagcaagggagctgtacaggagactaagggaaaaacctcgagaccagcgaactgagggtgacagtcaggaaatggtacggctgctgcttcaggcaattcagagcttcgagaagaaagtgcgagtgatctatacgcagctcagtaaaactgtggtttgcaagcagaaggcgctggaactgttgcccaaggtggaagaggtggtgagcttaatgaatgaggatgagaagactgttgtccggctgcaggagaagcggcagaaggagctctggaatctcctgaagattgcttgtagcaaggtccgtggtcctgtcagtggaagcccggatagcatgaatgcctctcgacttagccagcctgggcagctgatgtctcagccctccacggcctccaacagcttacctgagccagccaagaagagtgaagaactggtggctgaagcacataacctctgcaccctgctagaaaatgccatacaggacactgtgagggaacaagaccagagtttcacggccctagactggagctggttacagacggaagaagaagagcacagctgcctggagcaggcctcatgatgtggggggactcgaccccctgacatggggcagcccatagcaggccttgtgcagtggggggactcgaccccctgacatggggctgcctggagcaggccgcgtgacgtggggctgcctggccgcggctctcacatggtggttcctgctgcactgatggcccaggggtctctggtatccagatggagctctcgcttcctcagcagctgtgactttcacccaggacccaggacgcagccctccgtgggcactgccggcgccttgtctgcacactggaggtcctccattacagaggcccagcgcacatcgctggccccacaaacgttcaggggtacagccatggcagctccttcctctgccgtgagaaaagtgcttggagtacggtttgccacacacgtgactggacagtgtccaattcaaatctttcagggcagagtccgagcagcgcttggtgacagcctgtcctctcctgctctccaaaggccctgctccctgtcctctctcactttacagcttgtgtttcttctggattcagcttctcctaaacagacagtttaattatagttgcggcctggccccatcctcacttcctctttttatttcactgctgctaaaattgtgtttttacctactactttggtggttgtcctcttttcggcaaagttggagcgagtgccaagctctccatctgtggtcctttctgccaagagcgactcatagtaaccaggatgggagagcagctgccttattctgaatcccaaaaattacttgggggtgattgtcacagaggagggacagaaagggtatctgctgaccaccagcctgcctacccatgcccatgtctccattcctgctcaagcgtgtgtgctgggccggggagtccctgtctctcacagcatctagcagtattattaaatggattcattttaaaaatagctcctatattttgtaacatgtctcaaacactcatactgggttccacaatccactgttagaatacctatggttagggcttctgaactaaaataatggaaaattttaacaatttgtatagtgcctggatcattactagtgccataaccctgcttcttcaacatttcacagaacttctcttttatataaaggcaagagcacaaaatgagttcagatgatcacaaacaggtgagttttgttggagaagaaagttggagtaggagactttcacaagtggtttccatggagatagaatgaagcattctgtggtcaagtaagtttagggagctattcatgtttcacttgctttgtggagattcacactatgcactgggaaagtatctgaaaagtcttataataaagaaacaggcttaactttgtgtaagaacactgtttatcaatgtcatttggctatagaaacattttctcctgctgattgtgtgtgtgaaacatgtattaacattccaatgaactagcatttaataaagcacaattttggaaaccctggtaaatgacagtgggaaataacacccgaaaggcaaggacgggcagattggggagggaaaggatgttgggctaagggctgtgagcttatgttacaggcaactgagccactgaagaattttgacgaagaaaatgccaaccaaagcagtcattttaaaagtttatggctgttcagttacaggacaagttgtgaaaagaaag

SEQ ID NO: 1476 - DNA, 3672 bp, Homo Sapiens
  NM_001558
gtcagtcccagcccaagggtagctggaggcgcgcaggccggctccgctccggccccggacgatgcggcgcgcccaggatgctgccgtgcctcgtagtgctgctggcggcgctcctcagcctccgtcttggctcagacgctcatgggacagagctgcccagccctccgtctgtgtggtttgaagcagaatttttccaccacatcctccactggacacccatcccaaatcagtctgaaagtacctgctatgaagtggcgctcctgaggtatggaatagagtcctggaactccatctccaactgtagccagaccctgtcctatgaccttaccgcagtgaccttggacctgtaccacagcaatggctaccgggccagagtgcgggctgtggacggcagccggcactccaactggaccgtcaccaacacccgcttctctgtggatgaagtgactctgacagttggcagtgtgaacctagagatccacaatggcttcatcctcgggaagattcagctacccaggcccaagatggcccccgcaaatgacacatatgaaagcatcttcagtcacttccgagagtatgagattgccattcgcaaggtgccgggaaacttcacgttcacacacaagaaagtaaaacatgaaaacttcagcctcctaacctctggagaagtgggagagttctgtgtccaggtgaaaccatctgtcgcttcccgaagtaacaaggggatgtggtctaaagaggagtgcatctccctcaccaggcagtatttcaccgtgaccaacgtcatcatcttctttgcctttgtcctgctgctctccggagccctcgcctactgcctggccctccagctgtatgtgcggcgccgaaagaagctacccagtgtcctgctcttcaagaagcccagccccttcatcttcatcagccagcgtccctccccagagacccaagacaccatccacccgcttgatgaggaggcctttttgaaggtgtccccagagctgaagaacttggacctgcacggcagcacagacagtggctttggcagcaccaagccatccctgcagactgaagagccccagttcctcctccctgaccctcacccccaggctgacagaacgctgggaaacagggagccccctgtgctgggggacagctgcagtagtggcagcagcaatagcacagacagcgggatctgcctgcaggagcccagcctgagccccagcacagggcccacctgggagcaacaggtggggagcaacagcaggggccaggatgacagtggcattgacttagttcaaaactctgagggccgggctggggacacacagggtggctcggccttgggccaccacagtcccccggagcctgaggtgcctggggaagaagacccagctgctgtggcattccagggttacctgaggcagaccagatgtgctgaagagaaggcaaccaagacaggctgcctggaggaagaatcgcccttgacagatggccttggccccaaattcgggagatgcctggttgatgaggcaggcttgcatccaccagccctggccaagggctatttgaaacaggatcctctagaaatgactctggcttcctcaggggccccaacgggacagtggaaccagcccactgaggaatggtcactcctggccttgagcagctgcagtgacctgggaatatctgactggagctttgcccatgaccttgcccctctaggctgtgtggcagccccaggtggtctcctgggcagctttaactcagacctggtcaccctgcccctcatctctagcctgcagtcaagtgagtgactcgggctgagaggctgcttttgattttagccatgcctgctcctctgcctggaccaggaggagggcccctggggcagaagttaggcacgaggcagtctgggcacttttctgcaagtccactggggctggccccagccaggccctgcagggctggtcagggtgtctggggcaggaggaggccaactcactgaactagtgcagggtatgtgggtggcactgacctgttctgttgactggggccctgcagactctggcagagctgagaagggcagggaccttctccctcctaggaactctttcctgtatcataaaggattatttgctcaggggaaccatggggctttctggagttgtggtgaggccaccaggctgaagtcagctcagacccagacctccctgcttaggccactcgagcatcagagcttccagcaggaggaagggctgtaggaatggaagcttcagggccttgctgctggggtcatttttaggggaaaaaggaggatatgatggtcacatggggaacctcccctcatcgggcctctggggcaggaagcttgtcactggaagatcttaaggtatatattttctggacactcaaacacatcataatggattcactgaggggagacaaagggagccgagaccctggatggggcttccagctcagaacccatccctctggtgggtacctctggcacccatctgcaaatatctccctctctccaacaaatggagtagcatccccctggggcacttgctgaggccaagccactcacatcctcactttgctgccccaccatcttgctgacaacttccagagaagccatggttttttgtattggtcataactcagccctttgggcggcctctgggcttgggcaccagctcatgccagccccagagggtcagggttggaggcctgtgcttgtgtttgctgctaatgtccagctacagacccagaggataagccactgggcactgggctggggtccctgccttgttggtgttcagctgtgtgattttggactagccacttgtcagagggcctcaatctcccatctgtgaaataaggactccacctttaggggaccctccatgtttgctgggtattagccaagctggtcctgggagaatgcagatactgtccgtggactaccaagctggcttgtttcttatgccagaggctaacagatccaatgggagtccatggtgtcatgccaagacagtatcagacacagccccagaagggggcattatgggccctgcctccccataggccatttggactctgccttcaaacaaaggcagttcagtccacaggcatggaagctgtgaggggacaggcctgtgcgtgccatccagagtcatctcagccctgcctttctctggagcattctgaaaacagatattctggcccagggaatccagccatgacccccacccctctgccaaagtactcttaggtgccagtctggtaactgaactccctctggaggcaggcttgagggaggattcctcagggttcccttgaaagctttatttatttattttgttcatttatttattggagaggcagcattgcacagtgaaagaattctggatatctcaggagccccgaaattctagctctgactttgctgtttccagtggtatgaccttggagaagtcacttatcctcttggagcctcagtttcctcatctgcagaataatgactgacttgtctaattcgtagggatgtgaggttctgctgaggaaatgggtatgaatgtgccttgaacacaaagctctgtcaataagtgatacatgttttttattccaataaattgtcaagaccacaggaaaaaaaaaaaaaaaaaa

SEQ ID NO: 1477 - DNA, 6001 bp, Homo Sapiens
  NM_001561
caaggagggatcccacagatgtcacagggctgtcacagagctgtggtgggaatttcccatgagaccccgcccctggctgagtcaccgcactcctgtgtttgacctgaagtcctctcgagctgcagaagcctgaagaccaaggagtggaaagttctccggcagccctgagatctcaagagtgacatttgtgagaccagctaatttgattaaaattctcttggaatcagctttgctagtatcatacctgtgccagatttcatcatgggaaacagctgttacaacatagtagccactctgttgctggtcctcaactttgagaggacaagatcattgcaggatccttgtagtaactgcccagctggtacattctgtgataataacaggaatcagatttgcagtccctgtcctccaaatagtttctccagcgcaggtggacaaaggacctgtgacatatgcaggcagtgtaaaggtgttttcaggaccaggaaggagtgttcctccaccagcaatgcagagtgtgactgcactccagggtttcactgcctgggggcaggatgcagcatgtgtgaacaggattgtaaacaaggtcaagaactgacaaaaaaaggttgtaaagactgttgctttgggacatttaacgatcagaaacgtggcatctgtcgaccctggacaaactgttctttggatggaaagtctgtgcttgtgaatgggacgaaggagagggacgtggtctgtggaccatctccagccgacctctctccgggagcatcctctgtgaccccgcctgcccctgcgagagagccaggacactctccgcagatcatctccttctttcttgcgctgacgtcgactgcgttgctcttcctgctgttcttcctcacgctccgtttctctgttgttaaacggggcagaaagaaactcctgtatatattcaaacaaccatttatgagaccagtacaaactactcaagaggaagatggctgtagctgccgatttccagaagaagaagaaggaggatgtgaactgtgaaatggaagtcaatagggctgttgggactttcttgaaaagaagcaaggaaatatgagtcatccgctatcacagctttcaaaagcaagaacaccatcctacataatacccaggattcccccaacacacgttcttttctaaatgccaatgagttggcctttaaaaatgcaccactttttttttttttttgacagggtctcactctgtcacccaggctggagtgcagtggcaccaccatggctctctgcagccttgacctctgggagctcaagtgatcctcctgcctcagtctcctgagtagctggaactacaaggaagggccaccacacctgactaacttttttgttttttgtttggtaaagatggcatttcaccatgttgtacaggctggtctcaaactcctaggttcactttggcctcccaaagtgctgggattacagacatgaactgccaggcccggccaaaataatgcaccacttttaacagaacagacagatgaggacagagctggtgataaaaaaaaaaaaaaaaaagcattttctagataccacttaacaggtttgagctagtttttttgaaatccaaagaaaattatagtttaaattcaattacatagtccagtggtccaactataattataatcaaaatcaatgcaggtttgttttttggtgctaatatgacatatgacaataagccacgaggtgcagtaagtacccgactaaagtttccgtgggttctgtcatgtaacacgacatgctccaccgtcaggggggagtatgagcagagtgcctgagtttagggtcaaggacaaaaaacctcaggcctggaggaagttttggaaagagttcaagtgtctgtatatcctatggtcttctccatcctcacaccttctgcctttgtcctgctcccttttaagccaggttacattctaaaaattcttaacttttaacataatattttataccaaagccaataaatgaactgcatatgataggtatgaagtacagtgagaaaattaacacctgtgagctcattgtcctaccacagcactagagtgggggccgccaaactcccatggccaaacctggtgcaccatttgcctttgtttgtctgttggtttgcttgagacagtcttgctctgttgcccaggctggaatggagtggctattcacaggcacaatcatagcacactttagccttaaactcctgggctcaagtgatccacccgcctcagtctcccaagtagctgggattacaggtgcaaacctggcatgcctgccattgtttggcttatgatctaaggatagctttttaaattttattcattttatttttttttgagacagtgtctcactctgtctcccaggctggagtacagtggtacaatcttggatcaccgcctcccagtttcaagtgatctccctgcctcagcctcctaagtagctgggactacaggtatgtgccaccacgcctggctaatttttatatttttagtagagacggggtttcaccatgttgtccaggctggtctcaaactcctgacctcaggtgatctgcccacctctgcctcccaaagtgctgggattacaggcatgagccaccatgcctggccatttcttacacttttgtatgacatgcctattgcaagcttgcgtgcctctgtcccatgttattttactctgggatttaggtggagggagcagcttctatttggaacattggccatcgcatggcaaatgggtatctgtcacttctgctcctatttagttggttctactataacctttagagcaaatcctgcagccaagccaggcatcaatagggcagaaaagtatattctgtaaataggggtgaggagaagatatttctgaacaatagtctactgcagtaccaaattgcttttcaaagtggctgttctaatgtactcccgtcagtcatataagtgtcatgtaagtatcccattgatccacatccttgctaccctctggtactatcaggtgcccttaattttgccaagccagtgggtatagaatgagatctcactgtggtcttagtttgcatttgcttggttactgatgagcaccttgtcaaatatttatataccatttgtgtttatttttttaaataaaatgcttgctcatgcttttttgcccatttgcaaaaaaacttggggccgggtgcagtggctcatgcctgtagtcccagctctttgggaggccaaggtgggcagatcgcttgagcccaggagttcgagaccagccttggcaacatggcgaaaccctgtctttacaaaaaatacaaaaattagccgggtgtggtggtgtgcacctgaagtcccagctactcagtaggttcgctttgagcctgggaggcagaggttgcagtgagctgggaccgcatcactacacttcagcctgggcaacagagaaaaaccttttctcagaaacaaacaaacccaaatgtggttgtttgtcctgattcctaaaaggtctttatgtattctagataataatctttggtcagttatatgtgttaaaaaatatcttctttgtggccaggcacggtagctcacacctgtaatcccagcactttgcggggctgaggtgggtggatcatctgaggtcaagagttcaagatcagcctggccaacacagtgaaaccccatctctactaaacatgtacaaaacttagctgggtatggtggcgggtgcctgtaaccccagctgctccagaggctgtggcagaagaatcgcttgaacccaggaggcagaggttgcagcgagccaagattgtgccattgcactccagactgggtgacaagagtgaaattctgcctatctatctatctatctatctatatctatatatatatatatatatatcctttgtaatttatttttccctttttaaaattttttataaaattcttttttatttttatttttagcagaggtgaggtttctgaggtttcattatgttgcccaggctggtcttgaactcctgagctcaagtgatcctcccacctcagccttccaaagtgctggaattgcagacatgagccaccgcgcccctcctgtttttctctaattaatggtgtctttctttgtctttctggtaataagcaaaaagttcttcatttgatttggttaaatttataactgttttctcatatggttaacattttttcttgcctggctaaagaaatccttttctgcccaatactataaagaggtttgcccacattttattccaaaagttttaagttttgtctttcatcttgaagtctaatgtatcaggaactggcttttgtgcctgttgggaggtagtgatccaattccatgtcttgcatgtaggtaaccactggtccctgcgccatgtattcaatacgtcgtctttctcctgcgggtctgcaatctcacctaccatccatcaagtttccatagggccatgggtctgcttctgggctccctgttctgttccattgtcaatttgtctatcctgtgccagtatcacactgtgtttattacaatagctttgtaacagctctcgatatccggtaggacatctccctccaccttctttttctacttcagaagtgtcttagctaggtcaggcacggtggctcacgcctgtaatcccagcactttgggaggccgacgcggatggatcacctgaggtcaggagttttgagacagcctggccaacatggtgaaaccccatctctactaaaaaatacaaaaattagtcaggcatggtggcatgtgcctgtaatcccagctatttgggaggctgaggccggagaattgcttgaacccggggggcggaggttgcagtgagccgagatcgtaccattgcactccagcctgggtgacagagcgaaactctgtctcaggaaaaaaaagaaaagagatgtcttggttattcttggttctttattattcaatataaattttagaagctgaatttgaaaagatttggattggaatttcattaaatctacaggtcaatttagggagagttgataattttacagaattgagtcatctggtgttccaataagaataagagaacaattattggctgtacaattcttgccaaatagtaggcaaagcaaagcttaggaagtatactggtgccatttcaggaacaaagctaggtgcgaatatttttgtctttctgaatcatgatgctgtaagttctaaagtgatttctcctcttggctttggacacatggtgtttaattacctactgctgactatccacaaacagaaagagactggtcatgccccacagggttggggtatccaagataatggagcgaggctctcatgtgtcctaggttacacaccgaaaatccacagtttattctgtgaagaaaggaggctatgtttatgatacagactgtgatatttttatcatagcctattctggtatcatgtgcaaaagctataaatgaaaaacacaggaacttggcatgtgagtcattgctccccctaaatgacaattaataaggaaggaacattgagacagaataaaatgatccccttctgggtttaatttagaaagttccataattaggtttaatagaaataaatgtaaatttctatgattaaaaataaattagcacatttagggatacacaaattataaatcattttctaaatgctaaaaacaagctcaggtttttttcagaagaaagttttaattttttttctttagtggaagatatcactctgacggaaagttttgatgtgaggggcggatgactataaagtgggcatcttcccccacaggaagatgtttccatctgtgggtgagaggtgcccaccgcagctagggcaggttacatgtgccctgtgtgtggtaggacttggagagtgatctttatcaacgtttttatttaaaagactatctaataaaacacaaaactatgatgttcacaggaaaaaaagaataagaaaaaaagaaaaaaaaa

SEQ ID NO: 1478 - DNA, 1227 bp, Homo Sapiens
  NM_001565
ctttgcagataaatatggcacactagccccacgttttctgagacattcctcaattgcttagacatattctgagcctacagcagaggaacctccagtctcagcaccatgaatcaaactgccattctgatttgctgccttatctttctgactctaagtggcattcaaggagtacctctctctagaactgtacgctgtacctgcatcagcattagtaatcaacctgttaatccaaggtctttagaaaaacttgaaattattcctgcaagccaattttgtccacgtgttgagatcattgctacaatgaaaaagaagggtgagaagagatgtctgaatccagaatcgaaggccatcaagaatttactgaaagcagttagcaaggaaaggtctaaaagatctccttaaaaccagaggggagcaaaatcgatgcagtgcttccaaggatggaccacacagaggctgcctctcccatcacttccctacatggagtatatgtcaagccataattgttcttagtttgcagttacactaaaaggtgaccaatgatggtcaccaaatcagctgctactactcctgtaggaaggttaatgttcatcatcctaagctattcagtaataactctaccctggcactataatgtaagctctactgaggtgctatgttcttagtggatgttctgaccctgcttcaaatatttccctcacctttcccatcttccaagggtactaaggaatctttctgctttggggtttatcagaattctcagaatctcaaataactaaaaggtatgcaatcaaatctgctttttaaagaatgctctttacttcatggacttccactgccatcctcccaaggggcccaaattctttcagtggctacctacatacaattccaaacacatacaggaaggtagaaatatctgaaaatgtatgtgtaagtattcttatttaatgaaagactgtacaaagtagaagtcttagatgtatatatttcctatattgttttcagtgtacatggaataacatgtaattaagtactatgtatcaatgagtaacaggaaaattttaaaaatacagatagatatatgctctgcatgttacataagataaatgtgctgaatggttttcaaaataaaaatgaggtactctcctggaaatattaagaaagactatctaaatgttgaaagatcaaaaggttaataaagtaattataactaagaaaaaaaaaaaa

SEQ ID NO: 1479 - DNA, 1516 bp, Homo Sapiens
  NM_001568
gagcacagactcccttttctttggcaagatggcggagtacgacttgactactcgcatcgcgcactttttggatcggcatctagtctttccgcttcttgaatttctctctgtaaaggagatatataatgaaaaggaattattacaaggtaaattggaccttcttagtgataccaacatggtagactttgctatggatgtatacaaaaacctttattctgatgatattcctcatgctttgagagagaaaagaaccacagtggttgcacaactgaaacagcttcaggcagaaacagaaccaattgtgaagatgtttgaagatccagaaactacaaggcaaatgcagtcaaccagggatggtaggatgctctttgactacctggcggacaagcatggttttaggcaggaatatttagatacactctacagatatgcaaaattccagtacgaatgtgggaattactcaggagcagcagaatatctttatttttttagagtgctggttccagcaacagatagaaatgctttaagttcactctggggaaagctggcctctgaaatcttaatgcagaattgggatgcagccatggaagaccttacacggttaaaagagaccatagataataattctgtgagttctccacttcagtctcttcagcagagaacatggctcattcactggtctctgtttgttttcttcaatcaccccaaaggtcgcgataatattattgacctcttcctttatcagccacaatatcttaatgcaattcagacaatgtgtccacacattcttcgctatttgactacagcagtcataacaaacaaggatgttcgaaaacgtcggcaggttctaaaagatctagttaaagttattcaacaggagtcttacacatataaagacccaattacagaatttgttgaatgtttatatgttaactttgactttgatggggctcagaaaaagctgagggaatgtgaatcagtgcttgtgaatgacttcttcttggtggcttgtcttgaggatttcattgaaaatgcccgtctcttcatatttgagactttctgtcgcatccaccagtgtatcagcattaacatgttggcagataaattgaacatgactccagaagaagctgaaaggtggattgtaaatttgattagaaatgcaagactggatgccaagattgattctaaattaggtcatgtggttatgggtaacaatgcagtctcaccctatcagcaagtgattgaaaagaccaaaagcctttcctttagaagccagatgttggccatgaatattgagaagaaacttaatcagaatagcaggtcagaggctcctaactgggcaactcaagattctggcttctactgaagaaccataaagaaaagatgaaaaaaaaaactatcaaagaaagatgaaataataaaactattatataaagggtgacttacattttggaaacaacatattacgtataaattttgaagaattggaataaaattgattcattttaaaaaaaaa

SEQ ID NO: 1480 - DNA, 3469 bp, Homo Sapiens
  NM_001570
gcccctggctagagaagccgcagcccgcagtgtccgacccagtcgtcccgcgccggagccggccccgtagcgtgccatggcctgctacatctaccagctgccctcctgggtgctggacgacctgtgccgcaacatggacgcgctcagcgagtgggactggatggagttcgcctcctacgtgatcacagacctgacccagctgcggaagatcaagtccatggagcgggtgcagggtgtgagcatcacgcgggagctgctgtggtggtggggcatgcggcaggccaccgtccagcaacttgtggacctcctgtgccgcctggagctctaccgggctgcccagatcatcctgaactggaaaccggctcctgaaatcaggtgtcccattccagccttccctgactctgtgaagccagaaaagcctttggcagcttctgtaagaaaggctgaggatgaacaggaagaggggcagcctgtgaggatggccacctttccaggcccagggtcctctccagccagagcccaccagccggcctttctccagcctcctgaagaagatgcccctcattccttgagaagcgacctccccacttcgtctgattcaaaggacttcagcacctccattcctaagcaggaaaaacttttgagcttggctggagacagccttttctggagtgaggcagacgtggtccaggcaaccgatgacttcaatcaaaaccgcaaaatcagccaggggacctttgctgacgtctacagagggcacaggcacgggaagccattcgtcttcaagaagctcagagagacagcctgttcaagtccaggatcaatcgaaagattcttccaggcagagttgcagatttgtcttagatgctgccaccccaatgtcttacctgtgctgggcttctgtgctgcaagacagtttcacagcttcatctacccctacatggcaaatggttccctacaggacagactgcagggtcagggtggctcggaccccctcccctggccccagcgtgtcagcatctgctcagggctgctctgtgccgtcgagtacctgcatggtctggagatcatccacagcaacgtcaagagctctaatgtcttgctggaccaaaatctcacccccaaacttgctcacccaatggctcatctgtgtcctgtcaacaaaaggtcaaaatacaccatgatgaagactcacctgctccggacgtcagccgcgtatctgccagaggatttcatccgggtggggcagctgacaaagcgagtggacatcttcagctgtggaatagtgttggccgaggtcctcacgggcatccctgcaatggataacaaccgaagcccggtttacctgaaggacttactcctcagtgatattccaagcagcaccgcctcgctctgctccaggaagacgggcgtggagaacgtgatggcaaaggagatctgccagaagtacctggagaagggcgcagggaggcttccggaggactgcgccgaggccctggccacggctgcctgcctgtgcctgcggaggcgtaacaccagcctgcaggaggtgtgtggctctgtggctgctgtggaagagcggctccgaggtcgggagacgttgctcccttggagtgggctttctgagggtacaggctcttcttccaacaccccagaggaaacagacgacgttgacaattccagccttgatgcctcctcctccatgagtgtggcaccctgggcaggggctgccaccccacttctccccacagagaatggggaaggaaggctgcgggtcatcgtgggaagggaggctgactcctcctctgaggcctgtgttggcctggagcctccccaggatgttacagaaacttcgtggcaaattgagatcaatgaggccaaaaggaaactgatggagaatattctgctctacaaagaggaaaaagtggacagcattgagctctttggcccctgatgaccggaacacagctgaggacccttgtcctcagttggaaagatgagcatcagatcaagaaaaaggtctgaggcagaatccaagatctgccaggaaacacacaacaaaacatctgctgtcctgggtgggagggaaacttcatttcactggaatgagttgggagagaaaggccctcagcttttagagacacaaaaatccatgaagtctcttcctttctgggctttgttagtcagagcaggggatcagaggagactgaagcagaaaccctgcacacgggcccaggatgtggctgattttgtggttccggggagtatgtgatgataatcacccccagcagattccattacctcagcagctcttgttcccccgccactggcagttctgcaatgccatagcattttccagagctaagatctctgggttgtatttgctgacagcctgcaagcttgcatgctctgaaagattttttttagtttttaatttttttgtagagatggggtctcgctttgttggcgcaatcctcccacctcagactcccaaagtgctggaattacagttgggagccactgtgcctggcctggaagactttcaacttgtgtctcagtgcagttcttgactcacctctctgggcctcaggttctacaaatgccagacacctagcgaagagctctgcaggctttccactgcctgtattggaaatcttgcaattcacataattattcagtcactgcctggtacctttatcttcccatcccactaatgttagtgttttttaatggagcttttattctgagaatatgtgtttgtctgtttgtttgttttttgagacagagtctcactttgtcacccaggctggagtgcagtggcacgatctcagctcactgcaagctctgcctctcaggttcaagtgattctcctgcctcagcctcctgagtagatgggactgtaggcacctgccactatgcctggctaatttttgtgtttttagtagagacagggtttcaccatattggccaggctggtctcgaactactgacctcgtgatctgcccgccttggcctatcaaagtgttgggattacaggcttgagccaccgcacccggccgagaatatgtgttgttatttatgactggattatgaagaatcaggagaatgcatttcatgtctgattctgctgctaattaagtcaatcatttaatttttgggacctcagtttctttgtaagtaaaataacacctgcttgttcttcatccctgggctgttgggaggaacagatgagacagtggctatagaagcacttggaaaatgcacttgtcctgttttgtaaaataaaaaggtattaaatgtgtatttctgccatgtacctaatgattattcagtgcgtatatatctgaaaagtcatgttgcaaatctttctgtgaaacagatgctattttaaattcactgggagaaatatcctatttaaagtaatctatagtaatttctttttatataataaaaatatatttgtaaagtc

SEQ ID NO: 1481 - DNA, 1626 bp, Homo Sapiens
  NM_001571
ggaaacccaaaaaagggcataggggcgggaacagcccagcgggccgtcccatcggcttttgggtctgttacccaaagaatgataaagttggttttatttcaagaagtcgatcaaaaagaaagccccagcgctctagagctcagctgacgggaaagggggtgcgcagcctcgagtttgagagctacccggagctccaagacaggggtgggttccagctgcccgcacgccccgaccttccatcgtaggccggaccatgggaaccccaaagccacggatcctgccctggctggtgtcgcagctggacctggggcaactggagggcgtggcctgggtgaacaagagccgcacgcgcttccgcatcccttggaagcacggcctacggcaggatgcacagcaggaggatttcggaatcttccaggcctgggccgaggccactggtgcatatgttcccgggagggataagccagacctgccaacctggaagaggaatttccgctctgccctcaaccgcaaagaagggttgcgtttagcagaggaccggagcaaggaccctcacgacccacataaaatctacgagtttgtgaactcaggagttggggacttttcccagccagacacctctccggacaccaatggtggaggcagtacttctgatacccaggaagacattctggatgagttactgggtaacatggtgttggccccactcccagatccgggacccccaagcctggctgtagcccctgagccctgccctcagcccctgcggagccccagcttggacaatcccactcccttcccaaacctggggccctctgagaacccactgaagcggctgttggtgccgggggaagagtgggagttcgaggtgacagccttctaccggggccgccaagtcttccagcagaccatctcctgcccggagggcctgcggctggtggggtccgaagtgggagacaggacgctgcctggatggccagtcacactgccagaccctggcatgtccctgacagacaggggagtgatgagctacgtgaggcatgtgctgagctgcctgggtgggggactggctctctggcgggccgggcagtggctctgggcccagcggctggggcactgccacacatactgggcagtgagcgaggagctgctccccaacagcgggcatgggcctgatggcgaggtccccaaggacaaggaaggaggcgtgtttgacctggggcccttcattgtagatctgattaccttcacggaaggaagcggacgctcaccacgctatgccctctggttctgtgtgggggagtcatggccccaggaccagccgtggaccaagaggctcgtgatggtcaaggttgtgcccacgtgcctcagggccttggtagaaatggcccgggtagggggtgcctcctccctggagaatactgtggacctgcacatttccaacagccacccactctccctcacctccgaccagtacaaggcctacctgcaggacttggtggagggcatggatttccagggccctggggagagctgagccctcgctcctcatggtgtgcctccaacccccctgttccccaccacctcaaccaataaactggttcctgctatgatcaaaaaaaaaaa

SEQ ID NO: 1482 - DNA, 3344 bp, Homo Sapiens
  NM_001605
ggtacagctgcgcgtctgcgggaataggtgcagcgggcccttggcgggggactctgagggaggagctggggacggcgaccctaggagagttctttggggtgactttcaagatggactctactctaacagcaagtgaaatccggcagcgatttatagatttcttcaagaggaacgagcatacgtatgttcactcgtctgccaccatcccattggatgaccccactttgctctttgccaatgcaggcatgaaccagtttaaacccattttcctgaacacaattgacccatctcaccccatggcaaagctgagcagagctgccaatacccagaagtgcatccgggctgggggcaaacataatgacctggacgatgtgggcaaggatgtctatcatcacaccttcttcgagatgctgggctcttggtcttttggagattactttaaggaattggcatgtaagatggctctggaactcctcacccaagagtttggcattcccattgaaagactttatgttacttactttggcggggatgaagcagctggcttagaagcagatctggaatgcaaacagatctggcaaaatttggggctggatgacaccaaaatcctcccaggcaacatgaaggataacttctgggagatgggtgacacgggcccctgtggtccttgcagtgagatccactacgaccggattggtggtcgggacgccgcacatcttgtcaaccaggacgaccctaatgtgctggagatctggaaccttgtgttcatccagtataacagggaagctgatggcattctgaaacctcttcccaagaaaagcattgacacagggatgggcctggaacgactggtatctgtgctgcagaataagatgtccaactatgacactgacctttttgtcccttactttgaagccattcagaagggcacaggtgcccgaccatacactgggaaagttggtgctgaggatgccgatgggattgacatggcctaccgggtgctggctgaccacgctcggaccatcactgtggcactggctgatggtggccggcctgacaacacagggcgtggatatgtgttgagacggattctccgccgagctgtccgatacgcccatgaaaagctcaatgccagcaggggcttctttgctacgttagtggatgttgtcgtccagtccctgggagatgcatttcctgagctgaagaaggacccagacatggtgaaggacatcattaatgaagaagaggtgcagtttctcaagactctcagcagagggcgtcgcatcctggacaggaaaattcagagcctgggagacagcaagaccattcccggagacactgcttggctcctctatgacacctatgggtttccagtggatctgactggactgattgctgaagagaagggcctggtggtagacatggatggctttgaagaggagaggaaactggcccagctgaaatcacagggcaagggagctggtggggaagacctcattatgctggacatttacgctatcgaagagctccgggcacggggtctggaggtcacagatgattccccaaagtacaattaccatttggactccagtggtagctatgtatttgagaacacagtggctacggtgatggctctgcgcagggagaagatgttcgtggaagaggtgtccacaggccaggagtgtggagtggtgctggacaagacctgtttctatgctgagcaaggaggccagatctatgacgaaggctacctggtgaaggtggatgacagcagtgaagataaaacagagtttacagtgaagaatgctcaggtccgaggagggtatgtgctacacattggaaccatctacggtgacctgaaagtgggggatcaggtctggctgtttattgatgagccccgacgaagacccatcatgagcaaccacacagctacgcacattctgaacttcgccctgcgctcagtgcttggggaagctgaccagaaaggctcattggttgctcctgaccgcctcagatttgactttactgccaagggagccatgtccacccaacagatcaagaaggctgaagagattgctaatgagatgattgaggcagccaaggccgtctatacccaggattgccccctggcagcagcgaaagccatccagggcctacgggctgtgtttgatgagacctatcctgaccctgtgcgagtcgtctccattggggtcccggtgtccgagttgctggatgacccctctgggcctgctggctccctgacttctgttgagttctgtgggggaacgcacctgcggaactcgagtcatgcaggagcttttgtgatcgtgacggaagaagccattgccaagggtatccggaggattgtggctgtcacaggtgccgaggcccagaaggccctcaggaaagcagagagcttgaagaaatgtctctctgtcatggaagccaaagtgaaggctcagactgctccaaacaaggatgtgcagagggagatcgctgaccttggagaggccctggccactgcagtcatcccccagtggcagaaggatgaattgcgggagactctcaaatccctaaagaaggtcatggatgacttggaccgagccagcaaagccgatgtccagaaacgagtgttagagaagacgaagcagttcatcgacagcaaccccaaccagcctcttgtcatcctggagatggagagcggcgcctcagccaaggccctgaatgaagccttgaagctcttcaagatgcactcccctcagacttctgccatgctcttcacggtggacaatgaggctggcaagatcacgtgcctgtgtcaagttccccagaatgcagccaatcggggcttaaaagccagcgagtgggtgcagcaggtgtcaggcttgatggacggtaaaggtggtggcaaggatgtgtctgcacaggccacaggcaagaacgttggctgcctgcaggaggcgctgcagctggccacttccttcgcccagctgcgcctcggggatgtaaagaactgagtggggaaggaggaggctcccactggatccatccgtccagccaagagctcttcatctgctacaagaacatttgaatcttgggacctttaaagagcccctcctaacccagcagtaactggaacacacttgggagcagtcctatgtctcagtgccccttaaatttctgccctgagccctccacgtcagtgccatcggtctagaaccactaaccccgcattgctgttgatcgtcacgctcgcatctatagataacggctctccagacctgagctttccgcgtcagcaagtaggaatcgtttttgctgcagagaataaaaggaccacgtgc

SEQ ID NO: 1483 - DNA, 1840 bp, Homo Sapiens
  NM_001607
gggttcccaggccgactctccttgtggttggctgaggctggaggtggacgggacttttggagggtcgctcgcgtctgttcgcagagctgtgggcggagttgaggccttggaggctgagatgtggttctgcgcgtgtgcggacggctgtctgttaactccgcggtcagttcccggactggtggctggtctgcagggttgacctgcgcaatgcagaggctgcaggtagtgctgggccacctgaggggtccggccgattccggctggatgccgcaggccgcgccttgcctgagcggtgccccgcaggcctcggccgcggacgtggtggtggtgcacgggcggcgcacggccatctgccgggcgggccgcggcggcttcaaggacaccacccccgacgagcttctctcggcagtcatgaccgcggttctcaaggacgtgaatctgaggccggaacagctgggggacatctgtgtcggaaatgtgctgcagcctggggccggggcaatcatggcccgaatcgcccagtttctgagtgacatcccggagactgtgcctttgtccactgtcaatagacagtgttcgtcggggctacaggcagtggccagcatagcaggtggcatcagaaatgggtcttatgacattggcatggcctgtggggtggagtccatgtccctggctgacagagggaaccctggaaatattacttcgcgcttgatggagaaggagaaggccagagattgcctgattcctatggggataacctctgagaatgtggctgagcggtttggcatttcacgggagaagcaggatacctttgccctggcttcccagcagaaggcagcaagagcccagagcaagggctgtttccaagctgagattgtgcctgtgaccaccacggtccatgatgacaagggcaccaagaggagcatcactgtgacccaggatgagggtatccgccccagcaccaccatggagggcctggccaaactgaagcctgccttcaagaaagatggttctaccacagctggaaactctagccaggtgagtgatggggcagctgccatcctgctggcccggaggtccaaggcagaagagttgggccttcccatccttggggtcctgaggtcttatgcagtggttggggtcccacctgacatcatgggcattggacctgcctatgccatcccagtagctttgcaaaaagcagggctgacagtgagtgacgtggacatcttcgagatcaatgaggcctttgcaagccaggctgcctactgtgtggagaagctacgactcccccctgagaaggtgaaccccctggggggtgcagtggccttagggcacccactgggctgcactggggcacgacaggtcatcacgctgctcaatgagctgaagcgccgtgggaagagggcatacggagtggtgtccatgtgcatcgggactggaatgggagccgctgccgtctttgaataccctgggaactgagtgaggtcccaggctggaggcgctacgcagacagtcctgctgctctagcagcaaggcagtaacaccacaaaagcaaaaccacatgggaaaactcagcactggtggtggtggcagtggacagatcaaggcacttcaactcatttggaaaatgtgaacactgatgacatggtataggagtgggtggggtgttgagccacccatcagaccctctttagctgtgcaagataaaagcagcctgggtcacccaggccacaaggccatggttaattcttaaggcaaggcaaatccatggatgagaagtgcaatgggcatagtaaaagtgcatgaatttatcttaaaaaaaaaaaaaaaaaaaaaa

SEQ ID NO: 1484 - DNA, 1506 bp, Homo Sapiens
  NM_001611
cccgggacagccctcggagaaactgcatcatcctcactaatgatccacttcctcctcagggaataaaggctcagggaccggcagttctactctagagcccaccagcctctcagagcctccggtgactggcctgtgtctccccctggatggacatgtggacggcgctgctcatcctgcaagccttgttgctaccctccctggctgatggtgccacccctgccctgcgctttgtagccgtgggtgactggggaggggtccccaatgccccattccacacggcccgggaaatggccaatgccaaggagatcgctcggactgtgcagatcctgggtgcagacttcatcctgtctctaggggacaatttttacttcactggtgtgcaagacatcaatgacaagaggttccaggagacctttgaggacgtattctctgaccgctcccttcgcaaagtgccctggtacgtgctagccggaaaccatgaccaccttggcaatgtctctgcccagattgcatactctaagatctccaagcgctggaacttccccagccctttctaccgcctgcacttcaagatcccacagaccaatgtgtctgtggccatttttatgctggacacagtgacactatgtggcaactcagatgacttcctcagccagcagcctgagaggccccgagacgtgaagctggcccgcacacagctgtcctggctcaagaaacagctggcggcggccagggaggactacgtgctggtggctggccactaccccgtgtggtccatagccgagcacgggcctacccactgcctggtcaagcagctacggccactgctggccacatacggggtcactgcctacctgtgcggccacgatcacaatctgcagtacctgcaagatgagaatggcgtgggctacgtgctgagtggggctgggaatttcatggacccctcaaagcggcaccagcgcaaggtccccaacggctatctgcgcttccactatgggactgaagactcactgggtggctttgcctatgtggagatcagctccaaagagatgactgtcacttacatcgaggcctcgggcaagtccctctttaagaccaggctgccgaggcgagccaggccctgaactcccatgactgcccagctctgaggcccgatctccactgttgggtgggtgggccctgccgggaccctgctcacaggcaggcttttcctccaacctgtggcgctgcagcagggcaggaaggggaaacacagctgatgaactgtggtgccacatgacccttgtggcacagatgcccacgtatgtgaaacacacatggacatgtgtcccagccacagtgttatgctctgtggctggctcacctttgctgagttccggggtgcaatgggggagggagggagggaaagcttcctcctaaatcaagcatctttctgttactgatgttcaataaaagaatagttgccaaggctgaaaaaaaaaaaaaaaaaaaaaaaaaaaaaaaaaa

SEQ ID NO: 1485 - DNA, 5244 bp, Homo Sapiens
  NM_001616
tttttttttttttttttttttttttttggtctgggcttccgaatatgttttatgacggttgattttacaccaggaggtttgtctccgaggaagacccagggaactggatatctagcgagaacttcctccggattccccggcgcctcgggaaaatgggagctgctgcaaagttggcgtttgccgtctttcttatctcctgttcttcaggtgctatacttggtagatcagaaactcaggagtgtcttttctttaatgctaattgggaaaaagacagaaccaatcaaactggtgttgaaccgtgttatggtgacaaagataaacggcggcattgttttgctacctggaagaatatttctggttccattgaaatagtgaaacaaggttgttggctggatgatatcaactgctatgacaggactgattgtgtagaaaaaaaagacagccctgaagtatatttttgttgctgtgagggcaatatgtgtaatgaaaagttttcttattttccggagatggaagtcacacagcccacttcaaatccagttacacctaagccaccctattacaacatcctgctctattccttggtgccacttatgttaattgcggggattgtcatttgtgcattttgggtgtacaggcatcacaagatggcctaccctcctgtacttgttccaactcaagacccaggaccacccccaccttctccattactaggtttgaaaccactgcagttattagaagtgaaagcaaggggaagatttggttgtgtctggaaagcccagttgcttaacgaatatgtggctgtcaaaatatttccaatacaggacaaacagtcatggcaaaatgaatacgaagtctacagtttgcctggaatgaagcatgagaacatattacagttcattggtgcagaaaaacgaggcaccagtgttgatgtggatctttggctgatcacagcatttcatgaaaagggttcactatcagactttcttaaggctaatgtggtctcttggaatgaactgtgtcatattgcagaaaccatggctagaggattggcatatttacatgaggatatacctggcctaaaagatggccacaaacctgccatatctcacagggacatcaaaagtaaaaatgtgctgttgaaaaacaacctgacagcttgcattgctgactttgggttggccttaaaatttgaggctggcaagtctgcaggcgatacccatggacaggttggtacccggaggtacatggctccagaggtattagagggtgctataaacttccaaagggatgcatttttgaggatagatatgtatgccatgggattagtcctatgggaactggcttctcgctgtactgctgcagatggacctgtagatgaatacatgttgccatttgaggaggaaattggccagcatccatctcttgaagacatgcaggaagttgttgtgcataaaaaaaagaggcctgttttaagagattattggcagaaacatgctggaatggcaatgctctgtgaaaccattgaagaatgttgggatcacgacgcagaagccaggttatcagctggatgtgtaggtgaaagaattacccagatgcagagactaacaaatattattaccacagaggacattgtaacagtggtcacaatggtgacaaatgttgactttcctcccaaagaatctagtctatgatggttgcgccatctgtgcacactaagaaatgggactctgaactggagctgctaagctaaagaaactgcttacagtttattttctgtgtaaaatgagtaggatgtctcttggaaatgttaagaaagaagaccctttgttgaaaaatgttgctctgggagacttactgcattgccgacagcacagatgtgaaggacatgagactaagagaaaccttgcaaactctataaagaaacttttgaaaaagtgtacatgaagaatgtagccctctccaaatcaaggatcttttggacctggctaatggagtgtttgaaaactgacatcagatttcttaatgtctgtcagaagacactaattccttaaatgaactactgctattttttttaaatcaaaaacttttcatttcagattttaaaaagggtaacttgtttttattgcatttgctgttgtttctataaatgactattgtaatgccaatatgacacagcttgtgaatgtttagtgtgctgctgttctgtgtacataaagtcatcaaagtggggtacagtaaagaggcttccaagcattactttaacctccctcaacaaggtatacctcagttccacggttgctaaattataaaattgaaaacactaacaaaatttgaataataaatcgatccatgttttgtaacaaattcactgtgttatttaaggaaaaaaaggtaagctatgcttagtgccaacaataagtggccattcgtaaagcagtgttttagcatttcttgtgctggcttgtaatgtagggaaaaaaagtgctgttttttgaaaagatggtgtcatttcccccttcttcccatgttttaaagccccatcttatatccagttcccaaaatttgcatacttacctaagtattttttttaggtgtgctgtgtttggggaatatttgaaaatttaaagcatgatttaaaattttttaaagtgagctgtgacactggaaagctcttcattttatcttttaaaatagagttttttctatttatatatgtaaaattgtagtgtatttcttttcaccaaacagtgtgtgggacattctttatcactgttttaggatcacctcaggaagtgtcgttacccagaattccccactgtctgctatgagacttgtaactttatcactatacttctgcttggtgccatcttgtcagagtaatatttgatgtctgtgatatgtaaagaattatcctaggataaagatattaaactttaagcagatttcagatgttactgctttaaaacaaatcagggataacaaattaaacgtataacttaaaatatgcaatgacatttagaggtaaccaatgttgatataggtagcatagcctagcctcctccccaaaattgcttttacaactaacactgatactaatttaggatagttcatgccttatccttgctaagaaaatggaattgatggtaggcaggtgctaaagtgcttttcaaaacaatattacgttagaatacaattggattcttcctcaaatttatacaggccaaaaagtaaaacattaattttctgaatttccagattaccaatcaattaatcaacaaatagccagtattatgctgtgtatttctgtcaggtcattttaaaatccatgttaattttataaaagaattttttacatgtcactgtcaggagctcactgtgaatgtgttgtcttcaaatggttatttaaccacacagtacactacattttacatatatgtacgtaatctctgggaatagtaaattaattatgttatttataaacaatacataggtcaacagactttaagcagggaggaaaagaagagtaatagcgtctgtgtgctgcagaccattcagaactgtcacgtgtgtccccatggtctcattcattgtattcctagcaattcccttttcaatgttgagttcacctctttatttcacaaagtacttggtctctcaatttcttgatctggttttgcttccatttaaaaactaatcaagaagggaaaatattgagaatgtgcatacaagaaaatcattaatttcctgaagatgaatttctacctgttgtgaacatttaactttctttttaaaagttaaacaaaaataaacaagggatattatgatgaatgtttggcttatgtgagtactagagataaaatttttaaacccagttattcacaatataaaatgttttcaagttagaaaaaatttttagaaatcctgggtattgtatttaactgtagctaaccaattttaaaacttgtattcttttgagaactattattaatagaaaaactttttataagcagtaaaataagaatgttccagtgactacctgtccttatacctagtcttgttaaaactttcttttgcagggtatttagtgtttggtttacagtcagtgcagagtgggcaagttaacagaaagtttgagctagagatactggaaaaaaaaaagatcaaagaatgagaaaaatggtgatccattttggggcaaactgagaccccccaaataactctttcctcatgtgtatggtgctcctcatgactcgtcttgtattttgcctttctgatacccatcagaactgctgctgctctaacttatactctttaccttgcccagatctccgcgtaaggaatgctttatgatcaacttgccataggactgatggattaaccagtgttcggctttatttgaagtctatgccctgcacagctcttgtatgtattttagatgctagaagtttttttagcatgtgatgtgtgattcttgtttgaattctaggtaccttgtgaattccagaaaaagagactgtgcttcacgattgttagtcccatgaacttgcactatctatctttcatggtgatgttttgaaaatacaatcaggaaaaaacccaacacctttggaatttaaaatagaatcatatcatgaaatttaaaaagaatctcttctgttgcatttcctcacccctaagtaacagctacatttaagtaaaatgcaggtggtaggggaaaaaaaaccatggcgagatggtggtttagtggaataaactgattactggtttttttgtttttttttttttttttaaagaaagaagcttcatcacagatactttccagtttctcttttatacttttttgaaagattactttttaggaacatttggtatgatatgcataaaattatttatccatttatgggcaaaatgatacaagtagcatcttgattgaacatcatttacctcagatattcaaccagcagtacgttttttatgcagtctcaacccatatcccatttgttacctctcagaatattggtaagcagttattttcgctttactctgtatttcttgtgttttgggcacaggttattgtactactgtcaaatcgtacttgctattttttctgcaagtatttaacagaaagcttaaaatccccataaaaccccaccttggataagtgattgttaaatattgtacaaataaaatgtatgctatccccattccatccccaagttaaataaaaaaatgaatacggta

SEQ ID NO: 1486 - DNA, 4001 bp, Homo Sapiens
  NM_001618
aggcatcagcaatctatcagggaacggcggtggccggtgcggcgtgttcggtggcggctctggccgctcaggcgcctgcggctgggtgagcgcacgcgaggcggcgaggcggcagcgtgtttctaggtcgtggcgtcgggcttccggagctttggcggcagctaggggaggatggcggagtcttcggataagctctatcgagtcgagtacgccaagagcgggcgcgcctcttgcaagaaatgcagcgagagcatccccaaggactcgctccggatggccatcatggtgcagtcgcccatgtttgatggaaaagtcccacactggtaccacttctcctgcttctggaaggtgggccactccatccggcaccctgacgttgaggtggatgggttctctgagcttcggtgggatgaccagcagaaagtcaagaagacagcggaagctggaggagtgacaggcaaaggccaggatggaattggtagcaaggcagagaagactctgggtgactttgcagcagagtatgccaagtccaacagaagtacgtgcaaggggtgtatggagaagatagaaaagggccaggtgcgcctgtccaagaagatggtggacccggagaagccacagctaggcatgattgaccgctggtaccatccaggctgctttgtcaagaacagggaggagctgggtttccggcccgagtacagtgcgagtcagctcaagggcttcagcctccttgctacagaggataaagaagccctgaagaagcagctcccaggagtcaagagtgaaggaaagagaaaaggcgatgaggtggatggagtggatgaagtggcgaagaagaaatctaaaaaagaaaaagacaaggatagtaagcttgaaaaagccctaaaggctcagaacgacctgatctggaacatcaaggacgagctaaagaaagtgtgttcaactaatgacctgaaggagctactcatcttcaacaagcagcaagtgccttctggggagtcggcgatcttggaccgagtagctgatggcatggtgttcggtgccctccttccctgcgaggaatgctcgggtcagctggtcttcaagagcgatgcctattactgcactggggacgtcactgcctggaccaagtgtatggtcaagacacagacacccaaccggaaggagtgggtaaccccaaaggaattccgagaaatctcttacctcaagaaattgaaggttaaaaaacaggaccgtatattccccccagaaaccagcgcctccgtggcggccacgcctccgccctccacagcctcggctcctgctgctgtgaactcctctgcttcagcagataagccattatccaacatgaagatcctgactctcgggaagctgtcccggaacaaggatgaagtgaaggccatgattgagaaactcggggggaagttgacggggacggccaacaaggcttccctgtgcatcagcaccaaaaaggaggtggaaaagatgaataagaagatggaggaagtaaaggaagccaacatccgagttgtgtctgaggacttcctccaggacgtctccgcctccaccaagagccttcaggagttgttcttagcgcacatcttgtccccttggggggcagaggtgaaggcagagcctgttgaagttgtggccccaagagggaagtcaggggctgcgctctccaaaaaaagcaagggccaggtcaaggaggaaggtatcaacaaatctgaaaagagaatgaaattaactcttaaaggaggagcagctgtggatcctgattctggactggaacactctgcgcatgtcctggagaaaggtgggaaggtcttcagtgccacccttggcctggtggacatcgttaaaggaaccaactcctactacaagctgcagcttctggaggacgacaaggaaaacaggtattggatattcaggtcctggggccgtgtgggtacggtgatcggtagcaacaaactggaacagatgccgtccaaggaggatgccattgagcacttcatgaaattatatgaagaaaaaaccgggaacgcttggcactccaaaaatttcacgaagtatcccaaaaagttctaccccctggagattgactatggccaggatgaagaggcagtgaagaagctgacagtaaatcctggcaccaagtccaagctccccaagccagttcaggacctcatcaagatgatctttgatgtggaaagtatgaagaaagccatggtggagtatgagatcgaccttcagaagatgcccttggggaagctgagcaaaaggcagatccaggccgcatactccatcctcagtgaggtccagcaggcggtgtctcagggcagcagcgactctcagatcctggatctctcaaatcgcttttacaccctgatcccccacgactttgggatgaagaagcctccgctcctgaacaatgcagacagtgtgcaggccaaggtggaaatgcttgacaacctgctggacatcgaggtggcctacagtctgctcaggggagggtctgatgatagcagcaaggatcccatcgatgtcaactatgagaagctcaaaactgacattaaggtggttgacagagattctgaagaagccgagatcatcaggaagtatgttaagaacactcatgcaaccacacacaatgcgtatgacttggaagtcatcgatatctttaagatagagcgtgaaggcgaatgccagcgttacaagccctttaagcagcttcataaccgaagattgctgtggcacgggtccaggaccaccaactttgctgggatcctgtcccagggtcttcggatagccccgcctgaagcgcccgtgacaggctacatgtttggtaaagggatctatttcgctgacatggtctccaagagtgccaactactgccatacgtctcagggagacccaataggcttaatcctgttgggagaagttgcccttggaaacatgtatgaactgaagcacgcttcacatatcagcaagttacccaagggcaagcacagtgtcaaaggtttgggcaaaactacccctgatccttcagctaacattagtctggatggtgtagacgttcctcttgggaccgggatttcatctggtgtgaatgacacctctctactatataacgagtacattgtctatgatattgctcaggtaaatctgaagtatctgctgaaactgaaattcaattttaagacctccctgtggtaattgggagaggtagccgagtcacacccggtggctctggtatgaattcacccgaagcgcttctgcaccaactcacctggccgctaagttgctgatgggtagtacctgtactaaaccacctcagaaaggattttacagaaacgtgttaaaggttttctctaacttctcaagtcccttgttttgtgttgtgtctgtggggaggggttgttttggggttgtttttgttttttcttgccaggtagataaaactgacatagagaaaaggctggagagagattctgttgcatagactagtcctatggaaaaaaccaagcttcgttagaatgtctgccttactggtttccccagggaaggaaaaatacacttccacccttttttctaagtgttcgtctttagttttgattttggaaagatgttaagcatttatttttagttaaaaataaaaactaatttcatactatttagattttcttttttatcttgcacttattgtcccctttttagttttttttgtttgcctcttgtggtgaggggtgtgggaagaccaaaggaaggaacgctaacaatttctcatacttagaaacaaaaagagctttccttctccaggaatactgaacatgggagctcttgaaatatgtagtattaaaagttgcatttgaaattcttgactttcttatgggcacttttgtcttccaaattaaaactctaccacaaatatacttacccaagggctaatagtaatactcgattaaaaatgcagatgccttctctaaaaaaaaaaaaaaaaa

SEQ ID NO: 1487 - DNA, 18815 bp, Homo Sapiens
  NM_001620
agacccgcccgcccgagccggagttacaagagccgcctccgcgcacgggggcccggccactcggagctgctctgccgcggggactgcaccgcccgccctgccagacccgcccggaacggggctcgtcgccgccagtagccgcagcaccgcagccttgggcctcgcgccggctatggccgtgccctggggctgagccctcaggttgtgaccgagattcccgacgagagagactgaggggaagagaggaaggaggggcgggctcctggcaaggcattcgctcctgagcggaatcctgcaaagatggagaaggaggagacaacccgggagctgctgctgcccaactggcagggtagtggctcccacgggctgaccatcgcccagagggacgacggcgtctttgtgcaggaggtgacgcagaactcccctgcggcccgcactggggtggtcaaggagggggaccagattgtgggtgccaccatctactttgacaacctgcagtcgggtgaggtgacccagctgctgaacaccatggggcaccacacggtgggcctgaagctgcaccgcaagggggaccgctctcccgagcctggccagacctggacccgtgaagtcttcagctcctgcagctctgaagtggttctgagcggggatgatgaggagtaccagcgcatctacaccacgaagatcaagccacggctgaagtcggaagatggagtggaaggagacctcggggagacccagagccgtaccatcacagtgaccagaagggtcacggcctacactgtggatgtgactggccgggaaggagccaaggacatagacatcagtagccctgaattcaagatcaagattccaagacatgaactgactgaaatctccaatgtggatgtggagacccagtctgggaagaccgtgatcagactgccctcgggctcgggggcagcctctccgacaggctctgctgtggatatccgagcaggggccatttctgcttcaggaccagagctccaaggtgctggccactcgaagctccaggtcaccatgcctgggataaaggtgggaggctcaggtgtcaatgtcaatgcaaagggcttggacttgggtggcagaggaggggtccaagttccagcagtggacatttcatcttctcttgggggtagggcagtagaggtacagggcccatctctggagagtggtgatcatggcaaaattaaatttcccaccatgaaagtgccgaaatttggtgtctcaacagggcgtgagggccagacaccaaaggcagggctgagggtttctgcacctgaagtctctgtggggcacaagggcggcaagccaggcttgactatccaagcccctcagctggaagtcagtgtgccctctgccaatattgagggccttgaggggaagctgaagggcccccaaatcactgggccatcacttgagggtgacctaggcctgaaaggtgccaagccacaggggcacattggggtggatgcctctgctccccaaattgggggtagcatcactggccccagtgtggaagttcaggcccctgacattgatgttcaggggcctgggagcaaactgaatgtgcccaagatgaaagtccccaagttctctgtatcaggtgcaaagggagaggaaactgggattgatgtgacactgcctacaggtgaagtgactgttcctggggtctctggggatgtcagcctgcctgagattgctactggtgggctggaaggaaagatgaaaggtactaaagtgaagactcctgaaatgattattcagaaacctaaaatctccatgcaggatgtggatctgagccttgggtctcctaaactgaaaggagatattaaggtttctgctcctggggtgcaaggtgatgttaaaggccctcaagtggcacttaaaggctccagagtggacatagagacaccaaacctagagggaaccttgacaggccctaggcttggcagtccttccgggaaaaccggaacctgtaggatctctatgtcagaagtagacttaaatgtggccgcacctaaagtgaaagggggtgtagatgtcacactccccagagtagaagggaaagtcaaagtccctgaagttgatgtcagaggccccaaagtggatgtcagtgccccagatgtcgaagcgcatggcccagaatggaacctgaaaatgcccaagatgaaaatgcccacgttcagcactccaggagccaaaggggaaggtccagatgttcatatgactctacccaaaggagatatcagtatttcagggcccaaggtcaatgtggaagccccagatgtcaacttggagggtctggggggaaaacttaaaggccccgatgttaagctgcctgatatgagtgtcaagacaccaaagatctccatgcctgatgtagatttgcacgtgaaaggtacaaaggtgaagggagagtatgatgtaactgtaccaaagctggaaggagaactcaaaggcccaaaagtggacattgatgccccagatgtggatgttcatggcccagactggcacttgaagatgcccaagatgaaaatgcccaaattcagtgtgccagggttcaaagcagagggcccagaagtggatgtgaacctgcccaaggctgatgtggacatttccgggcccaagatagatgttactgctcctgatgtgagcattgaggaaccagaagggaaattgaaagggcccaagtttaagatgcctgagatgaacatcaaagtccccaagatctccatgcctgatgtggacttacatctgaaaggccctaacgtaaagggagaatatgatgtcacaatgccaaaggttgaaagtgagattaaagttcctgatgttgaacttaaaagtgccaaaatggacattgatgtcccagatgtggaggttcaaggcccagactggcacctgaagatgcccaagatgaaaatgcccaagttcagcatgcctggcttcaaagcagagggcccagaagtggatgtgaacctgcccaaggctgatgtggacatctcaggacccaaggtgggtgttgaagttccagatgtgaatattgaaggacctgaaggaaagctgaagggccccaagttcaagatgccagagatgaatatcaaggcccccaagatctccatgcctgatgtggacttgcatatgaaaggtcctaaagtaaagggagaatatgatatgacagtgccaaagctggaaggggacctgaaaggcccaaaagtagatgtcagtgccccagatgttgaaatgcagggtcctgactggaacttgaagatgccaaagattaaaatgcccaaatttagcatgcccagcctcaaaggagaggggccagaatttgatgtgaacctgtccaaagcgaatgtggacatttctgcaccaaaagtagatactaatgctccagatctgagccttgaaggacctgaagggaagttgaaaggcccgaagtttaagatgcctgagatgcacttcagagctcctaagatgtctttgccagatgttgacctggatcttaaaggacccaaaatgaaaggaaatgtagatatctctgcaccaaagatagagggtgaaatgcaggttccagatgtggacatcagaggtcccaaggtagatattaaagcaccagatgtggaaggccaaggcctggactggagcctgaaaatacccaagatgaaaatgcccaagttcagcatgcccagcctcaaaggcgagggcccagaagtggatgtgaacttgcctaaggctgacgttgttgtctcaggacccaaggtggacatcgaagccccagatgtgagcctcgaaggtccagaagggaagctgaagggtcccaagtttaagatgcctgagatgcatttcaagacccccaagatctccatgcctgatgtggacttacacttgaaaggccccaaagtcaaaggggatgtggatgtgtctgtgcccaaggtagaaggtgaaatgaaagtgccagatgttgaaatcaaaggacccaaaatggacattgatgccccagatgtggaggttcaaggcccagactggcacctgaagatgcccaagatgaaaatgcccaagtttagcatgcctggcttcaaaggagagggccgagaagtggatgtgaacctgcccaaggctgacattgatgtctcaggacccaaggtggatgttgaagtcccagatgtgagccttgagggcccggaaggaaagctgaagggccccaagtttaagatgcctgagatgcacttcaaggcccccaagatctccatgcctgatgtggacctgaatcttaaggggccaaaattgaagggagatgtggatgtgtccttgcctgaggtagaaggtgaaatgaaagtgccagatgttgacattaaagggcccaaagttgacattagtgctccagatgtggatgttcatggcccagattggcacctgaagatgcccaaggtgaaaatgcccaagttcagcatgcccggcttcaaaggagagggccctgaagtggatgtgaagctgcccaaagctgacgttgatgtctcaggacccaaaatggatgctgaagttccagatgtgaatattgaaggtccagacgcaaaactaaaaggtcccaaattcaagatgccagaaatgagtataaagcctcagaagatatccataccagatgttggtttgcatttgaaaggtcctaaaatgaaaggagattatgatgtaacagttccaaaagtagaaggagagataaaagctcctgatgttgacatcaaaggccccaaagttgatattaatgcaccagatgtggaggttcatggcccagactggcacctgaagatgcccaaggtaaaaatgcccaagttcagcatgcctggctttaaaggagagggcccagaggtggatatgaacctgcccaaggctgaccttggtgtttcaggacccaaggtggacattgatgttccagatgtgaatcttgaagctccagaggggaaactaaaaggccctaagttcaagatgccaagcatgaatatacagacgcacaaaatctctatgcctgatgttggacttaatttgaaagcccctaaactgaaaactgatgtagatgtttcccttcccaaagtggaaggagacttgaagggtcctgaaattgatgtgaaagcccctaagatggatgtgaatgttggtgatattgatattgaaggtccagaagggaagttgaagggccccaagtttaagatgcctgagatgcatttcaaggcccccaagatctccatgcccgatgtggacttacacttgaaaggccccaaagtcaaaggggatatggatgtgtctgtgcccaaggtagaaggtgaaatgaaagtgccagatgttgacattaaagggcccaaagtggacattgatgccccagatgtggaggttcacgacccagattggcacctgaaaatgcccaagatgaaaatgcccaagttcagtatgcctggcttcaaagcagagggccctgaagtggatgtgaatctgccaaaggctgacattgatgtgtctggacccagtgtggacactgatgctcctgatttggatattgagggaccagaaggaaagttgaaaggctccaaatttaagatgcccaagttgaatataaaagctcccaaggtctccatgccagatgtggacttgaatttgaagggacccaaactgaagggagagatagatgcttctgtgccagaactggaaggtgatctcagagggccgcaagttgatgtcaaaggtccttttgtggaagcggaggtgcccgatgttgatctggagtgtcctgatgcaaagttgaaagggcccaagtttaagatgcctgagatgcacttcaaggcccccaagatctccatgcctgatgtggacttacacctgaaaggccccaaagtcaaaggggatgcggatgtgtcggtgccaaaattggagggagatttaacaggccccagtgtgggtgtggaggtgcctgatgttgagctggagtgtcctgatgcaaagttgaaaggccctaaatttaagatgccagacatgcacttcaaggcccccaagatctccatgcctgatgtggacttacacttgaaaggccccaaagtcaaaggggatgtggatgtgtcggtgccaaaattggagggagatttaacaggtcccagtgtgggtgtggaggtgcctgatgttgagctggagtgtcctgatgcaaagttgaaagggcccaagtttaagatgcctgagatgcacttcaagacccccaagatctccatgcctgatgtggacttacacctgaaaggccccaaagtcaaaggggatatggatgtgtctgtgcccaaggtagaaggtgaaatgaaagtgccagatgttgacatcaaaggacccaaaatggacattgatgccccagatgtggatgttcatggcccagactggcacctgaagatgcccaagatgaaaatgcccaagttcagcatgcctggcttcaaagcagagggcccagaagtggatgtgaacttgcccaaggctgatgttgttgtctcaggacccaaggtggatgttgaagtcccagatgtgagccttgaaggtccagaagggaagctgaagggccccaagcttaagatgcctgagatgcacttcaaggcccccaagatctccatgcctgatgtggacttacacttgaaaggccccaaagtcaaaggggatgtggatgtgtctttgccaaaattggagggagatttaacaggccccagtgtggatgtggaggtgcctgatgttgagctggagtgtcctgatgcaaagttgaaagggcccaagtttaagatgcctgagatgcacttcaagacccccaagatctccatgcctgatgtgaacttaaacttgaaaggccccaaagtcaaaggggatatggatgtgtctgttcccaaggtagaaggtgaaatgaaagtgccagatgttgacatcagagggcccaaagtggacattgatgccccagatgtggatgttcatggcccagactggcacctgaagatgcctaagatgaaaatgcccaagttcagcatgcctggcttcaaaggagagggcccagaagtggatgtgaacttgcccaaggctgacgttgatgtctcaggacccaaggtggatgttgaagtcccagatgtgagccttgaaggtccagaagggaagctgaagggccccaagtttaagatgcctgagatgcacttcaagacccccaagatctccatgcctgatgttgatttcaatttaaagggacccaaaatcaaaggagatgttgatgtttctgccccaaagctggagggagagttaaaaggtccagaattggatgtcaaaggtcccaaattagatgctgacatgccagaagtagctgtggaaggcccaaatggcaagtggaaaactcctaagttcaagatgccagatatgcactttaaagctcccaaaatctctatgccagacctcgatctacacttgaagagccccaaggcaaaaggagaggtggatgtagatgttcccaaattggaaggggaccttaaagggccacatgtggatgtcagtgggccagacattgacattgagggaccagagggcaaattgaaaggccctaagttcaagatgcctgatatgcatttcaaagcccccaatatttctatgcctgatgttgatctaaatctcaaaggacccaaaatcaagggggatgtggatgtgtctgtgcctgaggtagaaggtaaacttgaagtaccagatatgaacatcaggggccccaaagttgatgtaaatgcccccgatgtccaagctccagactggcacctgaagatgcccaagatgaaaatgcccaagttcagcatgcctggcttcaaagcagagggccctgaagtagacgtcaacttgcctaaggctgacgttgacatctcaggacccaaggtggacattgaaggccctgatgttaatattgaaggaccagagggaaagttgaaagggcctaagttaaagatgccagagatgaacatcaaagcccccaagatctccatgcctgactttgatttgcatctgaaaggtcccaaggtgaagggcgatgtggatgtttctctgcccaaagtggaaggtgacctcaagggccccgaagttgacatcaaggggcccaaagtggatattaatgccccagatgtgggtgttcaaggcccagactggcacctgaagatgcccaaggtgaaaatgccaaagttcagcatgcctggcttcaaaggagagggcccagatggggatgtgaagctgcccaaggctgacattgatgtctcaggacccaaagtggacattgaaggccctgatgttaacattgaaggaccagagggaaagttgaaagggcctaagttcaagatgccagagatgaatatcaaagcccccaagatctccatgcctgatattgacttaaacctgaaaggacccaaagtgaagggtgatgtggatgtttcccttcctaaagtggaaggtgacctcaagggcccagaagttgacatcaagggcccaaaagtggacattgacgcacctgatgttgatgttcatggcccagactggcacctaaagatgcccaagataaaaatgcccaagatcagcatgcctggcttcaaaggagaaggtccagatgtggacgtgaacctgcccaaggctgacattgatgtctcaggaccgaaagtggatgttgaatgtcccgatgtgaatatcgaaggacctgaaggaaagtggaaaagtccaaagtttaagatgccagagatgcattttaagactccaaagatatccatgccagatattgacctgaatctcacaggtccaaaaataaaaggagatgtggatgttacaggccctaaggtagagggagatctgaaaggtcctgaagttgacctcaaaggccccaaagtggacattgatgtcccagatgttaatgttcagggtccagactggcacctgaagatgcccaagatgaaaatgcccaagttcagcatgcctggcttcaaagcagagggccctgaagtggatgtgaacctgcccaaggctgacgttgatgtctcaggccccaaagtggacgttgaaggccctgatgttaacattgaaggaccagagggaaagttgaaagggcccaagttcaagatgccagagatgaatatcaaagcccccaagatccccatgcctgactttgatttgcatctgaaaggtcccaaggtgaagggcgatgtggatatttctctgcccaaagtggaaggtgacctcaagggccctgaagttgacatcaggggtccccaagtggacattgatgtcccggatgtgggcgttcaaggcccagactggcacctaaaaatgcccaaagtgaaaatgcccaaattcagcatgcctggcttcaaaggagagggcccagatgtggatgtgaacctgcccaaggctgaccttgatgtctcaggacccaaggtggacattgatgttccagatgtgaatatcgaaggcccagagggaaagttgaaaggtcccaaattcaaaatgcctgagatgaacatcaaagcccccaagatctccatgcctgacattgatcttaacctgaaaggtcccaaagtgaagggtgacatggatgtgtctctgccaaaagtggaaggtgacatgaaagttcctgacgtggatattaaaggccccaaagtggatattaatgccccagatgtggatgttcaaggcccagactggcacctgaagatgcctaaaataaaaatgcccaagatcagcatgcctggcttcaaaggagaaggtccagaagtggacgtgaacctgcccaaggctgaccttgacgtctcaggacccaaggtggacgttgatgttccagatgtgaatattgaaggtccagatgcgaaactgaagggccctaaattcaagatgccagagatgaacatcaaagctcctaaaatatcaatgcctgatttggacctcaatcttaaaggccctaaaatgaaaggagaggtggatgtttcacttgcaaatgtagaaggtgatttgaaaggacctgctcttgacataaaaggcccaaagatagatgtagatgctccagatattgacattcatggcccagatgccaaattaaaaggtccaaaactgaagatgcctgacatgcatgtaaacatgcccaagatctccatgccagaaattgacttgaatttgaaaggctcaaagcttaagggagatgttgatgtctctgggcccaagttggaaggtgacattaaagctcccagtttggatataaagggcccagaagtggacgtttccggtcctaagcttaatatcgaaggcaagtcaaagaaatctcgttttaagcttcccaaatttaatttttcgggctctaaagttcagacacctgaagtggatgtcaaaggtaaaaagccagatattgacataacaggtccaaaagttgatattaatgctcctgatgtcgaggtccaaggaaaagtgaaaggatccaagtttaaaatgcctttcctgagtatttcatctcccaaagtttctatgcctgacgtggagctaaatttgaaaagtcccaaagtcaaaggagacttagatattgcaggtcccaatttagaaggtgactttaaaggccccaaagtggatattaaggcaccagaagtcaatcttaatgcacctgatgtggatgttcatggtccagactggaatctgaaaatgcccaagatgaaaatgcccaaattcagtgtgtctggcttaaaagcagaagggccagatgtagctgtggatctaccaaaaggagacatcaacatagagggcccaagtatgaacattgagggcccagatctcaatgtggaaggtccggagggaggcttgaaaggtcccaaattcaagatgcctgacatgaatatcaaagctcccaagatctccatgcctgacattgacttaaacttgaaaggccccaaggtgaaaggtgatgtggatatttctcttcccaaacttgaaggggatctgaaagggccagaggttgatatcaaaggccctaaagtggacatcaatgccccagatgtggatgttcatggtccagactggcatctgaagatgcccaaagtgaaaatgcccaagttcagcatgcctggcttcaaaggagaaggccctgaagtcgatgttaccctccctaaagctgacattgacatttctggtcccaatgtagacgttgatgttccagacgtgaatattgaaggtccagatgcaaagctgaagggccccaagttcaagatgcctgagatgaacatcaaagcccccaagatctccatgcctgactttgacctgaacttgaagggacccaaaatgaagggtgatgtggttgtgtctttgcccaaagtggaaggtgatctaaaaggccctgaggtggacatcaagggccccaaagtggacattgacactcctgacattaacatcgaaggctcagagggtaaattcaagggacccaaatttaagataccagagatgcacctgaaggctcccaaaatatcgatgcctgacattgatttaaacctgaagggccccaaagtcaagggcgatgtggatgtttctctgcccaaaatggaaggtgacctcaagggtcctgaagttgacatcaagggccccaaagtggacattaatgctccagatgttgatgttcaaggcccagactggcacctgaagatgcccaaggtgaaaatgcccaagttcagcatgcctggcttcaaaggagagggcccagatgtggatgtgaacctgcccaaggctgaccttgatgtctcaggacccaaggtggacattgatgttccagatgtgaatatcgaaggcccagagggaaagttgaaaggtcccaaattcaagatgcctgagatgaacatcaaagcccccaagatctccatgcctgacattgatcttaacctgaaaggacccaaagtgaagggtgatatggatgtgtctctgccaaaagtggaaggtgacatgcaagttcctgacttggatattaaaggccccaaagtggatattaatgccccagatgtggatgttcgaggcccagactggcacctgaagatgcctaagataaaaatgcccaagatcagcatgcctggcttcaaaggagaaggtccagaagtggatgtgaacctgcccaaggctgaccttgacgtctcaggacccaaggtggacgttgatgttccagatgtgaatattgaaggtccagatgcgaaactgaagggccctaaattcaagatgccagagatgaacatcaaagcccccaagatctccatgcctgactttgatttgcatctgaaaggccctaaggtgaaaggagatgtggatgtttctctgcctaagatggaaggtgatctaaaggcccctgaagttgacatcaagggccccaaagtggacattgatgccccagatgtggatgttcatggcccagactggcacctgaagatgcccaaggtgaaaatgcccaaattcagcatgccaggatttaaaggagagggcccagaagtggatgttaatttgcccaaagctgacattgatgtctcaggacccaaagtggacattgacactcctgatattgatattcatggtccagaagggaaactgaagggccccaaatttaaaatgcctgacctgcacctcaaggcaccgaagatctctatgcctgaagttgacctgaatctgaaaggtccaaagatgaagggcgacgtggacgtttctctgcccaaagtggaaggcgacctcaagggccctgaagttgacatcaagggccccaaagtggacattgatgtcccagatgtggacgttcaaggcccagactggcacttaaaaatgcccaaagtgaaaatgcccaagttcagcatgcctggcttcaaaggagagggcccagatgtggatgtgaacctgcccaaggctgaccttgacgtctcaggacccaaggtggacattgatgttcctgatgtgaatatcgaaggtccagatgcgaaactaaagggccctaaattcaagatgcctgagatgaacatcaaagcccccaagatctccatgcctgactttgatttgcatctgaaaggtcccaaggtgaagggtgatgtggatgtttcccttcctaaagtggaaggtgacctcaagggcccagaagttgacatcaagggccccaaagtggacatcgatgcccctgatgtagatgttcatggcccagactggcacctgaagatgcccaaggtgaaaatgcccaaattcagcatgccaggattcaaaggagagggcccagatgtggatgttacccttcctaaggctgacattgagatttctggccccaaagtggacattgatgcccctgatgtcagtatcgaaggtccagatgcaaaactcaagggtccaaagttcaagatgccagagatgaacatcaaggcccccaaaatctccatgcctgacattgactttaacttgaagggtcccaaagtgaaaggtgatgtggatgtctctctgcccaaagtggaaggtgatctcaagggccctgaaattgacataaaaggccccagtttggacattgacacacctgatgtcaatattgaaggtccggaaggaaaattgaaggggcccaaatttaagatgcctgagatgaacatcaaagctcccaaaatctctatgcctgactttgatttgcacctgaaaggtcccaaggtgaagggtgatgtggatgtttcactacctaaggtggaaagtgatctgaaagggccagaggtagacattgaaggtcctgaagggaagctcaaaggtcccaagtttaagatgcctgatgtacatttcaaaagcccacaaatctccatgagtgacattgatttgaatttgaaaggacctaagataaaaggagatatggacatttccgttcctaaactggagggagatctgaaaggtcccaaagtggatgtcaaaggccctaaagtgggcattgacactcctgatattgacattcatggtccagaagggaaactgaagggccccaaatttaaaatgcctgacttacacctcaaggcaccgaagatctctatgcctgaagttgacctgaatctgaaaggtccaaaggtgaagggcgacatggacatttctctgcccaaagtggaaggcgacctcaagggccccgaagttgacatcagggaccccaaagtggacattgatgtcccagatgtggacgttcaaggcccagactggcacctaaaaatgcccaaagtgaaaatgcccaagttcagcatgcctggcttcaaaggagagggcccagatgtggatgtgaacctgcccaaggctgacattgatgtctcaggacccaaagtggacgttgatgttcctgatgtgaatatcgaaggtccagatgcgaaactaaagggccccaagttcaagatgcctgagatgagcatcaaagcccccaagatctccatgcctgatattgacttaaacctgaaaggacccaaagtgaagggcgatgtggatgttacccttcctaaagtggaaggtgacctcaagggcccagaagctgacatcaagggcccaaaagtggacatcaacacccctgatgtggatgttcatggcccagactggcacctgaagatgcccaaggtgaaaatgcccaaattcagcatgcctggcttcaaaggagaaggtccagatgtggatgtgagcctgcccaaggccgacatcgatgtctcgggacccaaggtggacgttgatattccagatgtgaatatcgaaggtccagacgcaaaactgaagggccccaagttcaagatgcctgaaataaatatcaaagctcccaagatctccatacctgatgttgacctggatttgaaaggacccaaagtaaaaggagattttgatgtgtctgtccctaaggttgaagggactttgaaaggcccagaagtagatcttaaaggtccacgtctggatttcgaaggccctgatgccaaactcagtggcccatctttgaagatgccatcgctggagatatctgctcctaaagtaactgctcctgatgttgatttgcatctcaaggcaccaaaaattggattttcaggtccgaagttagaaggtggtgaagtggacctcaagggacccaaagttgaagctccaagcttagatgtacacatggacagcccagatattaacatcgaagggccagatgttaaaatccccaaatttaagaaacccaagtttggatttggggcaaaaagccccaaagctgacatcaagtcaccttcactggatgtcactgttcctgaggcagagctgaaccttgagactcctgaaattagtgttggtggcaagggcaagaaaagtaagtttaaaatgcctaaaattcatatgagtggtcctaagattaaggccaaaaaacagggatttgacctgaatgttcctgggggtgaaattgatgccagcctcaaggctccggatgtagatgtcaacatcgcagggccggatgctgcactcaaagtcgacgtgaaatcgcccaaaaccaagaaaacgatgtttggaaaaatgtacttcccagatgtagagtttgacattaaatcacctaaatttaaagctgaggcccctctccctagccccaaactggagggtgaactccaggcacctgatctggaactttctttgccagcgattcacgtcgaaggtcttgacatcaaggcgaaggctcccaaggtcaagatgccagatgtggacatctcagtgccaaaaatagagggtgacctgaaaggccccaaagtgcaggcaaacttgggtgcacctgacatcaacatcgaaggcctagatgctaaagtcaaaacaccgtccttcggcatttctgcccctcaagtctccatccctgatgtgaatgtaaacttgaaaggaccaaagataaagggtgatgtccccagcgtgggactggaaggaccagatgtagatctgcaaggtccagaagcaaaaattaagttccccaagttttccatgcccaagatcggcatcccaggtgtgaaaatggagggtgggggagccgaggtccatgcccagctaccctctcttgaaggagacttgagaggaccagatgttaagctcgaagggcccgatgtttctctaaaggggccaggagtagacttgccttcagtgaacctctctatgccaaaagtctctgggcctgaccttgatctgaacttgaaaggaccaagtttgaagggagacctggatgcatctgttcccagcatgaaggtgcatgctccagggctcaacctcagtggtgtcggtggcaaaatgcaggtgggaggagacggtgtgaaagtgccagggatcgatgccacaacaaagcttaacgttggggcaccagatgtgacactgaggggaccaagcctgcagggagatctggctgtctctggtgacatcaaatgccctaaagtatccgtaggagctcctgatctaagcttggaggcatccgaaggcagcattaaacttcccaaaatgaagctgccccaatttggcatctctactccggggtccgacttgcacgtcaatgccaaggggccacaggtttctggcgaactgaaggggccaggtgtggatgtgaacctgaaagggcctcggatttcagcaccgaatgtggactttaacttggaaggaccaaaagtgaaagggagccttggggccactggtgagatcaaaggccccactgtcggaggaggtcttccaggcattggtgttcaaggcctagaaggaaacctccagatgcctggaattaagtcctctggatgtgatgtgaacctgccaggcgtgaatgtgaaactcccaactgggcagatttctgggcctgaaatcaaaggtggtctgaaaggttcagaagtaggtttccatggggctgctcctgatatcagtgtgaaggggcctgcctttaatatggcatctcctgagtcagattttggcatcaacttgaagggcccaaaaatcaaaggaggtgcggatgtttcagggggtgtcagtgccccagacatcagccttggtgaagggcatttgagtgttaaaggttccgggggtgagtggaagggaccccaagtctcctctgctctcaacttggacacatctaagtttgctgggggccttcatttctcaggaccaaaggtggaaggaggtgtgaaaggaggtcagattggactccaggctcctgggctgagtgtgtctgggcctcaaggtcacttggaaagtggatctggaaaagtaacattccctaaaatgaagatccccaaatttaccttctctggccgtgagctggttggcagagaaatgggggtggatgttcacttccctaaagcagaggccagcatccaagctggtgctggagacggcgagtgggaagagtctgaagtcaaactgaaaaagtccaagatcaaaatgcccaagtttaatttttccaaacctaaagggaaaggtggtgtcactggctcaccagaagcatcaatttctgggtccaaaggtgacctgaaaagttcaaaggccagcctgggctctctggaaggagaggcagaggccgaagcctcttcaccgaaaggcaaattctccttatttaaaagtaagaagccacggcaccgctcaaattcattcagtgatgaaagagagttctctggaccttccaccccgacggggacgctggagtttgaaggtggggaagtgtctctggaaggtgggaaagttaaagggaaacacgggaagctgaaattcggtacctttggtggattggggtcaaagagcaaaggtcattatgaggtgactgggagcgatgatgagacaggcaagttacaggggagtggggtgtccctggcctctaagaagtcccgactgtcctcctcttctagcaatgacagtgggaataaggttggcatccagcttcccgaggtggagctgtcagtttccacaaagaaagagtagcaggcctttgtatgtgtgtacatatatatatatataacaaaacatcagccttgggtggtgtgttcctatataaactccaaagggaaacacaccgactgcctcagcaatcatgcaaagaccttgcctggcccggtggcaagcgctgaaaaaccgaccgcctgtaggctcctggaactatacagataggtaaagagttccaagttcgtccagcccatgtgcaaagtcaacagtatttgccttaagatttcatatatatatatttttttgcattgactgctgagagctcctgtttactaagcaagcttttgtgtttattatcctcatttttactgaacattgttagttttggggtaatggaaacccactttttcattgtaatgactttgggggcttttgttagtaagggtgggtggggtgatgggttgcagacggaggtcaggtcttcctctttcctgagactggatctgttcaaacagcaaacgcccacagatggcccagaggtggtggtagtcagggtgtgtgggtgtttttagggttctttagtgttgtttctttcacccaggggtggtggtcccagccagtttggtgctgacggtgagaggaaattagaatctgtttgcaaattgtccaacccaccccctcaacatgaggggcttccattttctgtgttttgtaagggaactgtttccttcatgccgccatgttcctgatattagttctgatttctttttaacaaatgttatcatgattaagaaaatttccagcactttaatggccaattaactgagaatgtaagaaaattgatgctgtacaaggcaaataaagctgtttattaaccttga

SEQ ID NO: 1488 - DNA, 639 bp, Homo Sapiens
  NM_001623
gagagaaggagagcctgcagacagaggcctccagcttggtctgtctccccacctctaccagcatctgctgagctatgagccaaaccagggatttacagggaggaaaagctttcggactgctgaaggcccagcaggaagagaggctggatgagatcaacaagcaattcctagacgatcccaaatatagcagtgatgaggatctgccctccaaactggaaggcttcaaagagaaatacatggagtttgaccttaatggaaatggcgatattgatatcatgtccctgaaacgaatgctggagaaacttggagtccccaagactcacctagagctaaagaaattaattggagaggtgtccagtggctccggggagacgttcagctaccctgactttctcaggatgatgctgggcaagagatctgccatcctaaaaatgatcctgatgtatgaggaaaaagcgagagaaaaggaaaagccaacaggccccccagccaagaaagctatctctgagttgccctgatttgaagggaaaagggatgatgggattgaaggggcttctaatgacccagatatggaaacagaagacaaaattgtaagccagagtcaacaaattaaataaattaccccctcctccagatcaa

SEQ ID NO: 1489 - DNA, 7553 bp, Homo Sapiens
  NM_001624
agatgccaccaccactgccaagcagctgcattcctcgccgggaaattcctccaggcaagagaacgcagagacgcccgcccgcagtccgggggaggacgcttcaccaggtgctggccacgaacaggaggctttcctgggtgtgaggggtgcgccagggtcgcccacccaggagcggcccgcgggaggactaggcgaggcccctaacggagcccccagtgtgtgtgccgaagaaggctccctggggccccgcaacgcccgcagccagccccccaagggcgcgtctgatttgccaggtgagcctccggccgagggcgcagcgcacacggccagctccgcgcaggcagactgcacagcccgccccaagggtcacgcccaccctgctaaggtgctaactttggacatctacttgagtaagactgagggggcacaagtggacgagccggtcgtgattactcccagagcggaagattgcggtgactgggacgacatggagaagaggtccagcggccgtaggtcggggaggcggagggggtcgcagaaatccaccgactcccccggcgcggacgccgagctccctgagagcgctgccagggacgacgcggtgttcgacgacgaggtggcgccaaacgcggccagcgataacgcctcggcggaaaagaaagtgaaatctccgcgggcagccctcgacgggggcgttgcctccgctgcgagcccagagtccaagcccagccccggtaccaaagggcagctccgaggggagtcggaccggagcaaacagccacccccggcttcgtcccccacgaagaggaagggcaggagccgtgccctcgaggccgtgcccgccccgcccgccagcggcccccgggctcccgccaaggagtccccacccaagagggtgcccgatcccagcccagtcaccaagggcactgcggccgagagcggggaggaggcggcgcgggccatcccccgcgagctcccggtcaagagcagctcgctgctgccggagatcaagcccgagcacaagaggggcccgctccccaaccacttcaacggccgggcagagggaggtcgaagcagagagctgggcagagcggccggagcgcctggagcttctgacgccgacggcttgaagcccaggaaccatttcggcgtgggcaggtcgacagtgaccactaaagtgaccctccctgccaagcccaaacatgtggaactaaatcttaaaacccctaagaatcttgacagtttgggaaatgagcacaatccatttagccagccagttcacaaaggcaacactgccaccaaaatctccttatttgaaaacaaacggacaaacagtagcccaagacacactgacattcgaggccaaaggaatactcctgcctctagtaaaacgtttgttgggagggcaaagctgaatttagccaaaaaagccaaagaaatggagcaacctgaaaagaaagtaatgccaaacagtccccagaatggtgtgctggttaaggaaactgctatagaaaccaaagttaccgtctcggaagaagagattctgccagcaaccagaggaatgaatggagactcttctgagaatcaagctcttggtcctcagcctaaccaagatgataaagcagatgtacaaacagatgctggctgcctttcagaaccagtggcttctgctctgattcctgtcaaggatcataagctcttagagaaggaggactcagaggctgcagacagcaaaagccttgtacttgaaaatgtaaccgatacagcacaagacatccccaccactgtggataccaaagatttacctccaacggccatgccaaagccacagcatacattttctgactcacagtcccctgctgagtcatctcctgggccttctctttcactgtctgcacccgctcctggggatgttcccaaagacacatgtgttcaatcacccataagcagtttcccatgcactgatctaaaagtgtcagaaaaccataaaggatgtgttttgcctgtgtctcgtcagaacaatgagaaaatgccacttttagaacttggaggagaaacaacccctcctttgtccacagagcgtagtccagaagctgtgggaagtgagtgtccatccagagtcctcgtccaggtcaggtccttcgtgctccccgtggagagcacccaggatgtgagctcccaggtcatcccagagagctctgaagttagagaagtgcagttgccaacttgtcacagtaatgaacctgaagtggtttccgttgcaagttgtgctcccccacaagaggaagtactgggcaatgaacactctcattgcacagcagagctcgcggcaaaatctggcccacaagtcataccgccagcatcagagaaaactctgcctattcaggctcaaagtcagggcagcagaacacccctgatggctgaatccagtcccaccaactctcccagcagcggaaatcacttagccactcctcaaaggccagatcagactgttacaaatggccaggatagccctgccagccttttgaacatttctgctggtagtgatgatagtgtatttgattcttcttctgatatggaaaaattcactgaaattataaaacagatggatagcgcagtttgtatgcccatgaaaagaaagaaggccaggatgccaaactctcctgctcctcactttgccatgcctcctattcacgaagaccatttagaaaaggtgtttgatcccaaagtgtttacctttggtttggggaagaagaaggaaagtcagccagaaatgtcaccggctttacatttgatgcagaaccttgacacaaaatccaaactgagacccaaacgtgcatctgctgaacagagcgtcctcttcaagtccctgcacaccaacactaatgggaacagtgagcctctggtgatgccggaaatcaatgacaaagagaacagggacgtcacaaatggtggcattaagagatcgagactagaaaaaagtgcacttttctcaagcttgttatcttctttaccacaagacaaaatcttttctccttctgtgacatcagtcaacactatgaccacggctttcagtacttctcagaacggttccctatctcagtcttcagtgtcacagcccacgactgagggtgccccgccctgtggtttgaacaaagaacagtcaaatcttctgcccgacaactccttaaaggtcttcaatttcaactcgtcaagtacatcacactccagtttgaaaagtccaagccacatggaaaaatacccgcaaaaagagaaaaccaaagaagatctggattcacgaagcaacctacacttgccagaaactaaattttctgaattgtcaaaactgaagaatgatgatatggaaaaggctaatcatattgaaagtgttattaaatcaaacttgccaaactgtgcaaacagtgacaccgacttcatgggtcttttcaaatcaagccggtatgacccaagcatttctttttctggaatgtcattatcagacacaatgacacttagaggaagtgtccaaaataaactcaatccccgacctggaaaggtagtgatatatagtgaacccgacgtctctgagaagtgcattgaagttttcagtgacattcaggattgcagttcttggagcctctctccagtgatactcataaaagttgttagaggatgttggattttgtatgagcaaccaaattttgaagggcactccatccccttagaagaaggagaattggaactctctggtctctggggtatagaagacattttggaaaggcacgaagaagcagagtctgataagccagtggtgattggttccatcagacatgtggttcaggattacagagttagtcacattgacttatttactgaaccagaagggttaggaatcctaagttcctactttgatgatactgaagaaatgcagggatttggtgtaatgcagaagacttgttccatgaaagtacattggggcacgtggctgatttatgaagaacctggatttcagggtgttcctttcatcctggaacctggtgaataccctgacttgtccttctgggatacagaagcagcgtacattggatccatgcggcctctgaaaatgggtggccgtaaagttgaattccctacagatccaaaggtagttgtttatgaaaagcctttctttgaaggaaaatgtgtggaactagaaacaggaatgtgtagttttgtcatggagggaggtgaaacagaagaggcgactggagacgatcatttgccgtttacgtcagtggggtctatgaaagttctaagaggcatttgggttgcatatgagaaacctggatttaccggtcatcagtatttgctagaagaaggagaatacagggactggaaagcctggggaggttacaatggagagcttcagtctttacgacctatattaggtgatttttcaaatgctcacatgataatgtacagtgaaaaaaactttggatccaaaggttccagtattgatgtattgggaattgttgctaatttaaaggagactggatatggagtgaagacacagtctattaatgtactgagtggagtatgggtagcctatgaaaatcctgacttcacaggagaacagtatatactggataaaggattttataccagttttgaggactggggaggcaaaaattgtaagatctcttctgttcaacctatatgtttggattctttcactggcccaaggagacgaaatcagattcacttgttttcagaaccacagtttcaaggtcacagtcaaagttttgaagaaacaacaagtcaaattgatgattcattttctaccaagtcttgcagagtttcaggaggcagctgggttgtatatgatggagaaaatttcactggtaatcaatacgtgttggaagaaggccattatccttgtctgtctgcaatgggatgcccgcctggagcaactttcaagtctcttcgttttatagatgttgaattttctgaaccaacaattattctctttgaaagagaagacttcaaaggaaaaaagattgaacttaatgcagaaactgtcaatctccgatccctgggattcaacacacaaatacgctctgttcaggttattggtggcatatgggttacttatgaatatggcagttacagagggcgacagttcctattgtcacctgcagaagtacctaattggtatgaattcagtggctgtcgccaaataggttctctacgaccttttgttcagaagcgaatttatttcagacttcgaaacaaagcaacagggttattcatgtcaaccaatggaaacttagaggatctgaagcttctgaggatacaggtcatggaggatgtcggggccgatgatcagatttggatctatcaagaaggatgtatcaaatgcaggatagcagaagactgctgcctgacgattgtgggcagcctggtaacatctggctccaagctaggcctggccctggaccagaatgctgacagccagttctggagcttgaagtccgatggcaggatttacagcaagttgaagccaaatttagttttagacattaaagggggcacacagtatgatcaaaatcacattatcctcaacactgtcagcaaagagaagtttacacaagtgtgggaagccatggtcctatatacctgaacaaagaaggaagaagaatcttctggaggtccttccagccaccttatttcttaaaaaggacaatgctgatggaagaccagactggaaagtggatcgactcctccttcattgattctaaattcaaccttaaatcatgctgccatgactcagagaacttactcatcgtttcaaaagactatcatagctttaaaccaataatttgtcctcctttcatttcttgcctttcatttttggtagctgcttaaacaggttgcctaattagcagcttttgggtgattttgtaaaatgttatatcaagatttcaagactgtgtacattttaaattatttccaaagatagtgacaggagagaactggaacaaatttaccaactttgtggacctacaaagcccttacactttaaagggtaagacaaaggcttaagtttgaaaggtagagaactgtttagcatctgagaagaaatactttattaggcctgtaattttggttcttggccttaaacactttctggaacctttaaatatgctgcatagcacaatgggaaagccttaggtattcacacatttaaggaactctaaacaaaatactattttcctttagttcatattaaaaattaatacattttaaaaatttaatgtcaaagtctggtaacatttgttagtaggatttgagttattattttttgagacaggatctcaggctggagtgcagtggcacaatcacggctcactgcagcctctacctccccaggctcaggtgatcctcccacctcagcctcccaagtagctgggactataggcacacatcaccaagcccagccaaattttgttttttttttgtagagatggggtttcatcacgttgcccaggctgatctcgaacctctgggctcaagcaattcactcgcctcggcctcccaaaatgctgggattacaggcctgagccactgcgcccagccaggatttgaattattttaactcatccatgggctgccctagaatgtcacaaatgagggttgtttaatgcctttcttatagctgctactggaacactattatgacctaatttatgagccatccttactcatctacaagtgctgaagcaatgttacatacttttttgctaaactcagattttttagcctaatttcttgtcctcctatccacctgcatccacacatggcctgcatggggctgccttccctgcagtgttctgcagccatgcttcagggtatagctgttggtggacagcctcaggtcttgggggcactatagccactaaacgaggtgtgaaaggctcaagaggatgaccagcaattaattatccccagaaagtgaaggaaaagagacctttagggatgttgctggtcaagtcttgatttgaccggagtcaaatcaatcttcaagcaatcttggaatcctcaactgcagtaagcatttcaaaatgcaaacaaactgcttaacaactgacaagacaccagcccatacgctgctcttccaacagtgggttctagctttgaacaaaagtgctaaacatttccttgaatatattcttcctctttttgtcctcatcactcaatactggtgctcttgtcacaggtagaacagcttgtttcttttccatctattcaagtgtgtttctaattctaaaatgctgatcttctctggagtctatggtaggcaattatggtcactggaatagtttgtcttgttttaaaatattattggtgcatgtacaacagcatccaacatatctgtcttgttcctagatatatagctctgattttaggccttttgtgcataccattacaatatggtggggtaagacattctacagtagcctgtgctgaactgatctcttaaataaacttgcttctggttaactatgttgatgaaa

SEQ ID NO: 1490 - DNA, 2759 bp, Homo Sapiens
  NM_001625
gtgcgtggcgtgcgtgcgttgacctgggaagcactggacctgtgaggcgtgcgaactggtggcagtgagagacttcggcggacatggctcccagcgtgccagcggcagaacccgagtatcctaaaggcatccgggccgtgctgctggggcctcccggggccggtaaagggacccaggcacccagattggctgaaaacttctgtgtctgccatttagctactggggacatgctgagggccatggtggcttctggctcagagctaggaaaaaagctgaaggcaactatggatgctgggaaactggtgagtgatgaaatggtagtggagctcattgagaagaatttggagacccccttgtgcaaaaatggttttcttctggatggcttccctcggactgtgaggcaggcagaaatgctcgatgacctcatggagaagaggaaagagaagcttgattctgtgattgaattcagcatcccagactctctgctgatccgaagaatcacaggaaggctgattcaccccaagagtggccgttcctaccacgaggagttcaaccctccaaaagagcccatgaaagatgacatcaccggggaacccttgatccgtcgatcagatgataatgaaaaggccttgaaaatccgcctgcaagcctaccacactcaaaccaccccactcatagagtactacaggaaacgggggatccactccgccatcgatgcatcccagacccccgatgtcgtgttcgcaagcatcctagcagccttctccaaagccacatgtaaagacttggttatgtttatctaatgttgggtccaagaaggaatttctttccatccctgtgaggcaatgggtgggaatgataggacaggcaaagagaagcttcctcaggctagcaaaaatatcatttgatgtattgattaaaaaagcacttgcttgatgtatctttggcgtgtgtgctactctcatctgtgtgtatgtgtgttgtgtgtgtgtgtgtgtgcatgcacatatgtgttcactctgctactttgtaagttttaggctaggttgctttaccagctgtttacttcttttttgttgttgttttgagacaaggtttcgctctgccaccctggctggagtgcagtggcgtgatcttggctcacggcaacctctgcctcctggggctcaagcaattatcccacctcagcctcctgagcagctgggactacaggtgcatgccacaacacctggctgatatttgtattttttgtagagacaggattttgccaagttgcccaggctggtcttgaactcctaggcttaagcaatccacccaccttggcctcctgaagtgccaggatcacagacgtgagccactacacccagcccagctgtttacttctttaaccatacttttgattttattttttgaccaaaatgaactaacccaggtaatcttccagggaccgcaattccagaacctcatagtatttcttccatttccagcagctgattagaagtccaggatcatgtgaagtcaggcagggtcacagttcctgatggcacattatggacagagaattccattttgttttctaacccatgatgaaaacccacgtgagtcagtgtgtgaacagggatcattaattttttccccctaggtggaaggaaaaaggcacttactttgcaggttacagaaattactgggagaggatatcgtcataaaaagagccaggccaaattggaatatttttgtgatctgcatcatgatgctgaaaatagcaattatttgggaattgggtttgaaaactgaattgttgccagagaattaaaccaggtgaaaggtccttttgaattcagattgtcttctgaacatccaggctgatcatctgagagcagtcaaatctacttccccaaaaagagaccagggtaggtttatttgcttttatttttaatgtttgcctgtgtttccaagtgtgaacaaaacagtgtgtgatctattcttggattcattttgatcagtatttattcaaacccagtctctctccaggacataaaactgaaatcagatatgttctttttaagcccaaaccctctcctttctagatccaacccttcacccctaattttatgatggctatagccatggacttccccaagaaaagatcacccagaaataagaccacctgtgacagttaccagcttttattcataaccttagcttcccaactattgagcattttctaaggtccctgctgtcttttggtctctggtttgatttgtggcaaacagatgaagtaacagactgctatgaaggaccacaaaaacggcagcctctggaaaaaccattagaaagtcagtggcagatccagtaaataatatcgccagcctcagcataatctgctgctgactcgattcagtggactctaaagtgcccagcctcctgacctgagctctcctgccatctgtgagactaccagaggtcttatctgctgtccacatggcaactgggcatgagtacctggccaccttgcttccctctttgcctggtccaagtgagtgtctgctgcctctgtcctgccttgttttcctggctctaaaccaactccacccactcttaatggaaactcagtctggctttgtgtgtttctgggaagcacatgacttctgggaatgggcaaggaagaggagtgaaacaaaaactgtcagctatgtgtgcctggtctgggatccttctctgggtgacagtggcatcatgaatcttagaatcagctcccc

SEQ ID NO: 1491 - DNA, 4760 bp, Homo Sapiens
  NM_001627
gaaagaggcagcttacacacgccttccagtccctctactcagagcagcccggagaccgctgccgccgctgccgctgctaccaccgctgccacctgaggagacccgccgcccccccgtcgccgcctcctgcgagtccttcttagcacctggcgtttcatgcacattgccactgccattattattatcattccaatacaaggaaaataaaagaagataccagcgaaaagaaccgcttacacctttccgaattactcaagtgtctcctggaaacagagggtcgttgtccccggaggagcagccgaagggcccgtgggctggtgttgaccgggagggaggaggagttgggggcattgcgtggtggaaagttgcgtgcggcagagaaccgaaggtgcagcgccacagcccaggggacggtgtgtctgggagaagacgctgcccctgcgtcgggacccgccagcgcgcgggcaccgcggggcccgggacgacgccccctcctgcggcgtggactccgtcagtggcccaccaagaaggaggaggaatatggaatccaagggggccagttcctgccgtctgctcttctgcctcttgatctccgccaccgtcttcaggccaggccttggatggtatactgtaaattcagcatatggagataccattatcataccttgccgacttgacgtacctcagaatctcatgtttggcaaatggaaatatgaaaagcccgatggctccccagtatttattgccttcagatcctctacaaagaaaagtgtgcagtacgacgatgtaccagaatacaaagacagattgaacctctcagaaaactacactttgtctatcagtaatgcaaggatcagtgatgaaaagagatttgtgtgcatgctagtaactgaggacaacgtgtttgaggcacctacaatagtcaaggtgttcaagcaaccatctaaacctgaaattgtaagcaaagcactgtttctcgaaacagagcagctaaaaaagttgggtgactgcatttcagaagacagttatccagatggcaatatcacatggtacaggaatggaaaagtgctacatccccttgaaggagcggtggtcataatttttaaaaaggaaatggacccagtgactcagctctataccatgacttccaccctggagtacaagacaaccaaggctgacatacaaatgccattcacctgctcggtgacatattatggaccatctggccagaaaacaattcattctgaacaggcagtatttgatatttactatcctacagagcaggtgacaatacaagtgctgccaccaaaaaatgccatcaaagaaggggataacatcactcttaaatgcttagggaatggcaaccctcccccagaggaatttttgttttacttaccaggacagcccgaaggaataagaagctcaaatacttacacactgacggatgtgaggcgcaatgcaacaggagactacaagtgttccctgatagacaaaaaaagcatgattgcttcaacagccatcacagttcactatttggatttgtccttaaacccaagtggagaagtgactagacagattggtgatgccctacccgtgtcatgcacaatatctgctagcaggaatgcaactgtggtatggatgaaagataacatcaggcttcgatctagcccgtcattttctagtcttcattatcaggatgctggaaactatgtctgcgaaactgctctgcaggaggttgaaggactaaagaaaagagagtcattgactctcattgtagaaggcaaacctcaaataaaaatgacaaagaaaactgatcccagtggactatctaaaacaataatctgccatgtggaaggttttccaaagccagccattcaatggacaattactggcagtggaagcgtcataaaccaaacagaggaatctccttatattaatggcaggtattatagtaaaattatcatttcccctgaagagaatgttacattaacttgcacagcagaaaaccaactggagagaacagtaaactccttgaatgtctctgctataagtattccagaacacgatgaggcagacgagataagtgatgaaaacagagaaaaggtgaatgaccaggcaaaactaattgtgggaatcgttgttggtctcctccttgctgcccttgttgctggtgtcgtctactggctgtacatgaagaagtcaaagactgcatcaaaacatgtaaacaaggacctcggtaatatggaagaaaacaaaaagttagaagaaaacaatcacaaaactgaagcctaagagagaaactgtcctagttgtccagagataaaaatcatatagaccaattgaagcatgaacgtggattgtatttaagacataaacaaagacattgacagcaattcatggttcaagtattaagcagttcattctaccaagctgtcacaggttttcagagaattatctcaagtaaaacaaatgaaatttaattacaaacaataagaacaagttttggcagccatgataataggtcatatgttgtgtttggttcaattttttttccgtaaatgtctgcactgaggatttctttttggtttgccttttatgtaaattttttacgtagctatttttatacactgtaagctttgttctgggagttgctgttaatctgatgtataatgtaatgtttttatttcaattgtttatatggataatctgagcaggtacatttctgattctgattgctatcagcaatgccccaaactttctcataagcacctaaaacccaaaggtggcagcttgtgaagattggggacactcatattgccctaattaaaaactgtgatttttatcacaagggaggggaggccgagagtcagactgatagacaccataggagccgactctttgatatgccaccagcgaactctcagaaataaatcacagatgcatatagacacacatacataatggtactcccaaactgacaattttacctattctgaaaaagacataaaacagaatttggtagcacttacctctacagacacctgctaataaattattttctgtcaaaagaaaaaacacaagcatgtgtgagagacagtttggaaaaatcatggtcaacattcccattttcatagatcacaatgtaaatcactataattacaaattggtgttaaatcctttgggttatccactgccttaaaattatacctatttcatgtttaaaaagatatcaatcagaattggagtttttaacagtggtcattatcaaagctgtgttattttccacagaatatagaatatatatttttttcgtgtgtgtttttgttaactaccctacagatattgaatgcaccttgagataatttagtgtttttaactgatacataatttatcaagcagtacatgaaagtgtaataataaaatgtctatgtatctttagttacattcaaatttgtaactttataaacatgttttatgcttgaggaaatttttaaggtggtagtataaatggaaactttttgaagtagaccagatatgggctacttgtgactagacttttaaactttgctctttcaagcagaagcctggtttctgggagaacactgcacagcgatttctttcccaggatttacacaactttaaagggaagataaatgaacatcagatttctaggtatagaactatgttattgaaaggaaaaggaaaactggtgtttgtttcttagactcatgaaataaaaaattatgaaggcaatgaaaaataaattgaaaattaaagtcagatgagaataggaataatactttgccacttctgcattatttagaaacatacgttattgtacatttgtaaaccatttactgtctgggcaatagtgactccgtttaataaaagcttccgtagtgcattggtatggattaaatgcataaaatattcttagactcgatgctgtataaaatattatgggaaaaaaagaaaatatgttattttgcctctaaacttttattgaagttttatttggcaggaaaaaaaattgaatcttggtcaacatttaaaccaaagtaaaaggggaaaaaccaaagttatttgttttgcatggctaagccattctgttatctctgtaaatactgtgatttcttttttattttctctttagaattttgttaaagaaattctaaaatttttaaacacctgctctccacaataaatcacaaacactaaaataaaattacttccatataaatattattttctcttttggtgtgggagatcaaaggtttaaagtctaacttctaagatatatttgcagaaagaagcaacatgacaatagagagagttatgctacaattatttcttggtttccacttgcaatggttaattaagtccaaaaacagctgtcagaacctcgagagcagaacatgagaaactcagagctctggaccgaaagcagaaagtttgccgggaaaaaaaaagacaacattattaccatcgattcagtgcctggataaagaggaaagcttacttgtttaatggcagccacatgcacgaagatgctaagaagaaaaagaattccaaatcctcaacttttgaggtttcggctctccaatttaactctttggcaacaggaaacaggttttgcaagttcaaggttcactccctatatgtgattataggaattgtttgtggaaatggattaacatacccgtctatgcctaaaagataataaaactgaaatatgtcttcaaaaaaaaaaaaaaaaaaaa

SEQ ID NO: 1492 - DNA, 1416 bp, Homo Sapiens
  NM_001628
acgggctatttaaaggtacgcgccgcggccaaggccgcaccgtactgggcgggggtctggggagcgcagcagccatggcaagccgtctcctgctcaacaacggcgccaagatgcccatcctggggttgggtacctggaagtcccctccagggcaggtgactgaggccgtgaaggtggccattgacgtcgggtaccgccacatcgactgtgcccatgtgtaccagaatgagaatgaggtgggggtggccattcaggagaagctcagggagcaggtggtgaagcgtgaggagctcttcatcgtcagcaagctgtggtgcacgtaccatgagaagggcctggtgaaaggagcctgccagaagacactcagcgacctgaagctggactacctggacctctaccttattcactggccgactggctttaagcctgggaaggaatttttcccattggatgagtcgggcaatgtggttcccagtgacaccaacattctggacacgtgggcggccatggaagagctggtggatgaagggctggtgaaagctattggcatctccaacttcaaccatctccaggtggagatgatcttaaacaaacctggcttgaagtataagcctgcagttaaccagattgagtgccacccatatctcactcaggagaagttaatccagtactgccagtccaaaggcatcgtggtgaccgcctacagccccctcggctctcctgacaggccctgggccaagcccgaggacccttctctcctggaggatcccaggatcaaggcgatcgcagccaagcacaataaaactacagcccaggtcctgatccggttccccatgcagaggaacttggtggtgatccccaagtctgtgacaccagaacgcattgctgagaactttaaggtctttgactttgaactgagcagccaggatatgaccaccttactcagctacaacaggaactggagggtctgtgccttgttgagctgtacctcccacaaggattaccccttccatgaagagttttgaagctgtggttgcctgctcgtccccaagtgacctatacctgtgtttcttgcctcatttttttccttgcaaatgtagtatggcctgtgtcactcagcagtgggacagcaacctgtagagtggccagcgagggcgtgtctagcttgatgttggatctcaagagccctgtcagtagagtagaagtctcttccagtttgctttgcccttctttctaccctgctggggaaagtacaacctgaatacccttttctgaccaaagagaagcaaaatctaccaggtcaaaatagtgccactaacggttgagttttgactgcttggaactggaatcctttcagcaagacttctctttgcctcaaataaaaagtgcttttgtgagaaaaaaaaaaaaaaaaaa

SEQ ID NO: 1493 - DNA, 873 bp, Homo Sapiens
  NM_001629
acttccccttcctgtacagggcaggttgtgcagctggaggcagagcagtcctctctggggagcctgaagcaaacatggatcaagaaactgtaggcaatgttgtcctgttggccatcgtcaccctcatcagcgtggtccagaatggattctttgcccataaagtggagcacgaaagcaggacccagaatgggaggagcttccagaggaccggaacacttgcctttgagcgggtctacactgccaaccagaactgtgtagatgcgtaccccactttcctcgctgtgctctggtctgcggggctactttgcagccaagttcctgctgcgtttgctggactgatgtacttgtttgtgaggcaaaagtactttgtcggttacctaggagagagaacgcagagcacccctggctacatatttgggaaacgcatcatactcttcctgttcctcatgtccgttgctggcatattcaactattacctcatcttctttttcggaagtgactttgaaaactacataaagacgatctccaccaccatctcccctctacttctcattccctaactctctgctgaatatggggttggtgttctcatctaatcaatacctacaagtcatcataattcagctcttgagagcattctgctcttctttagatggctgtaaatctattggccatctgggcttcacagcttgagttaaccttgcttttccgggaacaaaatgatgtcatgtcagctccgccccttgaacatgaccgtggccccaaatttgctattcccatgcattttgtttgtttcttcacttatcctgttctctgaagatgttttgtgaccaggtttgtgttttcttaaaataaaatgcagagacatgtttt

SEQ ID NO: 1494 - DNA, 2053 bp, Homo Sapiens
  NM_001630
aaagccaggcagagcccgggggcgagggggcggcaggcaggtgtagcgctgccctgggcgggcttgcacccccacacccaagtgagcggcctgctcactcctcagctgcaggagccagacgtgtggagtcccagcagaggccaacctgtgtctcttcatctccgtgagaaaggtgcccccgaagtgaaagagatggcctggtggaaagcctggattgaacaggagggtgtcacagtgaagagcagctcccacttcaacccagaccctgatgcagagaccctctacaaagccatgaaggggatcgggaccaacgagcaggctatcatcgatgtgctcaccaagagaagcaacacgcagcggcagcagatcgccaagtccttcaaggctcagttcggcaaggacctcactgagaccttgaagtctgagctcagtggcaagtttgagaggctcattgtggcccttatgtacccgccatacagatacgaagccaaggagctgcatgacgccatgaagggcttaggaaccaaggagggtgtcatcattgagatcctggcctctcggaccaagaaccagctgcgggagataatgaaggcgtatgaggaagactatgggtccagcctggaggaggacatccaagcagacacaagtggctacctggagaggatcctggtgtgcctcctgcagggcagcagggatgatgtgagcagctttgtggacccggcactggccctccaagacgcacaggatctgtatgcggcaggcgagaatattcgtgggactgatgagatgaaattcatcaccatcctgtgcacgcgcagtgccactcacctgctgagagtgtttgaagagtatgagaaaattgccaacaagagcattgaggacagcatcaagagtgagacccatggctcactggaggaggccatgctcactgtggtgaaatgcacccaaaacctccacagctactttgcagagagactctactatgccatgaagggagcagggacgcgtgatgggaccctgataagaaacatcgtttcaaggagcgagattgacttaaatcttatcaaatgtcacttcaagaagatgtacggcaagaccctcagcagcatgatcatggaagacaccagcggtgactacaagaacgccctgctgagcctggtgggcagcgacccctgaggcacagaagaacaagagcaaagaccatgaagccagagtctccaggactcctcactcaacctcggccatggacgcaggttgggtgtgaggggggtcccagcctttcggtcttctatttccctatttccagtgctttccagccgggtttctgacccagagggtggaaccggcctggactcctcttcccaacttcctccaggtcatttcccagtgtgagcacaatgccaaccttagtgtttctccagccagacagatgcctcagcatgaagggcttggggacttgtggatcattccttcctccctgcaggagcttcccaagctggtcacagagtctcctgggcacaggttatacagaccccagccccattcccatctactgaaacagggtctccacaagaggggccagggaatatgggtttttaacaagcgtcttacaaaacacttctctatcatgcagccggagagctggctgggagcccttttgttttagaacacacatccttcagcagctgagaaacgaacacgaatccatcccaaccgagatgccattaacattcatctaaaaatgttaggctctaaatggacgaaaaattctctcgccatcttaataacaaaataaactacaaattcctgacccaaggacactgtgttataagaggcgtgggctcccctggtggctgaccaggtcagctgccctggccttgcacccctctgcatgcagcacagaagggtgtgaccatgccctcagcaccactcttgtccccactgaacggcaactgagactgggtacctggagattctgaagtgcctttgctgtggttttcaaaataataaagatttgtattcaactcaaaaaaaaaaaaaaaaaaaaaaaaaa

SEQ ID NO: 1495 - DNA, 3426 bp, Homo Sapiens
  NM_001635
cagtcccgacgcatcccgcccccgctctgtcgctttaagctggtcccgccgccgcgccccgccctcacccctccgcgctccgcggctccccgccgcttctcccgctcctcccttgctcggccctctcctcctcctcccgctcctcctcccgctcctccgcgccgccgccagccccgctgcgcgctctgctcttcgcagctccccggacccgcagccatggccgacatcaagacgggcatcttcgccaagaacgtccagaagcgactcaaccgcgcgcaggaaaaggtcctccaaaagctggggaaagctgatgagacaaaagacgaacagttcgaagaatatgtccagaacttcaaacggcaagaagcagagggtaccagacttcagcgagaactccgaggatatttagcagcaatcaaaggcatgcaggaggcctccatgaagctcacagagtcgctgcatgaagtctatgagcctgactggtatgggcgggaagatgtgaaaatggttggtgagaaatgtgatgtgctgtgggaagacttccatcaaaaactcgtggatgggtccttgctaacactggatacctacctggggcaatttcctgacataaagaatcgcatcgccaagcgcagcaggaagctagtggactatgacagtgcccgccaccatctggaagctctgcagagctccaagaggaaggatgagagtcgaatctctaaggcagaagaagaatttcagaaagcacagaaagtgtttgaagagtttaacgttgacttacaagaagagttaccatcattatggtcaagacgagttggattttatgttaatactttcaaaaacgtctccagccttgaagccaagtttcataaggaaattgcggtgctttgccacaaactgtatgaagtgatgacaaaactgggtgaccagcacgccgacaaggccttcaccatccaaggagcgcccagtgattcgggtcctctccgcattgcaaagacaccatcaccgcctgaggagccttcacccctcccgagcccgacagcaagtccaaatcatacattagcacctgcgtctcccgcaccagcacggcctcggtcaccttcacagacaaggaaagggcctcctgtcccacctctacctaaagtcaccccgacaaaggaactgcagcaggagaacatcatcagtttctttgaggacaactttgttccagaaatcagtgtgacaacaccttcccagaatgaagtccctgaggtgaagaaagaggagactttgctggatctggactttgatcctttcaagcccgaggtgacacctgcaggttctgctggagtgacccactcacccatgtctcagacattgccctgggacctatggacgacaagcactgatttggtacagccggcttctggtggttcatttaatggattcacacagccccaggatacttcattattcacaatgcagacagaccagagtatgatctgcaacttggctgaatctgaacaggctccacccacagagccaaaagcagaggagcctctggctgctgtcacacctgccgttggtctggaccttggaatggacactcgggctgaggagccagtggaggaggcagtgatcatacctggagctgatgctgatgcagctgttggaaccttggtgtcagcagctgagggggccccaggagaggaagcagaggcggagaaggccactgtccctgccggggaaggagtaagtttagaggaggccaaaattggaactgaaaccactgagggtgcagagagtgcccaacctgaagcagaggagctcgaagcaacagtgcctcaggagaaggtcattccttcggtggtcatagagcctgcctccaaccatgaagaggaaggagaaaacgaaataactataggtgcagagcccaaggagaccaccgaggacgcggctcctccgggccccaccagcgagacaccggagctggctacggagcagaagcctatccaggaccctcagcccacgccttctgcaccagccatgggggctgctgaccagctagcatctgcaagggaggcctctcaggaattgcctcctggctttctctacaaggtggaaacactgcatgattttgaggcagcaaattctgatgaacttaccttacaaaggggtgatgtggtgctggtggtcccctcagattcagaagctgatcaggatgcaggctggctggtgggagtgaaggaatcagactggcttcagtacagagaccttgccacctacaaaggcctctttccagagaacttcacccgacgcttagattagggcaacaagtactgcaagaaggagctcagttacggggtttttaaaccttcatgaaaacctgaagagttcacttttgttattatgctcttaatgatttacagactgatgccagacaaaccttgggaagatgtatcaatggagcatgtgtgcaaaaaaatgtaagaggaaaaaaagtaaattaaggaaaaaatcctcactcattcccatgttgtcaataacaggtttgtttgtgctttgtccaagctgtggagactcttgtacttgatcccctcccaccaattctaaagtagctttctccagatcagactttaatttctctgcatcaggtgtatcgtattgagtggctgccctgcagaagatgtgatgaattatcctgtagtacaagattatcttattcccctgcccaggtgtgagcacgtgctctcgctccctttcaggtttactatgtttaaaactaaactgctgcaaaagttctcaatgttcttttccaacacatctatatatatatggacacacagtcacgcaagctagttcccatgactcctggatctatgtgtatgcagaaggctacatatacatagttgcttctttcctttccattgtagctctttgcctctcaattgtcattgatacatgcattgctcttattctgtctggcattacaattgcagttttgcctaatggcaaaaccagccatcccattggcaaaagagtcaacagtatctgtgtttgtactgtgcagttttcaggatgagatgacagatagcacgactacactgaggcaccctcagagaaggcagggcctgatttatctagctgtccagccgctgtggctggaggtaggctagttgggatgggcagctaagcagtcttctcttctgcctttatgagattgggtagaaagatggggcatattcatctacccccaaaagaacactataaaaacagctcctctatatttccacctctttctatttatgcaactcatcttcacagattgttctaaagtaaaatagatggtgtatgctgtatccacaaatcatctgtaacaattatgttttcagtgctgtgtcattccaaataaacctttggtaatcttcaacgattaccctaattcctttt

SEQ ID NO: 1496 - DNA, 2775 bp, Homo Sapiens
  NM_001640
ctcaaccccttctctcgtaggcccttctaccctccccgaagccgggctcccgggttccgcttccacagggccgccccctctcctccgagatccaacgcctcgcccctcggtaagaggcccaggactcagcccacggccccgccccccacttggctagtccgcccctggcgagacccctgctctcacccacccaggacttctcgctcccaggccgggtcctctcaccgtcaaggcccgccccctgccaacggtcctcacccattagccgaaggccccgcccctcacagattgccgcagggcaggggcggagacagcccgggccgtcccaggctccgcccccggaagcctcacttccgggcgcgagcacgccccgcctcgccccggcggcagagaggagactatggaacgtcaggtgctgctgagcgagcccgaggaggcggcggctctgtatcggggccttagccgccagcccgcgctgagcgccgcctgcctgggcccggaggtcaccacgcagtacggcggccaataccggacggtgcacactgagtggacccagagggacctggaacgcatggagaacattcgattctgccgccaatacctggtgttccatgacggggactcagtggtgtttgcaggacctgcaggcaacagtgtggagacccggggggaactgctgagcagagagtctccttcaggcaccatgaaagctgtgctgcgcaaggctggaggcacgggccctggggaagagaagcagttcctggaggtctgggagaagaaccggaagctcaagagcttcaacctgtcagcgctggagaaacatgggcctgtttatgaggatgactgctttggctgcctgtcctggtcgcactcggagacacacttgttgtatgtggcagagaagaagcgccccaaggccgagtccttctttcagaccaaagccttggacgtcagtgccagcgatgatgagatagccaggctgaagaagccagaccaagccatcaagggggatcagtttgtgttttatgaagactggggagaaaacatggtttccaaaagcatccctgtgctctgcgtgctggatgtcgagagtggcaacatctctgtgcttgagggggtccctgagaatgtgtcccctggacaggcattttgggcccctggagatgctggtgtggtgtttgtgggctggtggcatgagcccttccggttgggcatccgcttttgcaccaatcgcaggtcagccctgtattatgtggacctcatcggggggaagtgtgagctcctctcggatgactccctggctgtctcttctccccggctgagcccagaccaatgtcgcattgtctacctgcagtacccatctctgatcccccatcaccaatgcagccagctgtgcctgtatgactggtataccaaggttacctcagtggtggtagatgttgtgcctcggcagctgggagagaacttctctgggatctactgcagccttctgcctttgggatgctggtcagctgacagccagagagtggtctttgactcggctcagcgcagccggcaggacctgtttgctgtggacacccaagtgggcactgtgacctccctcacagctggagggtcaggtgggagctggaagttgctcacaattgaccaggacctcatggtggcacagttttccacacccagcctacctccaaccctgaaagttgggttcctgccttctgcagggaaggagcagtcagtgttgtgggtgtccctggaggaggccgagcccattcccgacatccactggggcatccgggtgctacagccacccccagagcaagagaatgtgcagtatgctggccttgactttgaagcaatcctgctgcagcctggcagccctccagataagacccaagtgcccatggtggtcatgccccacggggggccccattcatcctttgtcactgcctggatgctgttcccagccatgctttgcaagatgggctttgcggtactactagtgaactatcgtggctccacgggctttggccaggacagcatcctctccctcccaggcaatgtgggccaccaggatgtgaaggatgtccagtttgcagtggaacaggtgctccaggaggaacactttgatgcaagccatgtggcccttatgggtggttcccatggtggcttcatttcctgccacttgattggtcagtacccagagacctacagggcctgcgtggcccggaaccccgtgatcaacatcgcctccatgttgggctccactgacatccctgactggtgcgtggtggaggctggctttcctttcagcagtgactgcctgccagacctcagcgtgtgggctgagatgctggacaaatcgcccatcagatacatccctcaggtgaagacaccactgttactgatgttgggccaggaggaccggcgtgtgcccttcaagcagggcatggagtattaccgtgccctcaagacccggaatgtgcctgttcggctcctgctctatcccaaaagcacccacgcattatcagaggtggaggtggagtcagacagcttcatgaatgctgtgctctggctacgcacacacttgggcagctgaagccctgccattctgcatgagctgatcagcctgtgccacacttcgctcttgaggagctcaacggtctggcagggcagcaggaggctttctgggctctggactccacggatgcgtgggcagaggaatgtgggctatgtagtcataataaattaggacacaaaaaaaaaaaaaaaaaa

SEQ ID NO: 1497 - DNA, 1574 bp, Homo Sapiens
  NM_001641
cagacagaccaatcacgcgcattcttcggccacgacaagcgcgcctctgatcacgtgaccaggtccgctacccacgtgggggctcagcgtgcacccttctttgtgctcgggttaggaggagctaggctgccatcgggccggtgcagatacggggttgctcttttgctcataagaggggcttcgctggcagtctgaacggcaagcttgagtcaggacccttaattaagatcctcaattggctggagggcagatctcgcgagtagggcaacgcggtaaaaatattgcttcggtgggtgacgcggtacagctgcccaagggcgttcgtaacgggaatgccgaagcgtgggaaaaagggagcggtggcggaagacggggatgagctcaggacagagccagaggccaagaagagtaagacggccgcaaagaaaaatgacaaagaggcagcaggagagggcccagccctgtatgaggaccccccagatcagaaaacctcacccagtggcaaacctgccacactcaagatctgctcttggaatgtggatgggcttcgagcctggattaagaagaaaggattagattgggtaaaggaagaagccccagatatactgtgccttcaagagaccaaatgttcagagaacaaactaccagctgaacttcaggagctgcctggactctctcatcaatactggtcagctccttcggacaaggaagggtacagtggcgtgggcctgctttcccgccagtgcccactcaaagtttcttacggcataggcgatgaggagcatgatcaggaaggccgggtgattgtggctgaatttgactcgtttgtgctggtaacagcatatgtacctaatgcaggccgaggtctggtacgactggagtaccggcagcgctgggatgaagcctttcgcaagttcctgaagggcctggcttcccgaaagccccttgtgctgtgtggagacctcaatgtggcacatgaagaaattgaccttcgcaaccccaaggggaacaaaaagaatgctggcttcacgccacaagagcgccaaggcttcggggaattactgcaggctgtgccactggctgacagctttaggcacctctaccccaacacaccctatgcctacaccttttggacttatatgatgaatgctcgatccaagaatgttggttggcgccttgattactttttgttgtcccactctctgttacctgcattgtgtgacagcaagatccgttccaaggccctcggcagtgatcactgtcctatcaccctatacctagcactgtgacaccacccctaaatcactttgagcctgggaaataagccccctcaactaccattccttctttaaacactcttcagagaaatctgcattctatttctcatgtataaaactaggaatcctccaaccaggctcctgtgatagagttcttttaagcccaagattttttatttgagggttttttgttttttaaaaaaaaattgaacaaagactactaatgactttgtttgaattatccacatgaaaataaagagccatagtttcaaaaaaaaaaaaaaaaaaaaaaaaaaa

SEQ ID NO: 1498 - DNA, 3827 bp, Homo Sapiens
  NM_001642
agaaggagggcgtggtaatatgaagtcagttccggttggtgtaaaacccccggggcggcggcgaactggctttagatgcttctgggtcgcggtgtgctaagcgaggagtccgagtgtgtgagcttgagagccgcgcgctagagcgacccggcgagggatggcggccaccgggaccgcggccgccgcagccacgggcaggctcctgcttctgctgctggtggggctcacggcgcctgccttggcgctggccggctacatcgaggctcttgcagccaatgccggaacaggatttgctgttgctgagcctcaaatcgcaatgttttgtgggaagttaaatatgcatgtgaacattcagactgggaaatgggaacctgatccaacaggcaccaagagctgctttgaaacaaaagaagaagttcttcagtactgtcaggagatgtatccagagctacagatcacaaatgtgatggaggcaaaccagcgggttagtattgacaactggtgccggagggacaaaaagcaatgcaagagtcgctttgttacacctttcaagtgtctcgtgggtgaatttgtaagtgatgtcctgctagttccagaaaagtgccagtttttccacaaagagcggatggaggtgtgtgagaatcaccagcactggcacacggtagtcaaagaggcatgtctgactcagggaatgaccttatatagctacggcatgctgctcccatgtggggtagaccagttccatggcactgaatatgtgtgctgccctcagacaaagattattggatctgtgtcaaaagaagaggaagaggaagatgaagaggaagaggaagaggaagatgaagaggaagactatgatgtttataaaagtgaatttcctactgaagcagatctggaagacttcacagaagcagctgtggatgaggatgatgaggatgaggaagaaggggaggaagtggtggaggaccgagattactactatgacaccttcaaaggagatgactacaatgaggagaatcctactgaacccggcagcgacggcaccatgtcagacaaggaaattactcatgatgtcaaagctgtctgctcccaggaggcgatgacggggccctgccgggccgtgatgcctcgttggtacttcgacctctccaagggaaagtgcgtgcgctttatatatggtggctgcggcggcaacaggaacaattttgagtctgaggattattgtatggctgtgtgtaaagcgatgattcctccaactcctctgccaaccaatgatgttgatgtgtatttcgagacctctgcagatgataatgagcatgctcgcttccagaaggctaaggagcagctggagattcggcaccgcaaccgaatggacagggtaaagaaggaatgggaagaggcagagcttcaagctaagaacctccccaaagcagagaggcagactctgattcagcacttccaagccatggttaaagctttagagaaggaagcagccagtgagaagcagcagctggtggagacccacctggcccgagtggaagctatgctgaatgaccgccgtcggatggctctggagaactacctggctgccttgcagtctgacccgccacggcctcatcgcattctccaggccttacggcgttatgtccgtgctgagaacaaagatcgcttacataccatccgtcattaccagcatgtgttggctgttgacccagaaaaggcggcccagatgaaatcccaggtgatgacacatctccacgtgattgaagaaaggaggaaccaaagcctctctctgctctacaaagtaccttatgtagcccaagaaattcaagaggaaattgatgagctccttcaggagcagcgtgcagatatggaccagttcactgcctcaatctcagagacccctgtggacgtccgggtgagctctgaggagagtgaggagatcccaccgttccaccccttccaccccttcccagccctacctgagaacgaagacactcagccggagttgtaccacccaatgaaaaaaggatctggagtgggagagcaggatgggggactgatcggtgccgaagagaaagtgattaacagtaagaataaagtggatgaaaacatggtcattgacgagactctggatgttaaggaaatgattttcaatgccgagagagttggaggcctcgaggaagagcgggaatccgtgggcccactgcgggaggacttcagtctgagtagcagtgctctcattggcctgctggtcatcgcagtggccattgccacggtcatcgtcatcagcctggtgatgctgaggaagaggcagtatggcaccatcagccacgggatcgtggaggttgatccaatgctcaccccagaagagcgtcacctgaacaagatgcagaaccatggctatgagaaccccacctacaaatacctggagcagatgcagatttaggtggcagggagcgcggcagccctggcggagggatgcaggtgggccggaagatcccacgattccgatcgactgccaagcagcagccgctgccaggggctgcgtctgacatcctgacctcctggactgtaggactatataaagtactactgtagaactgcaatttccattcttttaaatgggtgaaaaatggtaatataacaatatatgatatataaaccttaaatgaaaaaaatgatctattgcagatatttgatgtagttttcttttttaaattaatcagaaaccccacttccattgtattgtctgacacatgctctcaatatataataaatgggaaatgtcgattttcaataatagacttatatgcaggctgtcgttccggttatgttgtgtaagtcaactcttcagcctcattcactgtcctggcttttatttaaagaaaaaaaaggcagtattccctttttaaatgagctttcaggaagttgctgagaaatggggtggaatagggaactgtaatggccactgaagcacgtgagagaccctcgcaaaatgatgtgaaaggaccagtttcttgaagtccagtgtttccacggctggatacctgtgtgtctccataaaagtcctgtcaccaaggacgttaaaggcattttattccagcgtcttctagagagcttagtgtatacagatgagggtgtccgctgctgctttccttcggaatccagtgcttccacagagattagcctgtagcttatatttgacattcttcactgtctgttgtttacctaccgtagctttttaccgttcacttccccttccaactatgtccagatgtgcaggctcctcctctctggactttctccaaaggcactgaccctcggcctctactttgtcccctcacctccaccccctcctgtcaccggccttgtgacattcactcagagaagaccacaccaaggaggcggccgctggcccaggagagaacacggggaggtttgtttgtgtgaaaggaaagtagtccaggctgtccctgaaactgagtctgtggacactgtggaaagctttgaacaattgtgttttcgtcacaggagtctttgtaatgcttgtacagttgatgtcgatgctcactgcttctgctttttctttctttttattttaaatctgaaggttctggtaacctgtggtgtatttttattttcctgtgactgtttttgttttgtttttttcctttttcctcccctttgaccctattcatgtctctacccactatgcacagattaaacttcacctacaaactccttaatatgatctgtggagaatgtacacagtttaaacacatcaataaatactttaacttccaccgagaaaaaaaaaaaaaaaa

SEQ ID NO: 1499 - DNA, 1926 bp, Homo Sapiens
  NM_001664
gtggatgagctgtgagtgcgcgcgcgtgcgcggggccgcgacctgtgccggctcgagcccgctgggcactcggaggcgcgcacgtcgttccccgccctcccgccgccgcccgccctcgctctctcgcgctaccctcccgccgcccgcggtcctccgtcggttctctcgttagtccacggtctggtcttcagctacccgccttcgtctccgagtttgcgactcgcggaccggcgtccccggcgcgaagaggctggactcggattcgttgcctgagcaatggctgccatccggaagaaactggtgattgttggtgatggagcctgtggaaagacatgcttgctcatagtcttcagcaaggaccagttcccagaggtgtatgtgcccacagtgtttgagaactatgtggcagatatcgaggtggatggaaagcaggtagagttggctttgtgggacacagctgggcaggaagattatgatcgcctgaggcccctctcctacccagataccgatgttatactgatgtgtttttccatcgacagccctgatagtttagaaaacatcccagaaaagtggaccccagaagtcaagcatttctgtcccaacgtgcccatcatcctggttgggaataagaaggatcttcggaatgatgagcacacaaggcgggagctagccaagatgaagcaggagccggtgaaacctgaagaaggcagagatatggcaaacaggattggcgcttttgggtacatggagtgttcagcaaagaccaaagatggagtgagagaggtttttgaaatggctacgagagctgctctgcaagctagacgtgggaagaaaaaatctgggtgccttgtcttgtgaaaccttgctgcaagcacagcccttatgcggttaattttgaagtgctgtttattaatcttagtgtatgattactggcctttttcatttatctataatttacctaagattacaaatcagaagtcatcttgctaccagtatttagaagccaactatgattattaacgatgtccaacccgtctggcccaccagggtccttttgacactgctctaacagccctcctctgcactcccacctgacacaccaggcgctaattcaaggaatttcttaacttcttgcttctttctagaaagagaaacagttggtaacttttgtgaattaggctgtaactactttataactaacatgtcctgcctattatctgtcagctgcaaggtactctggtgagtcaccacttcagggctttactccgtaacagattttgttggcatagctctggggtgggcagttttttgaaaatgggctcaaccagaaaagcccaagttcatgcagctgtggcagagttacagttctgtggtttcatgttagttaccttatagttactgtgtaattagtgccacttaatgtatgttaccaaaaataaatatatctaccccagactagatgtagtattttttgtataattggatttcctaatactgtcatcctcaaagaaagtgtattggttttttaaaaaagaaagtgtatttggaaataaagtcagatggaaaattcattttttaaattcccgttttgtcactttttctgataaaagatggccatattaccccttttcggccccatgtatctcagtaccccatggagctgggctaagtaaataggaattggtttcacgcctgaggcaattagacactttggaagatggcataacctgtctcacctggacttaagcatctggctctaattcacagtgctcttttctcctcactgtatccaggttccctcccagaggagccaccagttctcatgggtggcactcagtctctcttctctccagctgactaaactttttttctgtaccagttaatttttccaactactaatagaataaaggcagttttctaaaaaaa

SEQ ID NO: 1500 - DNA, 1332 bp, Homo Sapiens
  NM_001665
cacttcctccggcctcccgctctcacttccttctcgagcccggagccgctgccgccgcccccagctcccccgcctcggggagggcaccaggtcactgcagccagaggggtccagaagagagaggaggcactgcctccactacagcaactgcacccacgatgcagagcatcaagtgcgtggtggtgggtgatggggctgtgggcaagacgtgcctgctcatctgctacacaactaacgctttccccaaagagtacatccccaccgtgttcgacaattacagcgcgcagagcgcagttgacgggcgcacagtgaacctgaacctgtgggacactgcgggccaggaggagtatgaccgcctccgtacactctcctaccctcagaccaacgttttcgtcatctgtttctccattgccagtccgccgtcctatgagaacgtgcggcacaagtggcatccagaggtgtgccaccactgccctgatgtgcccatcctgctggtgggcaccaagaaggacctgagagcccagcctgacaccctacggcgcctcaaggagcagggccaggcgcccatcacaccgcagcagggccaggcactggccaagcagatccacgctgtgcgctacctcgaatgctcagccctgcaacaggatggtgtcaaggaagtgttcgccgaggctgtccgggctgtgctcaaccccacgccgatcaagcgtgggcggtcctgcatcctcttgtgaccctggcacttggcttggaggctgcccctgccctccccccaccagttgtgccttggtgccttgtccgcctcagctgtgccttaaggactaattctggcacccctttccagggggttccctgaatgcctttttctctgagtgcctttttctccttaaggaggcctgcagagaaaggggctttgggctctgcccccctctgcttgggaacactgggtattctcatgagctcatccaagccaaggttggacccctccccaagaggccaacccagtgccccctcccattttccgctactgaccagttcatccagctttccacacagttgttgctgcctattgtggtgccgcctcaggttaggggctctcagccatctctaacctctgccctcgctgctcttggaattgcgcccccaagatgctctctcccttctccaatgagggagccacagaatcctgagaaggtgaatgtgccctaacctgctcctctgtgcctaggccttacgcatttgctgactgactcagcccccatgcttctggggacctttcctacccccatcagcatcaataaaacctcctgtctccagtgaaaaaaaaaaaaa

SEQ ID NO: 1501 - DNA, 1519 bp, Homo Sapiens
  NM_001671
cccaaacggtgcacggaagagtgaggtgactggcatgtgtgggggcaacacgattctcctccctggggagcagagcagaggcaacccatcccccactcccacccccacactcccctaagttccaatccatttccacctctgtttactgtccaaagtcccgggcactggagatgccacgtttggcgtgcttggacacacagacacgcagacacagagacaccggggcccagggccctcctatggaccctgcccgctcccctcccattgtccacggctgtccgcccacccccattctccaagcttcagccccctccttagttcggcatctgcacagcactgaagaacctgggaatcagaccctgagaccctgagcaatcccaggtccagcgccagccctatcatgaccaaggagtatcaagaccttcagcatctggacaatgaggagagtgaccaccatcagctcagaaaagggccacctcctccccagcccctcctgcagcgtctctgctccggacctcgcctcctcctgctctccctgggcctcagcctcctgctgcttgtggttgtctgtgtgatcggatcccaaaactcccagctgcaggaggagctgcggggcctgagagagacgttcagcaacttcacagcgagcacggaggcccaggtcaagggcttgagcacccagggaggcaatgtgggaagaaagatgaagtcgctagagtcccagctggagaaacagcagaaggacctgagtgaagatcactccagcctgctgctccacgtgaagcagttcgtgtctgacctgcggagcctgagctgtcagatggcggcgctccagggcaatggctcagaaaggacctgctgcccggtcaactgggtggagcacgagcgcagctgctactggttctctcgctccgggaaggcctgggctgacgccgacaactactgccggctggaggacgcgcacctggtggtggtcacgtcctgggaggagcagaaatttgtccagcaccacataggccctgtgaacacctggatgggcctccacgaccaaaacgggccctggaagtgggtggacgggacggactacgagacgggcttcaagaactggaggccggagcagccggacgactggtacggccacgggctcggaggaggcgaggactgtgcccacttcaccgacgacggccgctggaacgacgacgtctgccagaggccctaccgctgggtctgcgagacagagctggacaaggccagccaggagccacctctcctttaatttatttcttcaatgcctcgacctgccgcaggggtccgggattgggaatccgcccatctgggggcctcttctgctttctcgggaattttcatctaggattttaagggaaggggaaggatagggtgatgttccgaaggtgaggagcttgaaacccgtggcgctttctgcagtttgcaggttatcattgtgaactttttttttttaagagtaaaaagaaatatacctaaaaaaaaaaaaaaaaaa

SEQ ID NO: 1502 - DNA, 3350 bp, Homo Sapiens
  NM_001678
ggagcggagcctccgcctggggggccccccatccctggctgtcccccagctgcgcgtccccgccccacccccgcggctgagccaccaccggtgcagtggtctccgcttggcggagcgagccttgagcttcgttccacagcttctttgcatcttggatttcggggcggccccctcccccacctctctctgcctttttgtaccccgctttttttctgcgttctgctcggtttttgtagccgtctgtttttgcaccccatttcgttttgtttctagacggtttggtggggggtgaagctgcattcataccccttcctcttgttattctcccctgctctgacagcaccccttttcatcgcagttggggggcctaggatcggtgcatcttccgccgcgctgccagcaccccgcagcgcgtggtcgtgcaccccggaatctgcagcagctgcatatctgaggggggtctcctttgcccgcgccgccttcgctccccgtgcttttgggtgtgtggagggcttcagcgcgcggcgcccccgcttctccgcaaccccccgccccgcgcccggactcgccccgcgccaccaagatggtcatccagaaagagaagaagagctgcgggcaggtggttgaggagtggaaggagttcgtgtggaacccgaggacgcaccagtttatgggccgcaccgggaccagctgggcctttatcctcctcttctacctcgttttttatgggttcctcaccgccatgttcaccctcaccatgtgggtgatgctgcagactgtctccgaccatacccccaagtaccaggaccgactggccacaccgggcttgatgattcgccccaagactgagaaccttgatgtcattgtcaatgtcagtgacactgaaagctgggaccagcatgttcagaagctcaacaagttcttggagccttacaacgactctatccaagcccaaaagaatgatgtctgccgccctgggcgctattacgaacagccagataatggagtcctcaactaccccaaacgtgcctgccaattcaaccggacccagctgggcaactgctccggcattggggactccacccactatggttacagcactgggcagccctgtgtcttcatcaagatgaaccgggtcatcaacttctatgcaggagcaaaccagagcatgaatgttacctgtgctgggaagcgagatgaagatgctgagaatctcggcaacttcgtcatgttccccgccaacggcaacatcgacctcatgtacttcccctactatggcaaaaagttccacgtgaactacacacagcccctggtggctgtgaagttcctgaatgtgacccccaacgtggaggtgaatgtagaatgtcgcatcaacgccgccaacatcgccacagacgatgagcgagacaagttcgccggccgcgtggccttcaaactccgcatcaacaaaacctgaggccccttcctcccaccccatctctctcctgtggatgctcctggaatgtccctgaccctgcctgatccctccctcacccaccccaaaggtatttttgataacagagctatgacttgtctgagcctcacatccttttccttgacttctcaacccagcctgaagtccattgcggttccgtcactcgcctttcccaccaacttctcccaacctcagatcagtcagacagggagctgggctaagatggccacggaggagttaggagcctttctagttctggtttagctgtgagagctatccactctcctgcctgcatatcccctgagagttataggaagtgcccactgacccacccacccacctacaccccccgccacacacacacacaaacgtgcacacgcgtctcatttgacccctttgcttccagagatgaatgtggcactccctccttccattcctaagctctagccaccgtcccttgatctctcatactttctccctgtctacacagtcgccatcttggtgactttgaatttatctggctcctgggcaggtcttctcctcctctccatccctattccctcctctgaaatgcacccctttgtaattgaggacaaggtggttctgtggccttttccctctttgctggcacgttctgcttctcaccctctggtgactctgtgagctgggaaatgagggactggaagtgaggcctgtgttgacccttcctgaaaatcctctagcagcccccgacttcagcagtttctttctttgtttttttgagatggagtttcgctcttgttgcccaggctggagtgcaatggtgcaatctcagctcactgcaacttccgcatcccaggttcaagcgattctcccgcctcaggttcccgagtagctgggactacaggcatgtgccaccatgcccggctaatttctttctttctttttttttttttttgcattttttagtagagatgggggtttctccttgttggtcaggctggtctcgaactcccgacctcaggtgatccacctgcctcggcctcccaaagtgttgggattacaggcgtgagccaccgcgcccggccttcagtttcttcctaggccgttctgtcacccaaatagctgctacccagaggggcggggttgacctaggctgaatatccactttgtttttatggatggctcccttcccccattcgccttcccagaatatccttcaagttccacttcccagggagctctgggggaggggcggccattctggctccgtccccagtggccaccttggaaacatcggctggctttgggactattccacctccttcccctgagcccagatctgcccccaccatcctttctctggcttcttttagcaagttatcaactaatcactaactccttccttttcctctgcatgccagcctgaaaattccaaatctagcctctgaatgtcttggctccatctcttcagacccctttgcctttaaaaaaaaaacaaaaacaaaaacaaaaaaacccataatgcccacagaatgtcaaatgaggggcctcctgcctcctgctctgaatattctgtagctgtagaggcattttaaccctttgtcctccagcatcccttcacttcctcatcctctctaacctcctttttctttttttaatgctgcagcctccacactccacccacaggtggacccttccctttttctctagctggatctgtgtttcttcccttcgggcccccatgttttcctgcacccgccctaccatggtctctctctgcagttatttaatgcctgtgtcagatctactgtaaaaagaggattaagtaaaataaaatgagagcaattatatatataaatatatatcatacacagagaaaaaaaaaaaaaaaaaa

SEQ ID NO: 1503 - DNA, 4359 bp, Homo Sapiens
  NM_001681
ggcagcggccgataaatgctattagagcagccgccgcggagccgtccccgacgccacctccttttccttcgccgcagtttcctccgccgctgtcgggcgtgcggcgctgagggacccgggcgagcgcgccgcgcaccgccccgccggctcgcctccctcgccgcgttccgccctcagtggtctgccgggcgccccctcctccggcccgggcggggcctctgatcgcctcaagagagcggggagggggctcgggggccgcggcctgccctcccggcgggcggctgagggcgagggaggccctcccttctggcgaggggagggagggtgggtcaggagcccccaacccgccctgcggagctcggggccgcgcgaggggcggttgtctgggggagggggcgcggggtgattcagcgcccggcgaggcggaagcggccgcaagaggaggaggggagagcccgtccgcgcctgggctcccggggtggcacgagcccgcggccggagtgcgaggcggaggcgaggaggccgcggggacgggaggcgaggccggccgggcccccgaagccatggagaacgcgcacaccaagacggtggaggaggtgctgggccacttcggcgtcaacgagagtacggggctgagcctggaacaggtcaagaagcttaaggagagatggggctccaacgagttaccggctgaagaaggaaaaaccttgctggaacttgtgattgagcagtttgaagacttgctagttaggattttattactggcagcatgtatatcttttgttttggcttggtttgaagaaggtgaagaaacaattacagcctttgtagaaccttttgtaattttactcatattagtagccaatgcaattgtgggtgtatggcaggaaagaaatgctgaaaatgccatcgaagcccttaaggaatatgagcctgaaatgggcaaagtgtatcgacaggacagaaagagtgtgcagcggattaaagctaaagacatagttcctggtgatattgtagaaattgctgttggtgacaaagttcctgctgatataaggttaacttccatcaaatctaccacactaagagttgaccagtcaattctcacaggtgaatctgtctctgtcatcaagcacactgatcccgtccctgacccacgagctgtcaaccaagataaaaagaacatgctgttttctggtacaaacattgctgctgggaaagctatgggagtggtggtagcaactggagttaacaccgaaattggcaagatccgggatgaaatggtggcaacagaacaggagagaacaccccttcagcaaaaactagatgaatttggggaacagctttccaaagtcatctcccttatttgcattgcagtctggatcataaatattgggcacttcaatgacccggttcatggagggtcctggatcagaggtgctatttactactttaaaattgcagtggccctggctgtagcagccattcctgaaggtctgcctgcagtcatcaccacctgcctggctcttggaactcgcagaatggcaaagaaaaatgccattgttcgaagcctcccgtctgtggaaacccttggttgtacttctgttatctgctcagacaagactggtacacttacaacaaaccagatgtcagtctgcaggatgttcattctggacagagtggaaggtgatacttgttcccttaatgagtttaccataactggatcaacttatgcacctattggagaagtgcataaagatgataaaccagtgaattgtcaccagtatgatggtctggtagaattagcaacaatttgtgctctttgtaatgactctgctttggattacaatgaggcaaagggtgtgtatgaaaaagttggagaagctacagagactgctctcacttgcctagtagagaagatgaatgtatttgataccgaattgaagggtctttctaaaatagaacgtgcaaatgcctgcaactcagtcattaaacagctgatgaaaaaggaattcactctagagttttcacgtgacagaaagtcaatgtcggtttactgtacaccaaataaaccaagcaggacatcaatgagcaagatgtttgtgaagggtgctcctgaaggtgtcattgacaggtgcacccacattcgagttggaagtactaaggttcctatgacctctggagtcaaacagaagatcatgtctgtcattcgagagtggggtagtggcagcgacacactgcgatgcctggccctggccactcatgacaacccactgagaagagaagaaatgcaccttgaggactctgccaactttattaaatatgagaccaatctgaccttcgttggctgcgtgggcatgctggatcctccgagaatcgaggtggcctcctccgtgaagctgtgccggcaagcaggcatccgggtcatcatgatcactggggacaacaagggcactgctgtggccatctgtcgccgcatcggcatcttcgggcaggatgaggacgtgacgtcaaaagctttcacaggccgggagtttgatgaactcaacccctccgcccagcgagacgcctgcctgaacgcccgctgttttgctcgagttgaaccctcccacaagtctaaaatcgtagaatttcttcagtcttttgatgagattacagctatgactggcgatggcgtgaacgatgctcctgctctgaagaaagccgagattggcattgctatgggctctggcactgcggtggctaaaaccgcctctgagatggtcctggcggatgacaacttctccaccattgtggctgccgttgaggaggggcgggcaatctacaacaacatgaaacagttcatccgctacctcatctcgtccaacgtcggggaagttgtctgtattttcctgacagcagcccttggatttcccgaggctttgattcctgttcagctgctctgggtcaatctggtgacagatggcctgcctgccactgcactggggttcaaccctcctgatctggacatcatgaataaacctccccggaacccaaaggaaccattgatcagcgggtggctctttttccgttacttggctattggctgttacgtcggcgctgctaccgtgggtgctgctgcatggtggttcattgctgctgacggtggtccaagagtgtccttctaccagctgagtcatttcctacagtgtaaagaggacaacccggactttgaaggcgtggattgtgcaatctttgaatccccatacccgatgacaatggcgctctctgttctagtaactatagaaatgtgtaacgccctcaacagcttgtccgaaaaccagtccttgctgaggatgcccccctgggagaacatctggctcgtgggctccatctgcctgtccatgtcactccacttcctgatcctctatgtcgaacccttgccactcatcttccagatcacaccgctgaacgtgacccagtggctgatggtgctgaaaatctccttgcccgtgattctcatggatgagacgctcaagtttgtggcccgcaactacctggaacctgcaatactggagtaaccgcttcctaaaccattttgcagaaatgtaagggtgttcggttgcgtgcatgtgcgtttttagcaacacatctaccaaccctgtgcatgactgatgttggggaaaaagaaaagtaaaaaacttcccaactcactttgtgttatgtggaggaaatgtgtattaccaatggggttgttagcttttaaatcaaaatactgattacagatgtacaatttagcttaatcagaaagcctctccagagaagtttggtttctttgctgcaagaggaatgaggctctgtaaccttatctaagaacttggaagccgtcagccaagtcgccacatttctctgcaaaatgtcatagcttatataaatgtacagtattcaattgtaatgcatgccttcggttgtaagtagccagatccctctccagtgacattggaacatgctactttttaattggccctgtacagtttgcttatttataaattcattaaaaacactacaggtgttgaatggttaaaatgtaggcctccagttcattttcagttattttctgagtgtgcagacagctatttcgcactgtattaaatgtaacttatttaatgaaatcagaagcagtagacagatgttggtgcaatacaaatattgtgatgcatttatcttaataaaatgctaaatgtcaatttatcactgcgcatgtttgactttagactgtaaatagagatcagtttgtttctttctgtgctggtaacaatgagcgtcgcacagacatggtttcaggtaaataaatctattctatgataaaaaaaaaaaaaaaaa

SEQ ID NO: 1504 - DNA, 6796 bp, Homo Sapiens
  NM_001682
ggccaaaggtcaagatacttctctgggaaatgttgctgctgatgctgctttacaaagtcatacaatgagtgtttggtttaagaaagattttcatacttaaaagattttcatcttggaaatacatcaagtgaaaattaaattcttttgggaaacattttccttctgatatattatacttgtaatgggcgacatggcaaacaactcagttgcttacagtggtgtgaaaaactctttgaaggaagctaatcatgatggagactttggaattacgctcgcagagctgcgggctctcatggagctcaggtccacagatgcattacgaaaaatacaggaaagctatggagatgtctatggaatttgcaccaaattgaaaacatctcccaatgaaggtttaagtggaaaccctgcagatttagaaagaagagaagcagtgtttggaaagaattttatacctcctaaaaagccaaaaacctttcttcaattagtatgggaagcattacaagatgtcactttaattatattagaaattgcagccatagtatcattgggcctttctttttatcagcctccagaaggggataatgcactttgtggagaagtttctgttggggaggaagaaggtgaaggtgaaactggttggattgaaggagctgcaatcctcttgtctgtagtgtgtgtggtgttagtaacagctttcaatgactggagtaaggaaaaacagtttagaggtttgcagagccgaattgaacaagaacagaagttcactgtcatcaggggtggtcaggtcattcagatacctgtagctgacattactgttggagatattgctcaagtgaaatatggtgatcttcttccagctgacggcatacttattcaaggcaacgatcttaaaattgatgaaagctcattgactggtgaatcagatcatgttaaaaagtctttagataaggatcccttacttctatcaggtactcatgtaatggaaggctctggaagaatggtagttacagctgtaggtgtaaattctcaaactggaattatctttaccttacttggagctggaggtgaagaggaagagaagaaagatgagaagaaaaaggaaaagaaaaataagaaacaagatggagctattgagaatcgcaacaaagcaaaagcccaggatggtgcagccatggaaatgcagccattgaagagtgaagaaggtggagatggtgatgaaaaagataaaaagaaagcaaatttgccaaaaaaggaaaaatctgttttacaagggaaacttacaaaactggctgttcagattggcaaagcaggtctgttgatgtctgccatcacagttatcattctagtattatattttgtcattgacaccttctgggttcagaaaagaccatggcttgctgagtgcacaccaatttatatacaatactttgtgaagttcttcattattggagttacagttttagtggtcgcagtgccagaaggtcttccacttgcagtcacgatctcactggcttattcagtcaaaaaaatgatgaaagataataacttagtaaggcatctggatgcttgtgaaaccatgggaaatgctacagctatttgttcagataaaacaggaactttgacaatgaacagaatgacagtcgttcaagcttacataaatgaaaaacattataaaaaggttcctgaaccagaagctattccaccaaatattttgtcctatcttgtaacaggaatttctgtgaattgtgcttatacatcaaaaatattgccaccagagaaagagggtggattacctcgtcacgttggtaataaaactgaatgtgccttgttgggacttcttttggatttaaaacgggattatcaggatgttagaaatgaaataccagaagaagcactgtacaaagtctacaccttcaattctgttaggaagtccatgagtactgtcctgaaaaattcagatggaagttatcgaatattcagcaagggtgcatctgagataattctgaaaaagtgtttcaaaatcttgagtgctaatggtgaggcaaaagtattcagaccaagggaccgtgatgatattgtaaaaactgtgattgaaccgatggcatcagaaggcttgagaaccatatgtcttgcattcagagattttccagcaggagaaccagaaccagagtgggataatgaaaatgatattgtcaccggccttacatgcattgctgttgtggggattgaagatcctgtgagacctgaggtgccagatgcaattaaaaagtgtcagagggctggaattactgtgcggatggtcactggtgataatattaatactgctcgggccattgctaccaaatgtggtattttacatcctggggaagattttctgtgcctagaaggtaaagattttaacagaagaatacgaaatgaaaaaggagagattgagcaagagaggatagacaagatttggccaaaacttcgagtacttgcaagatcatctcctactgataagcatacactggttaaaggtataattgacagcactgtctcagaccaacgccaggttgtagctgtaactggtgatggtacaaatgatggcccagcactaaagaaagcagatgttggatttgcaatgggtattgctggaactgatgtagctaaagaagcatccgatattattctcacagatgacaactttacaagcattgttaaagcagttatgtggggacgaaatgtctatgacagcatctcaaaattccttcagttccaacttactgttaatgtagtagcagtgattgttgcttttacgggcgcctgcattactcaagactcaccgcttaaggctgtgcagatgctgtgggtaaacctcataatggatacactcgcttccctggctctggcaacggaaccacccactgagtctctcttgcttcggaaaccttatggtagaaataagcctctcatctcacgtacaatgatgaagaatattttgggtcatgcattctatcaacttgtagtagtctttacactcttatttgctggagaaaagttttttgacattgatagtggaagaaatgctcctttgcatgctcctccttcagaacattatactattgtttttaatacctttgtgctgatgcaacttttcaacgaaataaatgcccggaaaattcatggtgaaagaaatgtattcgaaggaatctttaacaatgccatcttctgcacaattgttttaggcacttttgtggtacagataataattgtgcagtttggtggaaaacctttcagttgttcagaactttcaatagaacagtggctatggtcaatattcctaggaatgggaacattactctggggccagcttatttcaacaattccaactagccgtttaaaattcctcaaagaagctggtcatggaacacaaaaggaagaaatacctgaggaggaattagcagaggatgttgaagagattgatcacgctgaaagggagttgcggcgtggccaaatcttgtggtttagaggtctgaacagaatccaaacacagattcgagtggtgaatgcatttcgtagttctttatatgaagggttagaaaaaccggaatcaagaagttcgattcacaactttatgacacatcctgagtttaggatagaagattcagagcctcatatcccccttattgatgacactgatgccgaagatgatgctcctacaaaacgtaactccagtcctccaccctctcccaacaaaaataacaatgctgttgacagtggaattcaccttacaatagaaatgaacaagtctgctacctcttcatccccaggaagcccactacatagtttggaaacatcactctgattgtaagctgaatgttaacacactagctgcattgtaaagaaacaaattgaaactgggtcttttcacatattgtgatggacaagctagtattcttgtctttggacttcaacagaagacacacttgtacgaatgtagatttatttttttaaaaaaaaaaaagcaaagctttctgccagactgagggtgctttttggggggtgggagaaatgaactgacagataaacagtaactcagcgtaagtgacctgtggatcatcagtagtacccaagcatggtcctgaacagtgtattagcagagctttagtttatctcagtcctggatgggagagagagggaggagtaaaactgggcaagacaaagagccctggatcgttgaattgatagtttaatttctgctgttggctgttaataatttggattatttatgtttataaatgatacagatctgtttacaaggtttgtagatactttttttgttcctgttcatagatgggaagcttccttataactgatgcagagaaaaattagtccttcaaatactgctgtattttcaggaaaaaaaaaaaaaggggtgtttctattgaaactgtactaaatttttgcctacaatttaccttgttaaatattgtagataaattgctaatactaatagccaaatagataacactaatgctttgtttaaaaaaacgaaaaaaacaaaacaaaacaaaaaaacatgagcagtggtgttctaatgaagttatgacatctgtcctaattagtttcttaaatacatttactacttaatggttttgaagcaactgtttaatttttaaaatttttgaaaacttgctaataaccttttgttcagaatttagtagattgtttaatgcaggacatcaactacataatgaaagatgcttgaaatgcttttgttatttcaggcaaatcaaattaaatcagactatcaaactacaagagaaccttagtcttttttgtttttgtctaaacatgttagtttagtgatgtcttggtgaactgtgagtgaactgtattgatttttctaatctttagagaccttcacacagcatgagggctgttggcattttgaaaaaggttaataagtagaagcatacatgttttccttttgtttttgaaacttgtttgtaaacataaataaatatgcccttttattaaataaattcatggcaatgtttttttaaaagacatttcagcttctttactcagttctgcatatacagtgcatcagtctgttctctttgaccacaattggaatacatttcaagatggtaacagccccatgaagtaccgctttaattccttgctggtaatctaatagaatcagattaagaaaattaacacaattttaccatttgacatactcttcattgaatttagtttgtctaaaatagtctcacaggtaaaaaacataacaacaatgaccaccattgtctttgatacatttattttaattcttaagtggccaaataacagattaggtaaaatgagattacatgaaaaggttctaaaatgatatatttagatgcaataattaaccatatgctagaatgcccacctctaagccaattggattctttagctctctttttctttccttcatctaccttcttctcttttttgcctctgtctttaccctttagaaactggcatgtgttagggcccagatttcaccagatacacaatcctcaggctgacataaagtttacgaggactgctactataactgagagtgctgaccaagcaaagaaacatttagttgatggtgcttgatatttttggtgggtgggggaaatctttttctcaccatcaaatctttgcagtaatcctctgcaggtcttagaaacacattggctctgtcagcatttgtaattgtacatttattcatcaggtatttatagtgaatcatactgtaaaaaagaggtagcatgatatgctggaaagcatattagactaggagtcaagacctggtttctagtcttggttttgccattaatgtgctgcatgatcttgggaaaatcatttaccctaaataagggtggtggactatcttgaagaaccctttcaactctaaaaattgaccctatcaactggagagcccacaaggcatagggaatagagaaaagggaaatgttttcagttttcttttttattttggttatgcttaaatatgaatgtaattaccaaaagatttagaagtgcatgtgctttggaggatttgtattgagcttttacagtattcatttttcaactcaaggcaatggctttctacaccaactctaatccataaacgggtcttatgacatctatgaagtagtagcaagacatgcttagtgtgtatttctctctttgagacactgtaatttctaccagaaatttccagagcattatgtaggtagaaaaaaatgcaagcaagctgttaaagatcttggatcccattatatagtatgtatagctgaaatctgtaattcaatcactttttctcttttatcctctaaccaaaaaattgtttaattttgcatcccaaatgtttttaatctttgtatattttttaaaaatccttttctcctcatcattgccttttttgtggttgtaaatagacttacttgcactttgaagatgagttactccttgtcatcttacaaatatgtgatatggtaattttcataacagatgtcagttttgaaccaagaattggtgatttgtttataagaaaaaaactggcttcatttctgtgaaattgctctttgaaaatttctttttacacgtgtaagccaactgagataccgtgatggtgttgatttctttcaatgatgcttaccatctattttagccactgagccttttattatttgtctatttgtaaagtttatttgtcttaactcatttaataaatatactgtttatctgtttctgaaaaaaaaaaaaaaaaaaa

SEQ ID NO: 1505 - DNA, 1005 bp, Homo Sapiens
  NM_001687
cagacgtccctgcgcgtcgtcctcctcgccctccaggccgcccgcgccgcgccggagtccgctgtccgccagctacccgcttcctgccgcccgccgctgccatgctgcccgccgcgctgctccgccgcccgggacttggccgcctcgtccgccacgcccgtgcctatgccgaggccgccgccgccccggctgccgcctctggccccaaccagatgtccttcaccttcgcctctcccacgcaggtgttcttcaacggtgccaacgtccggcaggtggacgtgcccacgctgaccggagccttcggcatcctggcggcccacgtgcccacgctgcaggtcctgcggccggggctggtcgtggtgcatgcagaggacggcaccacctccaaatactttgtgagcagcggttccatcgcagtgaacgccgactcttcggtgcagttgttggccgaagaggccgtgacgctggacatgttggacctgggggcagccaaggcaaacttggagaaggcccaggcggagctggtggggacagctgacgaggccacgcgggcagagatccagatccgaatcgaggccaacgaggccctggtgaaggccctggagtaggcggtgcgtacccggtgtcccgaggcccggccaggggctgggcagggatgccaggtgggcccagccagctcctggggtcccggccacctggggaagccgcgcctgccaaggaggccaccagagggcagtgcaggcttctgcctgggccccaggccctgcctgtgttgaaagctctggggactgggccagggaagctcctcctcagctttgagctgtggctgccacccatggggctctccttccgcctctcaagatccccccagcctgacgggccgcttaccatcccctctgccctgcagagccagccgccaaggttgacctcagcttcggagccacctctggatgaactgcccccagcccccgccccattaaagacccggaagcctgaaaaaaaaaa

SEQ ID NO: 1506 - DNA, 2116 bp, Homo Sapiens
  NM_001688
actcccgggccgccgggggcactagggggggtggggtttccttccgcatctccacggttccaactccaacctagactcaaactggacgccggccggagactccgctccggcagcaaaccccacgtggtgcacctctgagcctccgcccctctcccgagggaaccgcaactctacttctcgcgagaattgcttctatggctccatcctgctttccggctgtcgccctcatgcgataggctctcagcgttacttgactcttctcgcgataattttttttaaaaatctcccaaggaaagttgaaggaagagtacaaaattttcatctcgcgagacttgtgagcggccatcttggtcctgccctgacagattctcctatcggggtcacagggacgctaagattgctacctggactttcgttgaccatgctgtcccgggtggtactttccgccgccgccacagcggccccctctctgaagaatgcagccttcctaggtccaggggtattgcaggcaacaaggacctttcatacagggcagccacaccttgtccctgtaccacctcttcctgaatacggaggaaaagttcgttatggactgatccctgaggaattcttccagtttctttatcctaaaactggtgtaacaggaccctatgtactcggaactgggcttatcttgtacgctttatccaaagaaatatatgtgattagcgcagagaccttcactgccctatcagtactaggtgtaatggtctatggaattaaaaaatatggtccctttgttgcagactttgctgataaactcaatgagcaaaaacttgcccaactagaagaggcgaagcaggcttccatccaacacatccagaatgcaattgatacggagaagtcacaacaggcactggttcagaagcgccattacctttttgatgtgcaaaggaataacattgctatggctttggaagttacttaccgggaacgactgtatagagtatataaggaagtaaagaatcgcctggactatcatatatctgtgcagaacatgatgcgtcgaaaggaacaagaacacatgataaattgggtggagaagcacgtggtgcaaagcatctccacacagcaggaaaaggagacaattgccaagtgcattgcggacctaaagctgctggcaaagaaggctcaagcacagccagttatgtaaatgtatctatcccaattgagacagctagaaacagttgactgactaaatggaaactagtctatttgacaaagtctttctgtgttggtgtctactgaagttatagtttacccttcctaaaaatgaaaagtttgtttcatatagtgagagaacgaaatctctatcggccagtcagatgtttctcatccttcttgctctgcctttgagttgttccgtgatcacttctgaataagcagtttgcctttataaaaacttgctgcctgactaaagattaacaggttatagtttaaatttgtaattaattctaccatcttgcaataaagtgacaattgaatgaaacagggtttttcaagttgtataattctctgaaatactcagcttttgtcatatgggtaaaaattaaagatgtcattgaactactgtcttgtttatgagaccattcagtggtgaactgtttctggctgataggttatgagatatgtaaagctttctagtactcttaaaataactaaatggagtattatatatcaattcatatcattgactttattattttagtagtatgcctatagaaaatattatggactcagagtgtcataaaatcactcttaagaatccatgcagcaggccaggcacagtggctcacacctgtaatgcctgcactttggaaggccgagacaggcggatcacttgaggtcaggagtttgaaaccagccaggccaacacagtgaaaccctgtctctactaaaaatacaaaaggttagccgggcatggtggcaggcgcctgtaatcccagctactcaggaggctgaggcaggagaattgcttgaacgcaggaggcaaaggttgcagtgagctgagatcacgccactgcactccagcctgggcaacagacctcgactccatctagaaaaaaaaaaaaaaaaa

SEQ ID NO: 1507 - DNA, 5704 bp, Homo Sapiens
  NM_001695
gcgcgggcgtaggcggagcagcgcgcgccgcggtcagctgactgctgggctggcacgtgacttgttctgtgttcgcttgggtagaggaagccgtgaggccggagcttaggtcgggaagggatggatcgctgagccgatagcgtccgctaggctgtctgcctcggtacctgttactgctgctacttcctcgtttgacaccttcctggaatctctcttgatttttgaggaaatacctagtaacaaacatgactgagttctggcttatatctgctcctggggagaaaacctgtcagcaaacatgggagaaattgcatgcggcaacttcaaagaacaataatcttgctgtcacttccaagttcaatattcctgacttaaaggttggcacgttggatgtcttggttggcttgtcagatgaactggctaaactggatgcatttgtagaaggagtggttaagaaagtagctcaatacatggctgatgtattggaagatagcaaagacaaagttcaagagaatctgttggctaatggagtggacttggttacttatataacaaggttccagtgggacatggccaaatatccaatcaagcagtccctgaaaaatatttctgaaataattgccaagggagtaactcagattgataatgacctgaaatctcgagcatctgcatacaataacctgaaaggaaatcttcagaatttggaacgaaagaatgcaggaagtttgctaactagaagtctagcagaaattgtgaagaaggatgactttgttcttgattcagagtatctcgtcacattactggtagtagttcccaagttaaaccacaacgactggattaagcagtatgaaacactagccgaaatggtagttccaaggtctagcaatgttctttcagaggaccaagacagttacctgtgtaatgtcaccttgtttaggaaggcagttgatgacttcagacacaaagccagagaaaacaaattcattgttcgtgacttccagtataatgaagaggagatgaaagcagataaagaagaaatgaacaggctttctactgataagaaaaaacaatttggaccacttgtacggtggctgaaagtgaattttagtgaagcatttattgcatggattcacgtgaaagcattacgggttttcgttgagtctgttttaaggtatggcttgccagtgaacttccaagcaatgctacttcagcccaataagaaaactttgaagaaactgagagaagtattacatgaattgtataaacatctagacagcagtgcagcagctattattgatgctcctatggatattccaggtttaaacctgagtcaacaagaatactacccctatgtgtactacaagattgattgcaacttgctggaattcaagtgaaaatgggctcctcccccgacaatcctgtccttgtgtttgtgtgtgctaacagaaataagttgcagtatggtcgtacttttaactctagtatcctttgcttgcttcttacgccctttcctaggtgaattctcccacagtggtctgtatctcaacattttctttttaaaggaaaaaatatatatatatagtttctttttattgatcaggtctgtaaatgtgtactaaaaaaatcagagtttatttataaacaaaatagtttatttaaagagaaggtctcttccttattgatatcatggtatgcattaattccatttgttactattgtgcacaaaagccctgttcacaggggaatggtgtaaacatttatactgttttgttcactgtatttagtagacataactgttgaatagttactgaatcatgatgtaaagaatatgtgaccatcttcaggtatgggatttctgaacgtttcaaatttcaatcaatgagcactgtcaacacccacaggagagaataaaattacctgtgcaaaggtgtattgtggtgtgtgtaacttaagattacagttctgtttgagagttaaatgatgtcatagctcacttgctatgctgcttccaggattttgttatatgctgaggtgtaaccatttgtgttgtctgactttcgtatgatttaattgagccaaatttgggtcagaacacaaatttgaagatgacttttcagtatatgatgggtatttacatttgaacactagaattttaggtctctcaaataattaagaatagagccagttttgaataaagtctagcagaactatgcagctttagtcatttgttttgtctaagtctgtattttatgtgttgtcttcttaagatctataattttggcatttatgtcatttgtgacatagtctgaaaatagagacattgttggcctttaaaatctcagaaatgaatgacttaatttagtgtcctgaaagagcttttaaaagaggattttgtggcaatgtttctcttactacgtactcacaggtttgcaaatgggaaaaaagtttacatttcagtttaggggcatatctaagctatgctattccctttagaaaattagcctccaaaatcttttgtttcaaaatattatattatttcataaataatttcaagcaaatacagacatccacaatgtagaacatgagagaccccctccctcaatttccacctcccaagggaagtttatgtatttttctaggcccttttctatgtctttacatctctgtctcacacacacacacgtatacacacacacagtttatttttaataaaataggattataccacacacatcctgtcacttgcttttttgcttaagagtatatctaagagaatcctttgtgtcagtgaagctggagctacctcattcttttaactggctgcgtggcgttccattgagtgtctgtcatcatgtgtttagccgagtggatggatagtctgcttgtttttagtttttgctcttaacaaacactgctgcagtcagcatccttgcacagatttctttgtatacttgtattagtatttctgtaagatctgagaagtggaatttgtagggtcataggttatgtacacttaagtttttgacactcactgccaagtcatctgtcagaattctaaactaaagacatgtttggagtgtggatttatcttcagtttttctttggacaagaggaagctgtgaaagattttgctatcagaaaattttggttctttgtcttttgcacatgttctttgagtcttagtatctgtaacgtggcgctactctctctatcatgggggggcatgttttgacattaaattgacttttaagaaaaacatgtcactaacctgaagctcagccacacagtgacttttaaggttttatttagactttactgttgttctcatgagagtaggtacagactgcataaggtttagaatcccagcatatgtctgaaacgacgggactttcactgtgatttccaccagagaaattatagcagagtggctgagcatgtgctctgaggccaggccccagctctgctgctgacgagctgtgtggtcctgggcagagtggtctccgagttccagtccctcctctgtaaaatgggcatgattagagtgcccaccgcattagggatgttggggtgagtcagtgtgaccccacgtgcacagaaagtgctgcgagtggtgcatggtgagaggttgatgcaggtacttagcccttggggaacacaggtagttccttttcactgtgtttaatttgggaaaatccagatccacatcattgtagagtctgagggttagaaggaagtcattgtgtctaacataacaacagagcagtttgtgtcactgagctccagtctgtgctggattattgatattgttggtggcggtcaccattcctggaaagggactgtcccaagccacttaccttcccgaggagtctgctggttctccttgaggatagtgcttagataacagactcattaaacatttactgagtgtctgtcagggatcattcacatccacatcatcctcccggcccctccccgtgttgttcatggagggagtactggcggtccccattttcatgtatggagacttcaggtgaaagaagttaagtgaattctttgttgagtcacaaatcttgagccagtcagaatttgaacctaagatttttgactgctggttgtcacacttcccgccccacactcaactgttgtgtgaatgagccagacacattgcttaacctgagtccgagatggacaatggtataggaaagatattcggtatggagaatcagatgttaacttgtgttgctatttttgttttgttttgttttgttttgtttttgagacaaggtcttgctctgtcacccaggctagagtgcagtggcatgatcagggcttactgcagcctcaccctcgatttcctgggctcaagcaatcctcccacctcagcccccaagtagctgggcctacaggtgcgtgctaccacgcctggccaattttttaaattttagcacagatgaggtctcactatgttgcccgggctggtctcgaactcctgagctcaagggatcctcccgcctcagcctcccaaagtgctggtgttacaggcataagccaccacgcctggcctgtgttgctattatatttggcaggaacccagagtccagaacatttcatctatgatgggttagataatgtgtctagttgtttgcatgccaatttcagtagcctcagttattcaacctaggagatttttctacctctttactaccctgctgaagttgctcttcagcagaaaatctttgtggaacacattccacactttgaaatcttcgtggaacaaaagatatttgtggaaccaatctttgtggaacatattccagctttttgaatgagtgcatatccagtagtacctttaaagtaacactttgtacataacaaatactcagcaaatgtgaaactttatttgctcttacttcaaaattagtccaaaatgttggaaataaaatataagacattgatctagatatgaggtttttctccttcattctcagctgtcgaagaaatcaaagtagcatatgcacaaggttaaaaaccacatatacaaatactatagaacagcttataatgaaaaccttgcctgcctttataaaaaatgtgattatcttcttctgttaatgtcaataaaagatggtttgtcctagaaggtctataaatggtattatgttctggaggaaacctagcaaaaactttgctagtttagtacttgtctctaaattgatgttcacccatttcaatattgcacttattaatggtctttatttttctagcatagataacaattgattctttagattcatatatggaggtaattcttgctttctaaagaaaggaatatggcacattggaaccattttattcaccagtggatttacccttagagtatttttagatctgagctgatgacttgtgagagaaaaagggaacagagtaaagccatggaagccatgaacagtaagagactgccgcctggcatggtttcttcttctgcagaagatgaaactgaggagaaacaagacaacatccttcataccaggaatggtcaagataatgcaagaagaaaaaagctttcaaacaaatcagaaggcagtcaacaaacagaaagggggacattccttccctggcagttactcaaaactgaaattgcttattgtgtacaccggggcttgtacttggggaatttaataaaaatgctcattaccaagctcca

SEQ ID NO: 1508 - DNA, 912 bp, Homo Sapiens
  NM_001700
acagacctgccccgccatgacccggctgacagtcctggccctgctggctggtctgctggcgtcctcgagggccggctccagcccccttttggacatcgttggcggccggaaggcgaggccccgccagttcccgttcctggcctccattcagaatcaaggcaggcacttctgcgggggtgccctgatccatgcccgcttcgtgatgaccgcggccagctgcttccaaagccagaaccccggggttagcaccgtggtgctgggtgcctatgacctgaggcggcgggagaggcagtcccgccagacgttttccatcagcagcatgagcgagaatggctacgacccccagcagaacctgaacgacctgatgctgcttcagctggaccgtgaggccaacctcaccagcagcgtgacgatactgccactgcctctgcagaacgccacggtggaagccggcaccagatgccaggtggccggctgggggagccagcgcagtggggggcgtctctcccgttttcccaggtttgtcaacgtgactgtgacccccgaggaccagtgtcgccccaacaacgtgtgcaccggtgtgctcacccgccgcggtggcatctgcaatggggacgggggcacccccctcgtctgcgagggcctggcccacggcgtggcctccttttccctggggccctgtggccgaggccctgacttcttcacccgagtggcgctcttccgagactggatcgatggtgttctcaacaacccgggaccggggccagcctaggggggcctgtgacctcccatggagcccagccccgccctccacacctccggcgctccgcacccacctcccacggccccgcccctgcccccgctccggccagaggggccctggctgtaataaagaagccgatctctcctctg

SEQ ID NO: 1509 - DNA, 3575 bp, Homo Sapiens
  NM_001706
accatcgtcttgggcccggggagggagagccaccttcaggcccctcgagcctcgaaccggaacctccaaatccgagacgctctgcttatgaggacctcgaaatatgccggccagtgaaaaaatcttgtggctttgagggcttttggttggccaggggcagtaaaaatctcggagagctgacaccaagtcctcccctgccacgtagcagtggtaaagtccgaagctcaaattccgagaattgagctctgttgattcttagaactggggttcttagaagtggtgatgcaagaagtttctaggaaaggccggacaccaggttttgagcaaaattttggactgtgaagcaaggcattggtgaagacaaaatggcctcgccggctgacagctgtatccagttcacccgccatgccagtgatgttcttctcaaccttaatcgtctccggagtcgagacatcttgactgatgttgtcattgttgtgagccgtgagcagtttagagcccataaaacggtcctcatggcctgcagtggcctgttctatagcatctttacagaccagttgaaatgcaaccttagtgtgatcaatctagatcctgagatcaaccctgagggattctgcatcctcctggacttcatgtacacatctcggctcaatttgcgggagggcaacatcatggctgtgatggccacggctatgtacctgcagatggagcatgttgtggacacttgccggaagtttattaaggccagtgaagcagagatggtttctgccatcaagcctcctcgtgaagagttcctcaacagccggatgctgatgccccaagacatcatggcctatcggggtcgtgaggtggtggagaacaacctgccactgaggagcgcccctgggtgtgagagcagagcctttgcccccagcctgtacagtggcctgtccacaccgccagcctcttattccatgtacagccacctccctgtcagcagcctcctcttctccgatgaggagtttcgggatgtccggatgcctgtggccaaccccttccccaaggagcgggcactcccatgtgatagtgccaggccagtccctggtgagtacagccggccgactttggaggtgtcccccaatgtgtgccacagcaatatctattcacccaaggaaacaatcccagaagaggcacgaagtgatatgcactacagtgtggctgagggcctcaaacctgctgccccctcagcccgaaatgccccctacttcccttgtgacaaggccagcaaagaagaagagagaccctcctcggaagatgagattgccctgcatttcgagccccccaatgcacccctgaaccggaagggtctggttagtccacagagcccccagaaatctgactgccagcccaactcgcccacagagtcctgcagcagtaagaatgcctgcatcctccaggcttctggctcccctccagccaagagccccactgaccccaaagcctgcaactggaagaaatacaagttcatcgtgctcaacagcctcaaccagaatgccaaaccagaggggcctgagcaggctgagctgggccgcctttccccacgagcctacacggccccacctgcctgccagccacccatggagcctgagaaccttgacctccagtccccaaccaagctgagtgccagcggggaggactccaccatcccacaagccagccggctcaataacatcgttaacaggtccatgacgggctctccccgcagcagcagcgagagccactcaccactctacatgcaccccccgaagtgcacgtcctgcggctctcagtccccacagcatgcagagatgtgcctccacaccgctggccccacgttccctgaggagatgggagagacccagtctgagtactcagattctagctgtgagaacggggccttcttctgcaatgagtgtgactgccgcttctctgaggaggcctcactcaagaggcacacgctgcagacccacagtgacaaaccctacaagtgtgaccgctgccaggcctccttccgctacaagggcaacctcgccagccacaagaccgtccataccggtgagaaaccctatcgttgcaacatctgtggggcccagttcaaccggccagccaacctgaaaacccacactcgaattcactctggagagaagccctacaaatgcgaaacctgcggagccagatttgtacaggtggcccacctccgtgcccatgtgcttatccacactggtgagaagccctatccctgtgaaatctgtggcacccgtttccggcaccttcagactctgaagagccacctgcgaatccacacaggagagaaaccttaccattgtgagaagtgtaacctgcatttccgtcacaaaagccagctgcgacttcacttgcgccagaagcatggcgccatcaccaacaccaaggtgcaataccgcgtgtcagccactgacctgcctccggagctccccaaagcctgctgaagcatggagtgttgatgctttcgtctccagccccttctcagaatctacccaaaggatactgtaacactttacaatgttcatcccatgatgtagtgcctctttcatccactagtgcaaatcatagctgggggttgggggtggtgggggtcggggcctgggggactgggagccgcagcagctccccctcccccactgccataaaacattaagaaaatcatattgcttcttctcctatgtgtaaggtgaaccatgtcagcaaaaagcaaaatcattttatatgtcaaagcaggggagtatgcaaaagttctgacttgactttagtctgcaaaatgaggaatgtatatgttttgtgggaacagatgtttcttttgtatgtaaatgtgcattcttttaaaagacaagacttcagtatgttgtcaaagagagggctttaatttttttaaccaaaggtgaaggaatatatggcagagttgtaaatatataaatatatatatatataaaataaatatatataaacctaaaaaagatatattaaaaatataaaactgcgttaaaggctcgattttgtatctgcaggcagacacggatctgagaatctttattgagaaagagcacttaagagaatattttaagtattgcatctgtataagtaagaaaatattttgtctaaaatgcctcagtgtatttgtatttttttgcaagtgaaggtttacaatttacaaagtgtgtattaaaaaaaacaaaaagaacaaaaaaatctgcagaaggaaaaatgtgtaattttgttctagttttcagtttgtatatacccgtacaacgtgtcctcacggtgccttttttcacggaagttttcaatgatgggcgagcgtgcaccatccctttttgaagtgtaggcagacacagggacttgaagttgttactaactaaactctctttgggaatgtttgtctcatcccattctgcgtcatgcttgtgttataactactccggagacagggtttggctgtgtctaaactgcattaccgcgttgtaaaatatagctgtacaaatataagaataaaatgttgaaaagtcaaactggaaaaaaaa

SEQ ID NO: 1510 - DNA, 3528 bp, Homo Sapiens
  NM_001712
aaagctctgggccccagggaggaggctcagcacagagagtggaaaacagcagaggtgacagagcagccgtgctcgaagcgttcctggagcccaagctctcctccacaggtgaagacagggccagcaggagacaccatggggcacctctcagccccacttcacagagtgcgtgtaccctggcaggggcttctgctcacagcctcacttctaaccttctggaacccgcccaccactgcccagctcactactgaatccatgccattcaatgttgcagaggggaaggaggttcttctccttgtccacaatctgccccagcaactttttggctacagctggtacaaaggggaaagagtggatggcaaccgtcaaattgtaggatatgcaataggaactcaacaagctaccccagggcccgcaaacagcggtcgagagacaatataccccaatgcatccctgctgatccagaacgtcacccagaatgacacaggattctacaccctacaagtcataaagtcagatcttgtgaatgaagaagcaactggacagttccatgtatacccggagctgcccaagccctccatctccagcaacaactccaaccctgtggaggacaaggatgctgtggccttcacctgtgaacctgagactcaggacacaacctacctgtggtggataaacaatcagagcctcccggtcagtcccaggctgcagctgtccaatggcaacaggaccctcactctactcagtgtcacaaggaatgacacaggaccctatgagtgtgaaatacagaacccagtgagtgcgaaccgcagtgacccagtcaccttgaatgtcacctatggcccggacacccccaccatttccccttcagacacctattaccgtccaggggcaaacctcagcctctcctgctatgcagcctctaacccacctgcacagtactcctggcttatcaatggaacattccagcaaagcacacaagagctctttatccctaacatcactgtgaataatagtggatcctatacctgccacgccaataactcagtcactggctgcaacaggaccacagtcaagacgatcatagtcactgagctaagtccagtagtagcaaagccccaaatcaaagccagcaagaccacagtcacaggagataaggactctgtgaacctgacctgctccacaaatgacactggaatctccatccgttggttcttcaaaaaccagagtctcccgtcctcggagaggatgaagctgtcccagggcaacaccaccctcagcataaaccctgtcaagagggaggatgctgggacgtattggtgtgaggtcttcaacccaatcagtaagaaccaaagcgaccccatcatgctgaacgtaaactataatgctctaccacaagaaaatggcctctcacctggggccattgctggcattgtgattggagtagtggccctggttgctctgatagcagtagccctggcatgttttctgcatttcgggaagaccggcagggcaagcgaccagcgtgatctcacagagcacaaaccctcagtctccaaccacactcaggaccactccaatgacccacctaacaagatgaatgaagttacttattctaccctgaactttgaagcccagcaacccacacaaccaacttcagcctccccatccctaacagccacagaaataatttattcagaagtaaaaaagcagtaatgaaacctgtcctgctcactgcagtgctgatgtatttcaagtctctcaccctcatcactaggagattcctttcccctgtaggggtagaggggtggggacagaaacaactttctcctactcttccttcctaataggcatctccaggctgcctggtcactgcccctctctcagtgtcaatagatgaaagtacattgggagtctgtaggaaacccaaccttcttgtcattgaaatttggcaaagctgactttgggaaagagggaccagaacttcccctcccttccccttttcccaacctggacttgttttaaacttgcctgttcagagcactcattccttcccacccccagtcctgtcctatcactctaattcggatttgccatagccttgaggttatgtccttttccattaagtacatgtgccaggaaacaagagagagagaaagtaaaggcagtaatgccttctcctatttctccaaagccttgtgtgaactcaccaaacacaagaaaatcaaatatataaccaatagtgaaatgccacacctttgtccactgtcagggttgtctacctgtaggatcagggtctaagcaccttggtgcttagctagaataccacctaatccttctggcaagcctgtcttcagagaacccactagaagcaactaggaaaatcacttgccaaaatccaaggcaattcctgatggaaaatgcaaaagcacatatatgttttaatatctttatgggctctgttcaaggcagtgctgagagggaggggttatagcttcaggagggaaccagcttctgataaacacaatctgctaggaacttgggaaaggaatcagagagctgcccttcagcgattatttaaattattgttaaagaatacacaatttggggtattgggatttttctccttttctctgagacattccaccattttaatttttgtaactgcttatttatgtgaaaagggttatttttacttagcttagctatgtcagccaatccgattgccttaggtgaaagaaaccaccgaaatccctcaggtcccttggtcaggagcctctcaagattttttttgtcagaggctccaaatagaaaataagaaaaggttttcttcattcatggctagagctagatttaactcagtttctaggcacctcagaccaatcatcaactaccattctattccatgtttgcacctgtgcattttctgtttgcccccattcactttgtcaggaaaccttggcctctgctaaggtgtatttggtccttgagaagtgggagcaccctacagggacactatcactcatgctggtggcattgtttacagctagaaagctgcactggtgctaatgccccttggggaaatggggctgtgaggaggaggattataacttaggcctagcctcttttaacagcctctgaaatttatcttttcttctatggggtctataaatgtatcttataataaaaaggaaggacaggaggaagacaggcaaatgtacttctcacccagtcttctacacagatggaatctctttggggctaagagaaaggttttattctatattgcttacctgatctcatgttaggcctaagaggctttctccaggaggattagcttggagttctctatactcaggtacctctttcagggttttctaaccctgacacggactgtgcatactttccctcatccatgctgtgctgtgttatttaatttttcctggctaagatcatgtctgaattatgtatgaaaattattctatgtttttataataaaaataatatatcagacatcgaaaaaaaaaa

SEQ ID NO: 1511 - DNA, 2642 bp, Homo Sapiens
  NM_001715
cacacagatggcacatggcagagcccaagccctctccatgagatctgcagcgtttgtccacacggcagggcaaattaccttgtagagtcagcatggaggtttgctaactctgccggacttggtgcagaaaaaataccagccgtgctgttaaaccaaaaccccaggagaaaactttctggtgacagaagggcattgtgacccacgttgcccagggccagggacagggcagctgctcatggtccttcctcacgagttttcctggagcagagggatacccccaaacccagggagcccacaggagcttcagaagggctcggctggagggcggggcccctgttgcacttgctcactggggactggggaggctctgatcgcagaccgggggtgctgccacctctgtctgctgccggcagaaagccacaagccatgaaaactgattgagatgagaagaattcatctgggactggcttttgctttaggatggtgttggaagttgctcgttgtcgctaggagcctgctccactgtaagggtgtcaggatctgaagagctatggtgaaacaccactgaagcattgccaaggatggggctggtaagtagcaaaaagccggacaaggaaaagccgatcaaagagaaggacaagggccaatggagccccctgaaggtcagcgcccaagacaaggacgccccgccactgccgcccctggttgtcttcaaccaccttactcctccaccgcccgatgaacacctggatgaagacaagcatttcgtggtggctctgtatgactacaccgctatgaatgatcgggacctgcagatgctgaagggggagaagctacaggtcctgaagggaactggagactggtggctggccaggtcactcgtcacaggaagagaaggctatgtgcccagtaactttgtggcccgagtggagagcctggaaatggaaaggtggttctttagatcacagggtcggaaggaggctgagaggcagcttcttgctccaatcaacaaggccggctcctttcttatcagagagagtgaaaccaacaaaggtgccttctccctgtctgtgaaggatgtcaccacccagggggagctgatcaagcactataagatccgctgcctggatgaagggggctactacatctccccccggatcaccttcccctcgctccaggccctggtgcagcactattctaagaagggggatggtctatgccagaggctgaccctgccctgtgtgcgcccggccccgcagaatccctgggcccaggatgaatgggagatcccccggcagtctctcaggctggtcaggaaactcgggtctggacaattcggcgaagtctggatgggttactacaaaaacaacatgaaggtggccattaagacgctgaaggagggaaccatgtctccagaagcctttctgggtgaggccaacgtgatgaaggctctgcagcacgagcggctggtccgactctacgcagtggtcaccaaggagcccatctacattgtcaccgagtacatggccagaggatgcctgctggatttcctgaagacagatgaagggagcagattgtcactcccaaggctgattgacatgtcggcgcagattgctgaagggatggcatacattgagcgcatgaattccatccaccgcgacctgcgggcggccaacatcctggtgtctgaggccttgtgctgcaaaattgctgattttggcttggctcgaatcatcgacagtgaatacacggcccaagagggggccaagttccccatcaagtggacagccccggaagccatccacttcggggtcttcaccatcaaagcagacgtgtggtcgtttggagtcctcctgatggaagttgtcacttatgggcgggtgccatacccagggatgagcaaccccgaggtcatccgcaacctggagcgcggctaccgcatgccgcgccccgacacctgcccgcccgagctgtaccgcggcgtcatcgccgagtgctggcgcagccggcccgaggagcggcccaccttcgagttcctgcagtcggtgctggaggacttctacacggccaccgagcggcagtacgagctgcagccctagccggccgcgcccgcctgcgccccgtgcccacctctgcgcggacgaccccgacttccgtgccatcccagacgggccgcgaaggcggggtgtcgcctgtgcccttttctcagacccggaatccagtgggcagaggcagcttcgcagggggtccccggacggactccttcaccgactgcacccccgggcgagttacgcggcctctctgtgccgcttcatttgtagagggctgtaacagtgacctcgcacggtcatccggagtactaagccccagtaaggtgttcaggactggtaagcgactgtcatcaagtaaggcccccgtgctgggcaccccccgtgctggccgcgtccccgcctctgcgccctgcgtggaccccgccctgccccgctacagaagccagactgggtcccgcggacgccagcaggggcagccccagcctaggctgcgctccagcactgcggggcttttctgcaataaagtcacgagcgttcgaaaaaaaaaaaaaaaaaaaaaaaaaaaaaaaaaaaaaaaaaaaaaaaaaaaaa

SEQ ID NO: 1512 - DNA, 2530 bp, Homo Sapiens
  NM_001721
gggaatatgagtgatggtgcctcaaagcagtaactttttgcttagagcttgagagtcaaagttaaggacccacatgtatacttcggctctagcgagtctaaggatgataatatggatacaaaatctattctagaagaacttcttctcaaaagatcacagcaaaagaagaaaatgtcaccaaataattacaaagaacggctttttgttttgaccaaaacaaacctttcctactatgaatatgacaaaatgaaaaggggcagcagaaaaggatccattgaaattaagaaaatcagatgtgtggagaaagtaaatctcgaggagcagacgcctgtagagagacagtacccatttcagattgtctataaagatgggcttctctatgtctatgcatcaaatgaagagagccgaagtcagtggttgaaagcattacaaaaagagataaggggtaacccccacctgctggtcaagtaccatagtgggttcttcgtggacgggaagttcctgtgttgccagcagagctgtaaagcagccccaggatgtaccctctgggaagcatatgctaatctgcatactgcagtcaatgaagagaaacacagagttcccaccttcccagacagagtgctgaagatacctcgggcagttcctgttctcaaaatggatgcaccatcttcaagtaccactctagcccaatatgacaacgaatcaaagaaaaactatggctcccagccaccatcttcaagtaccagtctagcgcaatatgacagcaactcaaagaaaatctatggctcccagccaaacttcaacatgcagtatattccaagggaagacttccctgactggtggcaagtaagaaaactgaaaagtagcagcagcagtgaagatgttgcaagcagtaaccaaaaagaaagaaatgtgaatcacaccacctcaaagatttcatgggaattccctgagtcaagttcatctgaagaagaggaaaacctggatgattatgactggtttgctggtaacatctccagatcacaatctgaacagttactcagacaaaagggaaaagaaggagcatttatggttagaaattcgagccaagtgggaatgtacacagtgtccttatttagtaaggctgtgaatgataaaaaaggaactgtcaaacattaccacgtgcatacaaatgctgagaacaaattatacctggcagaaaactactgttttgattccattccaaagcttattcattatcatcaacacaattcagcaggcatgatcacacggctccgccaccctgtgtcaacaaaggccaacaaggtccccgactctgtgtccctgggaaatggaatctgggaactgaaaagagaagagattaccttgttgaaggagctgggaagtggccagtttggagtggtccagctgggcaagtggaaggggcagtatgatgttgctgttaagatgatcaaggagggctccatgtcagaagatgaattctttcaggaggcccagactatgatgaaactcagccatcccaagctggttaaattctatggagtgtgttcaaaggaataccccatatacatagtgactgaatatataagcaatggctgcttgctgaattacctgaggagtcacggaaaaggacttgaaccttcccagctcttagaaatgtgctacgatgtctgtgaaggcatggccttcttggagagtcaccaattcatacaccgggacttggctgctcgtaactgcttggtggacagagatctctgtgtgaaagtatctgactttggaatgacaaggtatgttcttgatgaccagtatgtcagttcagtcggaacaaagtttccagtcaagtggtcagctccagaggtgtttcattacttcaaatacagcagcaagtcagacgtatgggcatttgggatcctgatgtgggaggtgttcagcctggggaagcagccctatgacttgtatgacaactcccaggtggttctgaaggtctcccagggccacaggctttaccggccccacctggcatcggacaccatctaccagatcatgtacagctgctggcacgagcttccagaaaagcgtcccacatttcagcaactcctgtcttccattgaaccacttcgggaaaaagacaagcattgaagaagaaattaggagtgctgataagaatgaatatagatgctggccagcattttcattcattttaaggaaagtagcaaggcataatgtaatttagctagtttttaatagtgttctctgtattgtctattatttagaaatgaacaaggcaggaaacaaaagattcccttgaaatttagatcaaattagtaattttgtttatgctgctcctgatataacactttccagcctatagcagaagcacattttcagactgcaatatagagactgtgttcatgtgtaaagactgagcagaactgaaaaattacttattggatattcattcttttctttatattgtcattgtcacaacaattaaatatactaccaagtacagaaatgtggaaaaaaaaaa

SEQ ID NO: 1513 - DNA, 1946 bp, Homo Sapiens
  NM_001722
gatggcggcgcccaggccctgccacgcagacttccgcccggcgcggagaccgaaggctggcggctggtcgcgttgcaggcaacatgtcggaaggaaacgccgccggcgagcccagcacgccgggagggccccgacctctcctgactggggcccgggggctcatcgggcggcggccggcgcctcccctcacccccggccgccttccctccatccgttccagggacctcaccctcgggggagtcaagaagaaaaccttcaccccaaatatcatcagtcggaagatcaaggaagagcccaaggaagaagtaactgtcaagaaggagaagcgtgaaagggacagagaccgacaacgagaggggcatggacgagggcgaggccgtccagaagtgatccagtctcactccatctttgagcagggcccagctgaaatgatgaagaaaaaagggaactgggataagacagtggatgtgtcagacatgggaccttctcatatcatcaacatcaaaaaagagaagagagagacagacgaagaaactaaacagatcttgcgtatgctggagaaggacgatttcctcgatgaccccggcctgaggaacgacactcgaaatatgcctgtgcagctgccgctggctcactcaggatggctttttaaggaagaaaatgacgaaccagatgttaaaccttggctggctggccccaaggaagaggacatggaggtggacatacctgctgtgaaagtgaaagaggagccacgagatgaggaggaagaggccaagatgaaggctcctcccaaagcagccaggaagactccaggcctcccgaaggatgtatctgtggcagagctgctgagggagctgagcctcaccaaggaagaggaactgctgtttctgcagctgccagacaccctccctggccagccacccacccaggacatcaagcctatcaagacagaggtgcagggcgaggacggacaggtggtgctcatcaagcaggagaaagaccgagaagccaaattggcagagaatgcttgtaccctggctgacctgacagagggtcaggttggcaagctactcatccgcaagtctggaagggtgcaactcctcttgggcaaggtgactctggacgtgaccatgggaactgcctgctccttcctgcaggagctggtgtccgtgggccttggagacagtaggacaggggagatgacagtcctgggacacgtgaagcacaaacttgtatgttcccctgattttgaatccctcttggatcacaaacaccggtaaaatgagcaggtggaggaggacggcgcctgtgcccacggctgctgcctgctccagacattttgttcttgaatctgtgagacccagaaggggcccactgagcccactcactccagcctttggcaaccattgttccaggtcccccagggcttcctcccacagcagctgtgaatggcacagtgaccttcctgcagcgtggagatggcacatccttgctgctggggacttggccctgctatttatttttgtatttatgtcttaatctcttccactgatgcatcctccaagggtagatggggagggtctgtgtgaaggggccggcttctcttggtgcctgctgggttgcaggggcaggaagcgtgtggactgcagcttctgctggtgctccccccgtcctcctggaggcagtataggagagagagcaaggattgagtctgagacttaagcactcggtcccagcttgccagttcctggttctgtgtccttggacaaactacctaacctttctgagcctcctatacctcatccgacacaaatggggatgatacctacctccagggttggcgtgaggattcatgggctattatagatgaaaactgcacaaggccagaaccagcaggcactcaataaacgttcatgtcctttttctctaaaaaaaaaaaaaaaaaa

SEQ ID NO: 1514 - DNA, 1800 bp, Homo Sapiens
  NM_001724
ccaataggcagagccctaggacctgcccacgtctggttcaggggctagaaaagagcgtcgatgccggcggcagtgatgagtcctaggaggcgctggctctttggcggctcggaggagcggctgctgctgctgctgctgctgctggtggcccctttgcagatgtattgctgtccttgaatattagcccatttgaaaacgcctgggaagttcagccatcagtatgtccaagtacaaacttattatgttaagacatggagagggtgcttggaataaggagaaccgtttttgtagctgggtggatcagaaactcaacagcgaaggaatggaggaagctcggaactgtgggaagcaactcaaagcgttaaactttgagtttgatcttgtattcacatctgtccttaatcggtccattcacacagcctggctgatcctggaagagctaggccaggaatgggtgcctgtggaaagctcctggcgtctaaatgagcgtcactatggggccttgatcggtctcaacagggagcagatggctttgaatcatggtgaagaacaagtgaggctctggagaagaagctacaatgtaaccccgcctcccattgaggagtctcatccttactaccaagaaatctacaacgaccggaggtataaagtatgcgatgtgcccttggatcaactgccacggtcggaaagcttaaaggatgttctggagagactccttccctattggaatgaaaggattgctcccgaagtattacgtggcaaaaccattctgatatctgctcatggaaatagcagtagggcactcctaaaacacctggaaggtatctcagatgaagacatcatcaacattactcttcctactggagtccccattcttctggaattggatgaaaacctgcgtgctgttgggcctcatcagttcctgggtgaccaagaggcgatccaagcagccattaagaaagtagaagatcaaggaaaagtgaaacaagctaaaaaatagtctttctcaactgttggctaagaagaaatgcaaaagaagtggcataggagtgtgttatgggtgctgaactctctctctttttccccgattttccagagctaggctgtggagtagagtttgtataggtaactaggtaacttattgtggcccagataaggctttaggatgcctcagtgcttatgtcatagccttatgagttagctttcttgctagccccctagtcggtcaccaaactagtaactagtggggcttaatgaaggtcataagtttctgagatgggagagcaacaagtagagatgaagttaaaggtatttatcattcaagaaatcattattgagtcaccattgacaggcactattctaatcagtagttcactttaatatttaataagattttctgggataacagtaagggatattagataatataccgtatgtatttattactagtcttttcctctaggaaaagggatactttgataattaaggccagaggcccattagttgagaaagtcacagatatatttctccaagaaagccaacaaccaccaccacaatgacagaaatgacaacaaggccctttaacttgtcttctagtttagagacatccttcatttgacatttagtagaattcctctttggccacaagaataagcagcaaataaacaactatggctgttgaggttctcattttggtttgttttaattttttgaactttgggtacctgtaattagtttaaaaataaagttcctgataataaagtgactgaaaatggcatccccaaaaaaaaaaaaaaaaaa

SEQ ID NO: 1515 - DNA, 1901 bp, Homo Sapiens
  NM_001725
ccgactcttttatagctccctggttcaacctcaaggccttgaggttttggcagctctggaggatgagagagaacatggccaggggcccttgcaacgcgccgagatgggcgtccctgatggtgctggtcgccataggcaccgccgtgacagcggccgtcaaccctggcgtcgtggtcaggatctcccagaagggcctggactacgccagccagcaggggacggccgctctgcagaaggagctgaagaggatcaagattcctgactactcagacagctttaagatcaagcatcttgggaaggggcattatagcttctacagcatggacatccgtgaattccagcttcccagttcccagataagcatggtgcccaatgtgggccttaagttctccatcagcaacgccaatatcaagatcagcgggaaatggaaggcacaaaagagattcttaaaaatgagcggcaattttgacctgagcatagaaggcatgtccatttcggctgatctgaagctgggcagtaaccccacgtcaggcaagcccaccatcacctgctccagctgcagcagccacatcaacagtgtccacgtgcacatctcaaagagcaaagtggggtggctgatccaactcttccacaaaaaaattgagtctgcgcttcgaaacaagatgaacagccaggtctgcgagaaagtgaccaattctgtatcctccgagctgcaaccttatttccagactctgccagtaatgaccaaaatagattctgtggctggaatcaactatggtctggtggcacctccagcaaccacggctgagaccctggatgtacagatgaagggggagttttacagtgagaaccaccacaatccacctccctttgctccaccagtgatggagtttcccgctgcccatgaccgcatggtatacctgggcctctcagactacttcttcaacacagccgggcttgtataccaagaggctggggtcttgaagatgacccttagagatgacatgattccaaaggagtccaaatttcgactgacaaccaagttctttggaaccttcctacctgaggtggccaagaagtttcccaacatgaagatacagatccatgtctcagcctccaccccgccacacctgtctgtgcagcccaccggccttaccttctaccctgccgtggatgtccaggcctttgccgtcctccccaactcctccctggcttccctcttcctgattggcatgcacacaactggttccatggaggtcagcgccgagtccaacaggcttgttggagagctcaagctggataggctgctcctggaactgaagcactcaaatattggccccttcccggttgaattgctgcaggatatcatgaactacattgtacccattcttgtgctgcccagggttaacgagaaactacagaaaggcttccctctcccgacgccggccagagtccagctctacaacgtagtgcttcagcctcaccagaacttcctgctgttcggtgcagacgttgtctataaatgaaggcaccaggggtgccgggggctgtcagccacacctgttcctgatgggctgtggggcaccggctgcctttccccagggaatcctctccagatcttaaccaagagccccttgcaaacttcttcgactcagattcagaaatgatctaaacacgaggaaacattattcattggaaaagtgcatggtgtgtattttagggattatgagcttctttcaagggctaaggctgcagagatatttcctccaggaatcgtgtttcaattgtaaccaagaaatttccatttgtgcttcatgaaaaaaaacttctggtttttttcatgtgaaaaaaaaaaaaaaaaaaaaaaaaaaaaaaaaaaaaaaaaaaaaaaaaaaaaaaaa

SEQ ID NO: 1516 - DNA, 2024 bp, Homo Sapiens
  NM_001728
gtgcgcgcgcccggtccgcgcctccgccgctttttatagcggccgcgggcggcggcggcagcggttggaggttgtaggaccggcgaggaataggaatcatggcggctgcgctgttcgtgctgctgggattcgcgctgctgggcacccacggagcctccggggctgccggcttcgtccaggcgccgctgtcccagcagaggtgggtggggggcagtgtggagctgcactgcgaggccgtgggcagcccggtgcccgagatccagtggtggtttgaagggcagggtcccaacgacacctgctcccagctctgggacggcgcccggctggaccgcgtccacatccacgccacctaccaccagcacgcggccagcaccatctccatcgacacgctcgtggaggaggacacgggcacttacgagtgccgggccagcaacgacccggatcgcaaccacctgacccgggcgcccagggtcaagtgggtccgcgcccaggcagtcgtgctagtcctggaacccggcacagtcttcactaccgtagaagaccttggctccaagatactcctcacctgctccttgaatgacagcgccacagaggtcacagggcaccgctggctgaaggggggcgtggtgctgaaggaggacgcgctgcccggccagaaaacggagttcaaggtggactccgacgaccagtggggagagtactcctgcgtcttcctccccgagcccatgggcacggccaacatccagctccacgggcctcccagagtgaaggctgtgaagtcgtcagaacacatcaacgagggggagacggccatgctggtctgcaagtcagagtccgtgccacctgtcactgactgggcctggtacaagatcactgactctgaggacaaggccctcatgaacggctccgagagcaggttcttcgtgagttcctcgcagggccggtcagagctacacattgagaacctgaacatggaggccgaccccggccagtaccggtgcaacggcaccagctccaagggctccgaccaggccatcatcacgctccgcgtgcgcagccacctggccgccctctggcccttcctgggcatcgtggctgaggtgctggtgctggtcaccatcatcttcatctacgagaagcgccggaagcccgaggacgtcctggatgatgacgacgccggctctgcacccctgaagagcagcgggcagcaccagaatgacaaaggcaagaacgtccgccagaggaactcttcctgaggcaggtggcccgaggacgctccctgctccacgtctgcgccgccgccggagtccactcccagtgcttgcaagattccaagttctcacctcttaaagaaaacccaccccgtagattcccatcatacacttccttcttttttaaaaaagttgggttttctccattcaggattctgttccttaggtttttttccttctgaagtgtttcacgagagcccgggagctgctgccctgcggccccgtctgtggctttcagcctctgggtctgagtcatggccgggtgggcggcacagccttctccactggccggagtcagtgccaggtccttgccctttgtggaaagtcacaggtcacacgaggggccccgtgtcctgcctgtctgaagccaatgctgtctggttgcgccatttttgtgcttttatgtttaattttatgagggccacgggtctgtgttcgactcagcctcagggacgactctgacctcttggccacagaggactcacttgcccacaccgagggcgaccccgtcacagcctcaagtcactcccaagccccctccttgtctgtgcatccgggggcagctctggagggggtttgctggggaactggcgccatcgccgggactccagaaccgcagaagcctccccagctcacccctggaggacggccggctctctatagcaccagggctcacgtgggaacccccctcccacccaccgccacaataaagatcgcccccacctccaccctcaaaaaaaaaaaaaaaaaaaa

SEQ ID NO: 1517 - DNA, 4704 bp, Homo Sapiens
  NM_001731
acttccttttcgtggcactataaagggtgctgcacggcgcttgcatctcttcgcctctcggagctggaaatgcagctattgagatcttcgaatgctgcggagctggaggcggaggcagctggggaggtccgagcgatgtgaccaggccgccatcgctcgtctcttcctctctcctgccgcctcctgtctcgaaaataacttttttagtctaaagaaagaaagacaaaagtagtcgtccgcccctcacgccctctcttcctctcagccttccgcccggtgaggaagcccggggtggctgctccgccgtcggggccgcgccgccgagccccagccgccccgggccgcccccgcacgccgcccccatgcatcccttctacacccgggccgccaccatgataggcgagatcgccgccgccgtgtccttcatctccaagtttctccgcaccaaggggctcacgagcgagcgacagctgcagaccttcagccagagcctgcaggagctgctggcagaacattataaacatcactggttcccagaaaagccatgcaagggatcgggttaccgttgtattcgcatcaaccataaaatggatcctctgattggacaggcagcacagcggattggactgagcagtcaggagctgttcaggcttctcccaagtgaactcacactctgggttgacccctatgaagtgtcctacagaattggagaggatggctccatctgtgtgctgtatgaagcctcaccagcaggaggtagcactcaaaacagcaccaacgtgcaaatggtagacagccgaatcagctgtaaggaggaacttctcttgggcagaacgagcccttccaaaaactacaatatgatgactgtatcaggttaagatatagtctgtggatggatcatctgatgatgatggataaatttgatttttgctttgggtgggctcctcttggggatggattatggaatttaaaccatgtcacagctgtgaagatctggcacaagatagaatggtaaaaaaaaaaaaaattttaagtgacagtgccatagtttggacagtacctttcaatgattaattttaatagcctgtgagtccaagtaaatgatcactttatttgctagggagggaagtcctagggtggtttcagtttctcccagacatacctaaatttttacatcaatccttttaaagaaaatctgtatttcaaagaatctttctctgcagtaaatctcgcaggggaatttgcactattacacttgaaagttgttattgttaaccttttcggcagcttttaataggaaagttaaacgttttaaacatggtagtactggaaattttacaagacttttacctagcacttaaatatgtataaatgtacataaagacaaactagtaagcatgacctggggaaatggtcagaccttgtattgtgtttttggccttgaaagtagcaagtgaccagaatctgccatggcaacaggctttaaaaaagacccttaaaaagacactgtctcaactgtggtgttagcaccagccagctctctgtacatttgctagcttgtagttttctaagactgagtaaacttcttatttttagaaagtggaggtctggtttgtaactttccttgtacttaattgggtaaaagtcttttccacaaaccaccatctattttgtgaactttgttagtcatcttttatttggtaaattatgaactggtgtaaatttgtacagttcatgtatattgattgtggcaaagttgtacagatttctatattttggatgagaaatttttcttctctctataataaatcgtttcttatcttggcattttaatcaatctcttgtcatgattatagaggtttagctaaaagtattttttcttagaagacaggttctataaactgaatctctgttgcacactggtcatgctggaaaaacatttgatgaggaatgaagatgctctgtatatacatgtttaggttttacaggaaacacaggagtagcatgttttaaaaatttctaaagtcaaaacatggacacattcacaggctaatgatctcatgaaataaggataagagaccacggtagcatctaccaaaaatgtgatactcaaaggattacatttcattgcttccctgttgaagtgaagatataaatgttccattctgacccacctttgaaaaacaattactttgccccatggattctttgttcaattagaaatttccccggggcaggtgacccatagtcttaaagaacaggctaaacaccacagagagattggttgctttttgcttttcatcacctgcaagatgtacataaaaatcacataagctggaattcaacaaaaggtatgtttatgaacttttattctcaaaagttgaaatgctgactttctcgattcctcattttcagacttttatttcagataaatactaaaaacctaagtgaaccttgataatgctgtagtgtagattacttcactaccccatataatagaaggacttgctgtttagttgtagaggataacagcgtttttcagtggaaattgaaagtggaaaaattgaattttgctctacacagttaacatatagtggcctttttttggtatatatgtaaacatgttgacactggaaatacgcagtctgaaataaaattagtaattacttgaaattagtaatctcaaataacttttaagaagttatttctacacccaggaataaattattctgattttgtagacaacacaggaataggccactgaatatgcaggtatttagagtacaaatgtctgtggatattattggcacaccattctcgagagttagaattcgtagacccgcaacacatggactacccttgccaattgttatggttttatttttaaacctattctgtgaaaaagctcctcggtatttcaaacttgaattacaataaaaacaccaggtagggttgtttttaaatgggtctcaccccagtgctgactactgttgtttaccaactacatttcatctggtaactccattgaaactaagtacctcaaccattttttttttttatcataaagccttttttcaaatggaaagttgtttttgaagatcttgacatcagactttttcaatctttgaaaatgatggaaacagttaataaaaatgtttattttagaattcaggtgatgtctggcttgtgaggagctgtttataagtttgtctttgaaaaaggcttgcacacatcactctgagaccagctgtttcctgtgactttaaccttaccttccccagacaattgagctgaacctgtatctgcggtacagtagctgtttgtgatgtatttcttgttcactgtttctggggaatgttttgaaatattttattataaatccttttaagataggatgactactttcaaaattattgttgcctttggcaccaggaattcatagttgtgattggcagtaagtttgaggagtgttactttctaagttttaacaggtagttttgaaattatttccttttttccaaatttaagtagtgcctccctctgtaatgttgaaacaaggcttcaagtggattgtatagcaagagttaccctggttcatgcaggataatgcggctgttatctttgtcatctggaatgggaatctcatgtctttatccttatgtgcaatatttctataataatagactggaaaggccaccagaaagtggctttcaggtacattgcacaaatagtttccttaagtcattataactcacacattgcaagtaattaattttgttttgtataggtgttgcagtttatgaaattggccttcaagttaaaaggaaggaagccgtattcccgatggctagtgtttaatgactacaggtttccaggctccctttaatcttgggagcaaataaatctactattggacttctccctgcgtgacttttaacatttctgatactctctcttcttcctctttacagaagagaggtatgataactgaagttgtactttgcatattgaagtttaaagatacttcctctccccttttcacccctatttcaaatgatgtgataaaatcctcttgataggctatatggagaacatttgtcaatagttttatctatgcatggaagtcttcaaaaagtatatcttggattgtctaaaactgaatagatttcttatttatctgaaggtatacagactgccaacattttagacttatctctcagtctctgccactgaacttttatatatggctgctatcaaaatataaccggtttattttcatatttggaactaatataacagtatcacaaaatcttttacagtaagatagtttgtaataccagccgacccagctgcttaactgagtccttaaatcatttaatatatgggactgtaaatagagaaatctgtacattatgagatctgatttctggttatgcctatagatctttattttctttatccctatagatcattttcttctgatgttaagtgttatatttttgaaatgctcctaaacaagtaagccttagattgtattaatcctgaggattgataccatttcctcaacactttgtggagtatgattgacaccagtttttttttgactgcaggtttaacttggcttatcacttttcgtattgctcagtatgtccaagataggaataaaaaaatgtagttcaaaaaaaaaaaaaaaaaaaaaaaaaa

SEQ ID NO: 1518 - DNA, 2342 bp, Homo Sapiens
  NM_001736
cttgggcaggagggaccttcgatcctcggggagcccaggagaccagaacatgaactccttcaattataccacccctgattatgggcactatgatgacaaggataccctggacctcaacacccctgtggataaaacttctaacacgctgcgtgttccagacatcctggccttggtcatctttgcagtcgtcttcctggtgggagtgctgggcaatgccctggtggtctgggtgacggcattcgaggccaagcggaccatcaatgccatctggttcctcaacttggcggtagccgacttcctctcctgcctggcgctgcccatcttgttcacgtccattgtacagcatcaccactggccctttggcggggccgcctgcagcatcctgccctccctcatcctgctcaacatgtacgccagcatcctgctcctggccaccatcagcgccgaccgctttctgctggtgtttaaacccatctggtgccagaacttccgaggggccggcttggcctggatcgcctgtgccgtggcttggggtttagccctgctgctgaccataccctccttcctgtaccgggtggtccgggaggagtactttccaccaaaggtgttgtgtggcgtggactacagccacgacaaacggcgggagcgagccgtggccatcgtccggctggtcctgggcttcctgtggcctctactcacgctcacgatttgttacactttcatcctgctccggacgtggagccgcagggccacgcggtccaccaagacactcaaggtggtggtggcagtggtggccagtttctttatcttctggttgccctaccaggtgacggggataatgatgtccttcctggagccatcgtcacccaccttcctgctgctgaataagctggactccctgtgtgtctcctttgcctacatcaactgctgcatcaaccccatcatctacgtggtggccggccagggcttccagggccgactgcggaaatccctccccagcctcctccggaacgtgttgactgaagagtccgtggttagggagagcaagtcattcacgcgctccacagtggacactatggcccagaagacccaggcagtgtaggcgacagcctcatgggccactgtggcccgatgtccccttccttcccggccattctccctcttgttttcacttcacttttcgtgggatggtgttaccttagctaactaactctcctccatgttgcctgtctttcccagacttgtccctccttttccagcgggactcttctcatccttcctcatttgcaaggtgaacacttccttctagggagcaccctcccaccccccaccccccccacacacaccatctttccatcccaggcttttgaaaaacaaacagaaacccgtgtatctgggatatttccatatggcaataggtgtgaacagggaactcagaatacagacaagtagaaagattctcgcttaaaaaaaatgtatttattttatggcaagttggaaaatatgtaactggaatctcaaaagttctttgggacaaaacagaagtccatggagttatctaagctcttgtaagtgagttaatttaaaaaagaaaattaggctgagagcagtggctcacgcctgtaatcccagaactttgggaggctaaggtgggtggatcacctgaggtcaagagttccagaccaggctggccagcatggtgaaaccccgtctgtactaaaaatacaaaaaattaactgggcatggtagtgggtgcctgtaatcccagctacttgggaggctgaggtgggagaattgctcgaacttggaggtggaggttgtggtgagccatgatcgcaccactgcactctagcctgggtgaccgagggaggctctgtctcaaaagcaaagcaaaaacaaaaacaaaaacacctaaaaaacctgcagttttgtttgtactttgtttttaaattatgctttctattttgagatcattgcaaactcaacacaattgtaagtaatgatacagagggatcttgtgtacccttcacccagcctcccccaatggcaacatcttgcaaaactacaatgtagtctcataaccaggatattgacattgatacagtgaagatacaggacattctcatcaccacagggatccccaggatgcccacttccctccacccccacaccccagccgtgtccctaacccctggcaaccaggaatccactctccatttctataatgttgtcatttcaagaatgttattcaatggaatcatatagtatgtaacctgttttgagcttaaaaaaaaagtatacatgactttaatgaggaaaataaaaatgaatattgaaatgtt

SEQ ID NO: 1519 - DNA, 1278 bp, Homo Sapiens
  NM_001738
gtggtacccagtcctcaggtgcaaccccctgcgtggtcctctgtggcagccttctctcattcagagctgttttccacagaggtagtgaaaagaactggattttcaagttcactttgcaagagaaaaagaaaactcagtagaagataatggcaagtccagactggggatatgatgacaaaaatggtcctgaacaatggagcaagctgtatcccattgccaatggaaataaccagtcccctgttgatattaaaaccagtgaaaccaaacatgacacctctctgaaacctattagtgtctcctacaacccagccacagccaaagaaattatcaatgtggggcattccttccatgtaaattttgaggacaacgataaccgatcagtgctgaaaggtggtcctttctctgacagctacaggctctttcagttccattttcactggggcagtacaaatgagcatggttcagaacatacagtggatggagtcaaatattctgccgagcttcacgtagctcactggaattctgcaaagtactccagccttgctgaagctgcctcaaaggctgatggtttggcagttattggtgttttgatgaaggttggtgaggccaacccaaagctgcagaaagtacttgatgccctccaagcaattaaaaccaagggcaaacgagccccattcacaaattttgacccctctactctccttccttcatccctggatttctggacctaccctggctctctgactcatcctcctctttatgagagtgtaacttggatcatctgtaaggagagcatcagtgtcagctcagagcagctggcacaattccgcagccttctatcaaatgttgaaggtgataacgctgtccccatgcagcacaacaaccgcccaacccaacctctgaagggcagaacagtgagagcttcattttgatgattctgagaagaaacttgtccttcctcaagaacacagccctgcttctgacataatccagtaaaataataatttttaagaaataaatttatttcaatattagcaagacagcatgccttcaaatcaatctgtaaaactaagaaacttaaattttagttcttactgcttaattcaaataataattagtaagctagcaaatagtaatctgtaagcataagcttatgcttaaattcaagtttagtttgaggaattctttaaaattacaactaagtgatttgtatgtctatttttttcagtttatttgaaccaataaaataattttatctctttcaaaaaaaaaaaaaaa

SEQ ID NO: 1520 - DNA, 2272 bp, Homo Sapiens
  NM_001744
agtctccctccagcgggcggcgactccgggttccccctcgcgccctctcgcagaggctcgcccccttccccgcccaccgtccctgcgagcgcgggcggcggcggtgggcgtgtgcgcgcgtgaaggacgccgcctctctctcgctcctgcgttcgcaggcggcggctggcggccggcttctcgctcgggcagcggcggcggcggcggcggcggcttccggagtcccgctgcgaagatgctcaaagtcacggtgccctcctgctccgcctcgtcctgctcttcggtcaccgccagtgcggccccggggaccgcgagcctcgtcccggattactggatcgacggctccaacagggatgcgctgagcgatttcttcgaggtggagtcggagctgggacggggtgctacatccattgtgtacagatgcaaacagaaggggacccagaagccttatgctctcaaagtgttaaagaaaacagtggacaaaaaaatcgtaagaactgagataggagttcttcttcgcctctcacatccaaacattataaaacttaaagagatatttgaaacccctacagaaatcagtctggtcctagaactcgtcacaggaggagaactgtttgataggattgtggaaaagggatattacagtgagcgagatgctgcagatgccgttaaacaaatcctggaggcagttgcttatctacatgaaaatgggattgtccatcgtgatctcaaaccagagaatcttctttatgcaactccagccccagatgcaccactcaaaatcgctgattttggactctctaaaattgtggaacatcaagtgctcatgaagacagtatgtggaaccccagggtactgcgcacctgaaattcttagaggttgtgcctatggacctgaggtggacatgtggtctgtaggaataatcacctacatcttactttgtggatttgaaccattctatgatgaaagaggcgatcagttcatgttcaggagaattctgaattgtgaatattactttatctccccctggtgggatgaagtatctctaaatgccaaggacttggtcagaaaattaattgttttggatccaaagaaacggctgactacatttcaagctctccagcatccgtgggtcacaggtaaagcagccaattttgtacacatggataccgctcaaaagaagctccaagaattcaatgcccggcgtaagcttaaggcagcggtgaaggctgtggtggcctcttcccgcctgggaagtgccagcagcagccatggcagcatccaggagagccacaaggctagccgagacccttctccaatccaagatggcaacgaggacatgaaagctattccagaaggagagaaaattcaaggcgatggggcccaagccgcagttaagggggcacaggctgagctgatgaaggtgcaagccttagagaaagttaaaggtgcagatataaatgctgaagaggcccccaaaatggtgcccaaggcagtggaggatgggataaaggtggctgacctggaactagaggagggcctagcagaggagaagctgaagactgtggaggaggcagcagctcccagagaagggcaaggaagctctgctgtgggttttgaagttccacagcaagatgtgatcctgccagagtactaaacagcttccttcagatctggaagccaaacaccggcattttatgtactttgtccttcagcaagaaaggtgtggaagcatgatatgtactatagtgattctgtttttgaggtgcaaaaaacatacatatataccagttggtaattctaacttcaatgcatgtgactgctttatgaaaataatagtgtcttctatggcatgtaatggatacctaataccgatgagttaaatcttgcaagttaacacaacgtaacacttaaaagcatacattttcagcaaccagtggcacatatttgaagtgaatagtagcaaattgtttttgctttgaaaatctagccatcctacatcctttggatttcttcacaaggcagtaattcctttgaactactgcttagctaatactaggtagtgctaaaagacatgttcccataacttttacaacattttactttttatcattgatgtgttcaaactgtttacaaggagatgcttatagatgatagttgtacatatgtgcaaaaaaaaatccacttgcaatggtaagaaattgaagtatccttaaaggccatgaagccatatgtccctaaaaaaaaaaaaaaaaaaaaaaaaaaaaaaaaa

SEQ ID NO: 1521 - DNA, 1460 bp, Homo Sapiens
  NM_001747
gacggcctggcatacccactgcccaccccagtgactgctcttctgcttcaggcctgctggcctcccagcactgcctgcccctccctgtcgggggacatcgcctccacaccggctggggaaggagcccaggggtggggctggtgggtggggctggtggttggggcagccagagaagtaagagggaagtgagaagccgggtggggcaggctggaaggaagacgaacctacgaagcagagatctgaagacagcatgtacacagccattccccagagtggctctccattcccaggctcagtgcaggatccaggcctgcatgtgtggcgggtggagaagctgaagccggtgcctgtggcgcaagagaaccagggcgtcttcttctcgggggactcctacctagtgctgcacaatggcccagaagaggtttcccatctgcacctgtggataggccagcagtcatcccgggatgagcagggggcctgtgccgtgctggctgtgcacctcaacacgctgctgggagagcggcctgtgcagcaccgcgaggtgcagggcaatgagtctgacctcttcatgagctacttcccacggggcctcaagtaccaggaaggtggtgtggagtcagcatttcacaagacctccacaggagccccagctgccatcaagaaactctaccaggtgaaggggaagaagaacatccgtgccaccgagcgggcactgaactgggacagcttcaacactggggactgcttcatcctggacctgggccagaacatcttcgcctggtgtggtggaaagtccaacatcctggaacgcaacaaggcgagggacctggccctggccatccgggacagtgagcgacagggcaaggcccaggtggagattgtcactgatggggaggagcctgctgagatgatccaggtcctgggccccaagcctgctctgaaggagggcaaccctgaggaagacctcacagctgacaaggcaaatgcccaggccgcagctctgtataaggtctctgatgccactggacagatgaacctgaccaaggtggctgactccagcccatttgcccttgaactgctgatatctgatgactgctttgtgctggacaacgggctctgtggcaagatctatatctggaaggggcgaaaagcgaatgagaaggagcggcaggcagccctgcaggtggccgagggcttcatctcgcgcatgcagtacgccccgaacactcaggtggagattctgcctcagggccatgagagtcccatcttcaagcaatttttcaaggactggaaatgagggtgggcgtcttcctgccccatgctcccctgccccccaccacctgcctgcttgcttctctggctgcctggtcagtgcagaggtgccccctgcagatgttcaataaaggagacaagtgctttcccagctcttttcctgcaccaccaaaaaaaaaaaaaaaaaa

SEQ ID NO: 1522 - DNA, 3492 bp, Homo Sapiens
  NM_001748
caggccgcaggatggcctggtcccgggccgggagcccagcaggccgggagcggctgaggccacaccccgcgggccgggccgcttccctccggtgaatcatcgctcgcagcggcggcgcccgcagtggccgcagcagcgcgccgggccctggccgcgccccagccgagcgcagcgcggagtcgccccgacctttctctgcgcagtacggccgccgggaccgcagcatggcgggcatcgcggccaagctggcgaaggaccgggaggcggccgaggggctgggctcccacgagagggccatcaagtacctcaaccaggactacgaggcgctgcggaacgagtgcctggaggccgggacgctcttccaggacccgtccttcccggccatcccctcggccctgggcttcaaggagttggggccctactccagcaaaacccggggcatcgagtggaagcgccccacggagatctgcgctgacccccagtttatcattggaggagccacccgcacagacatctgccaaggagccctgggtgactgctggctgctggcagccattgcctccctcaccttgaatgaagaaatcctggctcgagtcgtccccctaaaccagagcttccaggaaaactatgcagggatctttcacttccagttctggcaatacggcgagtgggtggaggtggtggtggatgacaggctgcccaccaaggacggggagctgctctttgtgcattcagccgaagggagcgagttctggagcgccctgctggagaaggcatacgccaagatcaacggatgctatgaagcgctatcagggggtgccaccactgagggcttcgaagacttcaccggaggcattgctgagtggtatgagttgaagaagccccctcccaacctgttcaagatcatccagaaagctctgcaaaaaggctctctccttggctgctccatcgacatcaccagcgccgcggactcggaggccatcacgtttcagaagctggtgaaggggcacgcgtactcggtcaccggagccgaggaggttgaaagtaacggaagcctacagaaactgatccgcatccgaaatccctggggagaagtggagtggacagggcggtggaatgacaactgcccaagctggaacactatagacccagaggagagggaaaggctgaccagacggcatgaagatggagaattctggatgtctttcagtgacttcctgaggcactattcccgcctggagatctgtaacctgaccccagacactctcaccagcgatacctacaagaagtggaaactcaccaaaatggatgggaactggaggcggggctccaccgcgggaggttgcaggaactacccgaacacattctggatgaaccctcagtacctgatcaagctggaggaggaggatgaggacgaggaggatggggagagcggctgcaccttcctggtggggctcattcagaagcaccgacggcggcagaggaagatgggcgaggacatgcacaccatcggctttggcatctatgaggttccagaggagttaagtgggcagaccaacatccacctcagcaaaaacttcttcctgacgaatcgcgccagggagcgctcagacaccttcatcaacctccgggaggtgctcaaccgcttcaagctgccgccaggagagtacattctcgtgccttccaccttcgaacccaacaaggatggggatttctgcatccgggtcttttctgaaaagaaagctgactaccaagctgtcgatgatgaaatcgaggccaatcttgaagagttcgacatcagcgaggatgacattgatgatggattcaggagactgtttgcccagttggcaggagaggatgcggagatctctgcctttgagctgcagaccatcctgagaagggttctagcaaagcgccaagatatcaagtcagatggcttcagcatcgagacatgcaaaattatggttgacatgctagattcggacgggagtggcaagctggggctgaaggagttctacattctctggacgaagattcaaaaataccaaaaaatttaccgagaaatcgacgttgacaggtctggtaccatgaattcctatgaaatgcggaaggcattagaagaagcaggtttcaagatgccctgtcaactccaccaagtcatcgttgctcggtttgcagatgaccagctcatcatcgattttgataattttgttcggtgtttggttcggctggaaacgctattcaagatatttaagcagctggatcccgagaatactggaacaatagagctcgaccttatctcttggctctgtttctcagtactttgaagttataactaatctgcctgaagacttctcatgatggaaaatcagccaaggactaagcttccatagaaatacactttgtatctggacctcaaaattatgggaacatttacttaaacggatgatcatagctgaaaataatgatactgtcaatttgagatagcagaagtttcacacatcaaagtaaaagatttgcatatcattatactaaatgcaaatgagtcgcttaacccttgacaaggtcaaagaaagctttaaatctgtaaatagtatacactttttacttttacacactttcctgttcatagcaatattaaatcaggaaaaaaaaatgcagggaggtatttaacagctgagcaaaaacattgagtcgctctcaaaggacacgaggcccttggcagggaatatttaaagcaacttcaagtttaaaatgcagctgttgattctaccaaacaacagtccaagattaccatttcccatgagccaactgggaaacatggtatatcatgaagtaatcttgtcaaggcatctggagagtccaggagagaagactcacctctgtcgcttgggttaaacaagagacaggttttgtagaatattgattggtaatagtaaatcgttctccttacaatcaagttcttgaccctattcggccttatacatctggtcttacaaagaccaaagggatcctgcgcttgatcaactgaaccagtatgccaaaaccaggcatccaatttgtaaaccaattatgataaaggacaaaataagctgtttgccacctcaaaactttatgaacttcaccaccactagtgtctgtccatggagttagaggggacatcacttagaagttcttatagaaaggacacaagtttgtttcctggctttaccttgggaaaatgctagcaacattatagaaattttgccttgttgccttatcttcttccaaatgtactgttaaataaaaataaagggttaccccatgcaatcacaccatgccatgttttccttcctggagggcagccccacaggacggtttatgagcacacaattatagcttgtttctactttaacaaggtatgctgcctctgtaaattcatgtattcaaaggaaaagacaccttgcctataattaaaatgtggaactataaaattttttaaaatccaaaaaa

SEQ ID NO: 1523 - DNA, 1492 bp, Homo Sapiens
  NM_001749
cgggcgacagcagggccgcggtgcagtgtccgacccgagagttgcggcctgagtcaccggccccgccctccggagccggacgctgcgggaggcccgggagcggcagtggaaccgactcccagaactccggacgtgtgcggcgcagtgagtcgcagccatgttcctggttaactcgttcttgaagggcggcggcggcggcggcgggggaggcgggggcctgggtgggggcctgggaaatgtgcttggaggcctgatcagcggggccgggggcggcggcggcggcggcggcggcggcggcggtggtggaggcggcggtggcggtggaacggccatgcgcatcctaggcggagtcatcagcgccatcagcgaggcggctgcgcagtacaacccggagcccccgcccccacgcacacattactccaacattgaggccaacgagagtgaggaggtccggcagttccggagactctttgcccagctggctggagatgacatggaggtcagcgccacagaactcatgaacattctcaataaggttgtgacacgacaccctgatctgaagactgatggttttggcattgacacatgtcgcagcatggtggccgtgatggatagcgacaccacaggcaagctgggctttgaggaattcaagtacttgtggaacaacatcaaaaggtggcaggccatatacaaacagttcgacactgaccgatcagggaccatttgcagtagtgaactcccaggtgcctttgaggcagcagggttccacctgaatgagcatctctataacatgatcatccgacgctactcagatgaaagtgggaacatggattttgacaacttcatcagctgcttggtcaggctggacgccatgttccgtgccttcaaatctcttgacaaagatggcactggacaaatccaggtgaacatccaggagtggctgcagctgactatgtattcctgaactggagccccagacccgccccctcactgccttgctataggagtcacctggagcctcggtctctcccagggccgatcctgtctgcagtcacatctttgtggggcctgctgacccacaagcttttgttctctcagtacttgttacccagcttctcaacatccagggcccaatttgccctgcctggagttccccctggctctaggacactctaacaagctctgtccacgggtctccccattcccaccaggccctgcacacacccactccgtaacctctcccctgtacctgtgccaagcctagcacttgtgatgcctccatgccccgagggccctctctcagttctgggaggatgactccagtccctgcacgccctggcacacccttcacggttgctacccaggcggccaagctccagaccgtgccagacccaggtgccccagtgcctttgtctatattctgctcccagcctgccaggcccaggaggaaataaacatgccccagttgctgatctctaaaaaaaaaaaaaaa

SEQ ID NO: 1524 - DNA, 2723 bp, Homo Sapiens
  NM_001753
gggagaaacgttctcactcgctctctgctcgctgcgggcgctccccgccctctgctgccagaaccttggggatgtgcctagacccggcgcagcacacgtccgggccaaccgcgagcagaacaaacctttggcgggcggccaggaggctccctcccagccaccgcccccctccagcgcctttttttccccccatacaatacaagatcttccttcctcagttcccttaaagcacagcccagggaaacctcctcacagttttcatccagccacgggccagcatgtctgggggcaaatacgtagactcggagggacatctctacaccgttcccatccgggaacagggcaacatctacaagcccaacaacaaggccatggcagacgagctgagcgagaagcaagtgtacgacgcgcacaccaaggagatcgacctggtcaaccgcgaccctaaacacctcaacgatgacgtggtcaagattgactttgaagatgtgattgcagaaccagaagggacacacagttttgacggcatttggaaggccagcttcaccaccttcactgtgacgaaatactggttttaccgcttgctgtctgccctctttggcatcccgatggcactcatctggggcatttacttcgccattctctctttcctgcacatctgggcagttgtaccatgcattaagagcttcctgattgagattcagtgcatcagccgtgtctattccatctacgtccacaccgtctgtgacccactctttgaagctgttgggaaaatattcagcaatgtccgcatcaacttgcagaaagaaatataaatgacatttcaaggatagaagtatacctgattttttttccttttaattttcctggtgccaatttcaagttccaagttgctaatacagcaacaatttatgaattgaattatcttggttgaaaataaaaagatcactttctcagttttcataagtattatgtctcttctgagctatttcatctatttttggcagtctgaatttttaaaacccatttaaatttttttccttacctttttatttgcatgtggatcaaccatcgctttattggctgagatatgaacatattgttgaaaggtaatttgagagaaatatgaagaactgaggaggaaaaaaaaaaaaaagaaaagaaccaacaacctcaactgcctactccaaaatgttggtcattttatgttaagggaagaattccagggtatggccatggagtgtacaagtatgtgggcagattttcagcaaactcttttcccactgtttaaggagttagtggattactgccattcacttcataatccagtaggatccagtgatccttacaagttagaaaacataatcttctgccttctcatgatccaactaatgccttactcttcttgaaattttaacctatgatattttctgtgcctgaatatttgttatgtagataacaagacctcagtgccttcctgtttttcacattttccttttcaaatagggtctaactcagcaactcgctttaggtcagcagcctccctgaagaccaaaattagaatatccatgacctagttttccatgcgtgtttctgactctgagctacagagtctggtgaagctcacttctgggcttcatctggcaacatctttatccgtagtgggtatggttgacactagcccaatgaaatgaattaaagtggaccaatagggctgagctctctgtgggctggcagtcctggaagccagctttccctgcctctcatcaactgaatgaggtcagcatgtctattcagcttcgtttattttcaagaataatcacgctttcctgaatccaaactaatccatcaccggggtggtttagtggctcaacattgtgttcccatttcagctgatcagtgggcctccaaggaggggctgtaaaatggaggccattgtgtgagcctatcagagttgctgcaaacctgacccctgctcagtaaagcacttgcaaccgtctgttatgctgtgacacatggcccctccccctgccaggagctttggacctaatccaagcatccctttgcccagaaagaagatgggggaggaggcagtaataaaaagattgaagtattttgctggaataagttcaaattcttctgaactcaaactgaggaatttcacctgtaaacctgagtcgtacagaaagctgcctggtatatccaaaagctttttattcctcctgctcatattgtgattctgcctttggggacttttcttaaaccttcagttatgatttttttttcatacacttattggaactctgcttgatttttgcctcttccagtcttcctgacactttaattaccaacctgttacctactttgactttttgcatttaaaacagacactggcatggatatagttttacttttaaactgtgtacataactgaaaatgtgctatactgcatactttttaaatgtaaagatatttttatctttatatgaagaaaatcacttaggaaatggctttgtgattcaatctgtaaactgtgtattccaagacatgtctgttctacatagatgcttagtccctcatgcaaatcaattactggtccaaaagattgctgaaattttatatgcttactgatatattttacaattttttatcatgcatgtcctgtaaaggttacaagcctgcacaataaaaatgtttaacggttaaacagtcaaaaaaaaaaa

SEQ ID NO: 1525 - DNA, 5967 bp, Homo Sapiens
  NM_001754
ctttgggcctcataaacaaccacagaaccacaagttgggtagcctggcagtgtcagaagtctgaacccagcatagtggtcagcaggcaggacgaatcacactgaatgcaaaccacagggtttcgcagcgtggtaaaagaaatcattgagtcccccgccttcagaagagggtgcattttcaggaggaagcgatggcttcagacagcatatttgagtcatttccttcgtacccacagtgcttcatgagagaatgcatacttggaatgaatccttctagagacgtccacgatgccagcacgagccgccgcttcacgccgccttccaccgcgctgagcccaggcaagatgagcgaggcgttgccgctgggcgccccggacgccggcgctgccctggccggcaagctgaggagcggcgaccgcagcatggtggaggtgctggccgaccacccgggcgagctggtgcgcaccgacagccccaacttcctctgctccgtgctgcctacgcactggcgctgcaacaagaccctgcccatcgctttcaaggtggtggccctaggggatgttccagatggcactctggtcactgtgatggctggcaatgatgaaaactactcggctgagctgagaaatgctaccgcagccatgaagaaccaggttgcaagatttaatgacctcaggtttgtcggtcgaagtggaagagggaaaagcttcactctgaccatcactgtcttcacaaacccaccgcaagtcgccacctaccacagagccatcaaaatcacagtggatgggccccgagaacctcgaagacatcggcagaaactagatgatcagaccaagcccgggagcttgtccttttccgagcggctcagtgaactggagcagctgcggcgcacagccatgagggtcagcccacaccacccagcccccacgcccaaccctcgtgcctccctgaaccactccactgcctttaaccctcagcctcagagtcagatgcaggatacaaggcagatccaaccatccccaccgtggtcctacgatcagtcctaccaatacctgggatccattgcctctccttctgtgcacccagcaacgcccatttcacctggacgtgccagcggcatgacaaccctctctgcagaactttccagtcgactctcaacggcacccgacctgacagcgttcagcgacccgcgccagttccccgcgctgccctccatctccgacccccgcatgcactatccaggcgccttcacctactccccgacgccggtcacctcgggcatcggcatcggcatgtcggccatgggctcggccacgcgctaccacacctacctgccgccgccctaccccggctcgtcgcaagcgcagggaggcccgttccaagccagctcgccctcctaccacctgtactacggcgcctcggccggctcctaccagttctccatggtgggcggcgagcgctcgccgccgcgcatcctgccgccctgcaccaacgcctccaccggctccgcgctgctcaaccccagcctcccgaaccagagcgacgtggtggaggccgagggcagccacagcaactcccccaccaacatggcgccctccgcgcgcctggaggaggccgtgtggaggccctactgaggcgccaggcctggcccggctgggccccgcgggccgccgccttcgcctccgggcgcgcgggcctcctgttcgcgacaagcccgccgggatcccgggccctgggcccggccaccgtcctggggccgagggcgcccgacggccaggatctcgctgtaggtcaggcccgcgcagcctcctgcgcccagaagcccacgccgccgccgtctgctggcgccccggccctcgcggaggtgtccgaggcgacgcacctcgagggtgtccgccggccccagcacccaggggacgcgctggaaagcaaacaggaagattcccggagggaaactgtgaatgcttctgatttagcaatgctgtgaataaaaagaaagattttatacccttgacttaactttttaaccaagttgtttattccaaagagtgtggaattttggttggggtggggggagaggagggatgcaactcgccctgtttggcatctaattcttatttttaatttttccgcaccttatcaattgcaaaatgcgtatttgcatttgggtggtttttatttttatatacgtttatataaatatatataaattgagcttgcttctttcttgctttgaccatggaaagaaatatgattcccttttctttaagttttatttaacttttcttttggacttttgggtagttgtttttttttgttttgttttgtttttttgagaaacagctacagctttgggtcatttttaactactgtattcccacaaggaatccccagatatttatgtatcttgatgttcagacatttatgtgttgataattttttaattatttaaatgtacttatattaagaaaaatatcaagtactacattttcttttgttcttgatagtagccaaagttaaatgtatcacattgaagaaggctagaaaaaaagaatgagtaatgtgatcgcttggttatccagaagtattgtttacattaaactccctttcatgttaatcaaacaagtgagtagctcacgcagcaacgtttttaataggatttttagacactgagggtcactccaaggatcagaagtatggaattttctgccaggctcaacaagggtctcatatctaacttcctccttaaaacagagaaggtcaatctagttccagagggttgaggcaggtgccaataattacatctttggagaggatttgatttctgcccagggatttgctcaccccaaggtcatctgataatttcacagatgctgtgtaacagaacacagccaaagtaaactgtgtaggggagccacatttacataggaaccaaatcaatgaatttaggggttacgattatagcaatttaagggcccaccagaagcaggcctcgaggagtcaatttgcctctgtgtgcctcagtggagacaagtgggaaaacatggtcccacctgtgcgagaccccctgtcctgtgctgctcactcaacaacatctttgtgttgctttcaccaggctgagaccctaccctatggggtatatgggcttttacctgtgcaccagtgtgacaggaaagattcatgtcactactgtccgtggctacaattcaaaggtatccaatgtcgctgtaaattttatggcactatttttattggaggatttggtcagaatgcagttgttgtacaactcataaatactaactgctgattttgacacatgtgtgctccaaatgatctggtggttatttaacgtacctcttaaaattcgttgaaacgatttcaggtcaactctgaagagtatttgaaagcaggacttcagaacagtgtttgatttttattttataaatttaagcattcaaattaggcaaatctttggctgcaggcagcaaaaacagctggacttatttaaaacaacttgtttttgagttttcttatatatatattgattatttgttttacacacatgcagtagcactttggtaagagttaaagagtaaagcagcttatgttgtcaggtcgttcttatctagagaagagctatagcagatctcggacaaactcagaatatattcactttcatttttgacaggattccctccacaactcagtttcatatattattccgtattacatttttgcagctaaattaccataaaatgtcagcaaatgtaaaaatttaatttctgaaaagcaccattagcccatttcccccaaattaaacgtaaatgttttttttcagcacatgttaccatgtctgacctgcaaaaatgctggagaaaaatgaaggaaaaaattatgtttttcagtttaattctgttaactgaagatattccaactcaaaaccagcctcatgctctgattagataatcttttacattgaacctttactctcaaagccatgtgtggagggggcttgtcactattgtaggctcactggattggtcatttagagtttcacagactcttaccagcatatatagtatttaattgtttcaaaaaaaatcaaactgtagttgttttggcgataggtctcacgcaacacatttttgtatgtgtgtgtgtgtgcgtgtgtgtgtgtgtgtgtgaaaaattgcattcattgacttcaggtagattaaggtatctttttattcattgccctcaggaaagttaaggtatcaatgagacccttaagccaatcatgtaataactgcatgtgtctggtccaggagaagtattgaataagccatttctactgcttactcatgtccctatttatgatttcaacatggatacatatttcagttctttctttttctcactatctgaaaatacatttccctccctctcttccccccaatatctccctttttttctctcttcctctatcttccaaaccccactttctccctcctccttttcctgtgttctcttaagcagatagcacatacccccacccagtaccaaatttcagaacacaagaaggtccagttcttcccccttcacataaaggaacatggtttgtcagcctttctcctgtttatgggtttcttccagcagaacagagacattgccaaccatattggatctgcttgctgtccaaaccagcaaactttcctgggcaaatcacaatcagtgagtaaatagacagcctttctgctgccttgggtttctgtgcagataaacagaaatgctctgattagaaaggaaatgaatggttccactcaaatgtcctgcaatttaggattgcagatttctgccttgaaatacctgtttctttgggacattccgtcctgatgatttttatttttgttggtttttatttttggggggaatgacatgtttgggtcttttatacatgaaaatttgtttgacaataatctcacaaaacatattttacatctgaacaaaatgcctttttgtttaccgtagcgtatacatttgttttgggatttttgtgtgtttgttgggaattttgtttttagccaggtcagtattgatgaggctgatcatttggctctttttttccttccagaagagttgcatcaacaaagttaattgtatttatgtatgtaaatagattttaagcttcattataaaatattgttaatgcctataactttttttcaatttttttgtgtgtgtttctaaggactttttcttaggtttgctaaatactgtagggaaaaaaatgcttctttctactttgtttattttagactttaaaatgagctacttcttattcacttttgtaaacagctaatagcatggttccaattttttttaagttcactttttttgttctaggggaaatgaatgtgcaaaaaaagaaaaagaactgttggttatttgtgttattctggatgtataaaaatcaatggaaaaaaataaactttcaaattgaaatgacggtataacacatctactgaaaaagcaacgggaaatgtggtcctatttaagccagcccccacctagggtctatttgtgtggcagttattgggtttggtcacaaaacatcctgaaaattcgtgcgtgggcttctttctccctggtacaaacgtatggaatgcttcttaaaggggaactgtcaagctggtgtcttcagccagatgacatgagagaatatcccagaaccctctctccaaggtgtttctagatagcacaggagagcaggcactgcactgtccacagtccacggtacacagtcgggtgggccgcctcccctctcctgggagcattcgtcgtgcccagcctgagcagggcagctggactgctgctgttcaggagccaccagagccttcctctctttgtaccacagtttcttctgtaaatccagtgttacaatcagtgtgaatggcaaataaacagtttgacaagtacatacaccata

SEQ ID NO: 1526 - DNA, 6531 bp, Homo Sapiens
  NM_001759
gcccagccagcttgcgtcaccgcttcagagcggagaagagcgagcaggggagagcgagaccagttttaaggggaggaccggtgcgagtgaggcagccccgaggctctgctcgcccaccacccaatcctcgcctcccttctgctccaccttctctctctgccctcacctctcccccgaaaaccccctatttagccaaaggaaggaggtcaggggaacgctctcccctccccttccaaaaaacaaaaacagaaaaacccttttccaggccggggaaagcaggagggagaggggccgccgggctggccatggagctgctgtgccacgaggtggacccggtccgcagggccgtgcgggaccgcaacctgctccgagacgaccgcgtcctgcagaacctgctcaccatcgaggagcgctaccttccgcagtgctcctacttcaagtgcgtgcagaaggacatccaaccctacatgcgcagaatggtggccacctggatgctggaggtctgtgaggaacagaagtgcgaagaagaggtcttccctctggccatgaattacctggaccgtttcttggctggggtcccgactccgaagtcccatctgcaactcctgggtgctgtctgcatgttcctggcctccaaactcaaagagaccagcccgctgaccgcggagaagctgtgcatttacaccgacaactccatcaagcctcaggagctgctggagtgggaactggtggtgctggggaagttgaagtggaacctggcagctgtcactcctcatgacttcattgagcacatcttgcgcaagctgccccagcagcgggagaagctgtctctgatccgcaagcatgctcagaccttcattgctctgtgtgccaccgactttaagtttgccatgtacccaccgtcgatgatcgcaactggaagtgtgggagcagccatctgtgggctccagcaggatgaggaagtgagctcgctcacttgtgatgccctgactgagctgctggctaagatcaccaacacagacgtggattgtctcaaagcttgccaggagcagattgaggcggtgctcctcaatagcctgcagcagtaccgtcaggaccaacgtgacggatccaagtcggaggatgaactggaccaagccagcacccctacagacgtgcgggatatcgacctgtgaggatgccagttgggccgaaagagagagacgcgtccataatctggtctcttcttctttctggttgtttttgttctttgtgttttagggtgaaacttaaaaaaaaaattctgcccccacctagatcatatttaaagatcttttagaagtgagagaaaaaggtcctacgaaaacggaataataaaaagcatttggtgcctatttgaagtacagcataagggaatcccttgtatatgcgaacagttattgtttgattatgtaaaagtaatagtaaaatgcttacaggaaaacctgcagagtagttagagaatatgtatgcctgcaatatgggaacaaattagaggagacttttttttttcatgttatgagctagcacatacacccccttgtagtataatttcaaggaactgtgtacgccatttatggcatgattagattgcaaagcaatgaactcaagaaggaattgaaataaggagggacatgatggggaaggagtacaaaacaatctctcaacatgattgaaccatttgggatggagaagcacctttgctctcagccacctgttactaagtcaggagtgtagttggatctctacattaatgtcctcttgctgtctacagtagctgctacctaaaaaaagatgttttattttgccagttggacacaggtgattggctcctgggtttcatgttctgtgacatcctgcttcttcttccaaatgcagttcattgcagacaccaccatattgctatctaatggggaaatgtagctatgggccataaccaaaactcacatgaaacggaggcagatggagaccaagggtgggatccagaatggagtcttttctgttattgtatttaaaagggtaatgtggccttggcatttcttcttagaaaaaaactaatttttggtgctgattggcatgtctggttcacagtttagcattgttataaaccattccattcgaaaagcactttgaaaaattgttcccgagcgatagatgggatggtttatgcaagtcatgctgaatactcctcccctcttctcttttgccccctcccttcctgcccccagtctgggttactcttcgcttctggtatctggcgttctttggtacacagttctggtgttcctaccaggactcaagagacaccccttcctgctgacattcccatcacaacattcctcagacaagcctgtaaactaaaatctgttaccattctgatggcacagaaggatcttaattcccatctctatacttctcctttggacatggaaagaaaagttattgctggtgcaaagatagatggctgaacatcagggtgtggcattttgttcccttttccgtttttttttttttattgttgttgttaattttattgcaaagttgtattcagcgtacttgaatttttcttcctctccacttcttagaggcattcagttagcaaagaggttggagcaacaacttttttttttttttttgcacaattgtaattgacaggtaatgaagctatttgttaaaatatttgcctttttaagtaaaaaagaaaaatcagaacagggctatttgaagaattattttatacacagattctgccttgtttcatagtatgagggttgaagacggaaaacaatctaagggtctctcatttttttaattttgttttgttcagtttggtttttttttttttttgcgctgctaagaagctaaagtcatccatccttattcacgttgacagtacctagctgtaatgtttcacagagtgtgctgctattttataaacatttttataatatattattttactgcttaaattccaagtcctgaagtagatggttgagatatgagttcttcgtactggaaaagcccttccgtagtttgttttcttctggtagcatattcatggttgtttttttttttcttttttggttttttggttttttttttttcctctgatcacattcttcaaagacggagtattctttacctcaggtttactggacaaaatcaataactacaaaaggcaatgattcacgcttttgttttcataatacctcacaaccgtacagtttctgcttgggagcccattcgcatgaggaatacagaagcagtgtgagcagggctgactccctctcaggtggaaggcagggcggtctcactcccagggacctttttggtcatggaggccatcgggctcccagttagaccctggtatcctcatcatgatggaaaaaatacattgaaccaagggatcctccctccccttcaaggcagacgttcagtacaaacatttatgcggtaggctcagatgtcgtaatttgcacttaggtaccaggtgtcaggaaacagactaaaaagaattccaccaggctgtttggagatcctcatcttggagctttttcaaaagcggggcttcatctgcaaagggccctttcatcttgaagtttttcccctccgtctttcccctcccctggcatggacaccttgtgtttaggatcatctctgcaggtttcctaggtctgaatctgcgagtagatgaacctgcagcaagcagcgtttatggtgcttccttctccctcctctgtctcaaactgcgcaggcaagcactatgcaagcccaggccctctgctgagcggtactaaacggtcgggttttcaatcacactgaattggcaggataagaaaaataggtcagataagtatgggatgatagttgaagggaggtgaagaggctgcttctctacagaggtgaaattccagatgagtcagtctcttgggaagtgtgtttagaagggttcaggactttgtgagttagcatgaccctaaaattctaggggatttctggtgggacaatgggtggtgaattctgaagttttggagagggaagtggagcagccagcaagtaagctagccagagttttctcaagagccagctttgctcagcacactctcctgggccccaaggagtcccacggaatggggaaagcgggaaccctggagttcttgggaatcttggagcctaaagagaaaccgaggtgcaaattcatttcatggtgactgacccttgagcttaaacagaagcagcaaatgaaagaaccggacaaataaggaagggcacaagcctacccgactctatttacagtctgtaactttccactcttcctgtagtcccgaggcccctgggtccttctagcttttctctttcccatccttggggccttgtgtgatgatgggtgtggggctgccgatgggaaagtcgggggttgttaggcttttctgcctgctcctgcttaaacacaagaaggaatcctggattttgccctctccttagctcttagtctctttggtaggagttttgttccagaggagctctcccccttggatttgaacttgctctttttgttgttgttgttctttctcttctttttcttacctcccactaaaggggttccaaattatcctggtctttttctaccttgttgtgtttctatctcgtctttacttccatctgtttgtttttttctccatcagtgggggccgagttgttcccccagcctgccaaattttgatccttcccctcttttggccaaatcctagggggaagaaatcctagtatgccaaaaatatatgctaagcataattaaactccatgcgggtccataacagccaagaagcctgcaggagaaagccaagggcagttccctccgcagaacaccccatgcgtgctgagaggcgagctccttgaagaaggggctgttcttccaggaggccttattttgaactgcctcaggaccccactggagagcacagcatgccttactactgggtcatccttggtctatgtgctctgtactggaggctctgttctgcctcttatcagccaggtcaggggcacacatggcttaagtgacaaagccagaggagaagacaaccctgacagcatcacgctgcatcccattgctagcaggattggcaactcttcagacggagctgcgcttccctgcagtctagcacctctagggcctctccagactgtgccctgggagctctgggactgaaaggttaagaacataaggcaggatcagatgactctctccaagagggcaggggaattttctctccatgggccacaggggacagggctgggagaagaaatagacttgcaccttatgtcatgtaaataattgattttctagttcaagaagataatattggtagtgtgggaattggaggtaggaaggggaggaagtctgagtaagccagttggcttctaagccaaaaggattcctctttgtttatctctgagacagtccaaccttgagaatagctttaaaagggaaattaatgctgagatgataaagtccccttaagccaacaaaccctctgtagctatagaatgagtgcaggtttctattggtgtggactcagagcaatttacaagagctgttcatgcagccatccatttgtgcaaaatagggtaagaagattcaagaggatatttattacttcctcataccacatggcttttgatgattctggattctaaacaacccagaatggtcatttcaggcacaacgatactacattcgtgtgtgtctgcttttaaacttggctgggctatcagaccctattctcggctcaggttttgagaagccatcagcaaatgtgtacgtgcatgctgtagctgcagcctgcatcccttcgcctgcagcctactttggggaaataaagtgccttactgactgtagccattacagtatccaatgtcttttgacaggtgcctgtccttgaaaaacaaagtttctatttttatttttaattggtttagttcttaactgctggccaactcttacatccccagcaaatcatcgggccattggattttttccattatgttcatcacccttatatcatgtacctcagatctctctctctctcctctctctcagttatgtagtttcttgtcttggacttttttttttcttttctttttctttttttttttgctttaaaacaagtgtgatgccatatcaagtccatgttattctctcacagtgtactctataagaggtgtgggtgtctgtttggtcaggatgttagaaagtgctgataagtagcatgatcagtgtatgcgaaaaggtttttaggaagtatggcaaaaatgttgtattggctatgatggtgacatgatatagtcagctgccttttaagaggtcttatctgttcagtgttaagtgatttaaaaaaataataacctgttttctgactagtttaaagatggatttgaaaatggttttgaatgcaattaggttatgctatttggacaataaactcaccttgacctaaattaaaaaaaaaa

SEQ ID NO: 1527 - DNA, 2095 bp, Homo Sapiens
  NM_001760
gcgcctgtcagggaagcggcgcgcgcgcgcgggcggcgggcgggctggggatccgccgcgcagtgccagcgccagcgccagacccgcgccccgcgctctccggcccgtcgcctgccttgggactcgcgagcccgcactcccgccctgcctgttcgctgcccgagtatggagctgctgtgttgcgaaggcacccggcacgcgccccgggccgggccggacccgcggctgctgggggaccagcgtgtcctgcagagcctgctccgcctggaggagcgctacgtaccccgcgcctcctacttccagtgcgtgcagcgggagatcaagccgcacatgcggaagatgctggcttactggatgctggaggtatgtgaggagcagcgctgtgaggaggaagtcttccccctggccatgaactacctggatcgctacctgtcttgcgtccccacccgaaaggcgcagttgcagctcctgggtgcggtctgcatgctgctggcctccaagctgcgcgagaccacgcccctgaccatcgaaaaactgtgcatctacaccgaccacgctgtctctccccgccagttgcgggactgggaggtgctggtcctagggaagctcaagtgggacctggctgctgtgattgcacatgatttcctggccttcattctgcaccggctctctctgccccgtgaccgacaggccttggtcaaaaagcatgcccagacctttttggccctctgtgctacagattatacctttgccatgtacccgccatccatgatcgccacgggcagcattggggctgcagtgcaaggcctgggtgcctgctccatgtccggggatgagctcacagagctgctggcagggatcactggcactgaagtggactgcctgcgggcctgtcaggagcagatcgaagctgcactcagggagagcctcagggaagcctctcagaccagctccagcccagcgcccaaagccccccggggctccagcagccaagggcccagccagaccagcactcctacagatgtcacagccatacacctgtagccctggagaggccctctggagtggccactaagcagaggaggggccgctgccacccacctccctgcctccaggaaccacaccacatctaagcctgaaggggcgtctgttcccccttcacaaagcccaagggatctggtcctacccatccccgcagtgtgcactaaggggcccggccagccatgtctgcatttcggtggctagtcaagctcctcctccctgcatctgaccagcagcgcctttcccaactctagctgggggtgggccaggctgatgggacagaattggatacatacaccagcattccttttgaacgcccccccccacccctgggggctctcatgttttcaactgccaaaatgctctagtgccttctaaaggtgttgtcccttctagggttattgcatttggattggggtccctctaaaatttaatgcatgatagacacatatgagggggaatagtctagatggctcctctcagtactttggaggcccctatgtagtccgtgctgacagctgctcctagagggaggggcctaggcctcagccagagaagctataaattcctctttgctttgctttctgctcagcttctcctgtgtgattgacagctttgctgctgaaggctcattttaatttattaattgctttgagcacaactttaagaggacataatggggtcctggccatcccacaagtggtggtaaccctggtggttgctgttttcctcccttctgctactggcaaaaggatctttgtggccaaggagctgctatagcctggggtggggtcatgccctcctctcccattgtccctctgccccatcctccagcagggaaaatgcagcagggatgccctggaggtggctgagcccctgtctagagagggaggcaagccctgttgacacaggtctttcctaaggctgcaaggtttaggctggtggcccaggaccatcatcctactgtaataaagatgattgtgaaataaaactggctttggcttcttggaaaaaaaaaaaaaaaaaaaaaaaaaaaaaaaaaaaaaaaaaaaaa

SEQ ID NO: 1528 - DNA, 2682 bp, Homo Sapiens
  NM_001762
agcgggcgccggacgacctgtggcccaatggcggcggcgcgcgggcacgctgggggccggccagacgggccgacttttccagaagacccggatagttcctcccggccacgccgcgccggctctgggcactcagcatcgtttccttttcctccgctggagcagctatggcggcggtgaagaccctgaaccccaaggccgaggtggcccgagcgcaggcggcgctggcggtcaacatcagcgcagcgcggggtctgcaggacgtgctaaggaccaacctggggcccaagggcaccatgaagatgctcgtttctggcgctggagacatcaaacttactaaagacggcaatgtgctgcttcacgaaatgcaaattcaacacccaacagcttccttaatagcaaaggtagcaacagcccaggatgatataactggtgatggtacgacttctaatgtcctaatcattggagagctgctgaaacaggcggatctctacatttctgaaggccttcatcctagaataatcactgaaggatttgaagctgcaaaggaaaaggcccttcagtttttggaagaagtcaaagtaagcagagagatggacagggaaacacttatagatgtggccagaacatctcttcgtactaaagttcatgctgaacttgcagatgtcttaacagaggctgtagtggactccattttggccattaaaaagcaagatgaacctattgatctcttcatgattgagatcatggagatgaaacataaatctgaaactgatacaagcttaatcagagggcttgttttggaccacggagcacggcatcctgatatgaagaaaagggtggaggatgcatacatcctcacttgtaacgtgtcattagagtatgagaaaacagaagtgaattctggctttttttacaagagtgcagaagagagagaaaaactcgtgaaagctgaaagaaaattcattgaagatagggttaaaaaaataatagaactgaaaaggaaagtctgtggcgattcagataaaggatttgttgttattaatcaaaagggaattgaccccttttccttagatgctctttcaaaagaaggcatagttgctctgcgcagagctaaaaggagaaatatggagaggctgactcttgcttgtggtggggtagccctgaattcttttgacgacctaagtcctgactgcttgggacatgcaggacttgtatatgagtatacattgggagaagagaagtttacctttattgagaaatgtaacaaccctcgttctgtcacattattgatcaaaggaccaaataagcacacactcactcagatcaaagatgcagtgagggacggcttgagggctgtcaaaaatgctattgatgatggctgtgtggttccaggtgctggtgccgtggaagtggcaatggcagaagccctgattaaacataagcccagtgtaaagggcagggcacagcttggagtccaagcatttgctgatgcattgctcattattcccaaggttcttgctcagaactctggttttgaccttcaggaaacattagttaaaattcaagcagaacattcagaatcaggtcagcttgtgggtgtggacctgaacacaggtgagccaatggtggcagcagaagtaggcgtatgggataactattgtgtaaagaaacagcttcttcactcctgcactgtgattgccaccaacattctcttggttgatgagatcatgcgagctggaatgtcttctctgaaaggttgaattgaagcttcctctgtatctgaatcttgaagactgcaaagtgatcctgaggattacagctgtggaatttttgtccaagcttcaaataattttgaaagaaattttcccatatgaaaaaaggagagaacactggcatctgttgaaatttggaagttctgaaattatagtatttttaaaaattgcactgaagtgtatacacataaagcaggtcttttatccagtgaacaggatgttttgctttagcagcagtgacataaaattccatgttagataagcatatgttacttaccttgttattaaatatttcttgaaaagcaaattttaatggtttaattttatgtggacgtatgttaaattatccaactaccctattgttaagcatttggttttaaaatttttatgctaatataaatgctcaagtaatttaaaatattgaaagcatccctgttggtataaatttctgagtaaatgcattggatcagttggactttgaacgcctttgaaatggctttgctaaaatgctcccgccacaaagttgtaggaaatgggaagaggagtcaactagaggcaagggagttgagagagctgcaactgtaaagggcaagaacaggcagaggtaaaaagatgatggaaggtgtggtgactaagggccacggttattgggtgaaatttgagattgtaggccaactgtattttcaagcttctgaacttaggcaaaatattcatcgcaaagtctctagcgtcatatttttctcacccaaattacgtttccacgagattatttatatatagttggtctatctctgcagtccttgaaggtgaagttgtgtgttactaggctgtgttttgggatgtcagcagtggcctgaagtgagttgtgcaataaatgttaagttgaaacctcaaaaaaaaaaaaaaaaaa

SEQ ID NO: 1529 - DNA, 2111 bp, Homo Sapiens
  NM_001763
gggcagtcgtaggagactctgaaaaagcaaataaatcaatgttaaatcagaaatgtgaatgtagtaaggggctgaagagacaggggaagagaatacatgggaaaatattgaaaaggacagagtgatcaaaaagagcagggacatgggagcattgggcagcacactgggagccatttcactttatgctcttattgtatgattgagaaaaaaatgtccttagtggttaagtggcttttcaatgccacatcagacttgttccatagcagttgaattaggggaaggtgaataagttggaggttggtgacaaggagagaagctggaacagagaggagagtcagaaccagagggaaatgagagactgagtaggcatctcagggtttttgaaggagtggattttctttgttgcagtcaggggaggtttgtctgttggctgcagaaagaagtcagaatagagatatcgtggggtaggtttgtttggaacagaaatcaaagaccaatttttctgagagaaggaaataacatctgcaaatgatatgctgtttttgctacttccattgttagctgttctcccaggtgatggcaatgcagacgggctcaaggagcctctctccttccatgtcacctggatcgcatccttttacaaccattcctggaaacaaaatctggtctcaggttggctgagtgatttgcagactcatacctgggacagcaattccagcaccatcgttttcctgtgcccctggtccaggggaaacttcagcaatgaggagtggaaggaactggaaacattattccgtatacgcaccattcggtcatttgagggaattcgtagatacgcccatgaattgcagtttgaatatccttttgagatacaggtgacaggaggctgtgagctgcactctggaaaggtctcaggaagcttcttgcagttagcttatcaaggatcagactttgtgagcttccagaacaattcatggttgccatatccagtggctgggaatatggccaagcatttctgcaaagtgctcaatcagaatcagcatgaaaatgacataacacacaatcttctcagtgacacctgcccacgtttcatcttgggtcttcttgatgcaggaaaggcacatctccagcggcaagtgaagcccgaggcctggctgtcccatggccccagtcctggccctggccatctgcagcttgtgtgccatgtctcaggattctacccaaagcccgtgtgggtgatgtggatgcggggtgagcaggagcagcagggcactcagcgaggggacatcttgcccagtgctgatgggacatggtatctccgcgcaaccctggaggtggccgctggggaggcagctgacctgtcctgtcgggtgaagcacagcagtctagagggccaggacatcgtcctctactgggagcatcacagttccgtgggcttcatcatcttggcggtgatagtgcctttacttcttctgataggtcttgcgctttggttcaggaaacgctgtttctgttaagacacaccatgagcctcctcgtcacccttctccttttggggtgagagaccagcagcccaagggctccagacacacctgaacacatcgtgatgatgacgtcctctcaactctctttgtaaaaattttgttatttttgcttgtttctgattaatgattgtttgtcaatataagctcaatttaattttgcaggatttgttgttctgacctgggttctgggacttttaaattcaaattttatctccagatggaatggggtcctagcaacctccacatgttcaactattaatggatcatcaggcctgttttagatatcccttactccagagggccttccctgacttacaagtgggaagcagtctcttcctggtctgaactcccgccacattttagccgtactttgctaactgtgctcctcacttcctcttcttcattgcagttatttagatcccccctttccttctaatttttcagctccttcaatgcaaagtacatgtatttttaatatatgcatccctggtgaaggatcttgcctgcatgaaacatgttctcaataaaactctgtgttgaatttatgccaaaaaaaaaaaaaaaaaa

SEQ ID NO: 1530 - DNA, 2592 bp, Homo Sapiens
  NM_001765
accactttgtctaaggcagttgaggaagggaagtagatataatggagcttagtggcagagcagctggaatcctgagagaagagaataactttagttcagagcaggtggggaaatgagagattgagtaggaggaccaaggttgagggaagcagatcttcttagttgctgtcagcggctgatggggaagattgttggtagaaggaagtcagaatataggtacagagggataagtttgctaagaacagagatcagcaaacagcttttctgagagaaagaaacatctgcaaatgacatgctgtttctgcagtttctgctgctagctcttcttctcccaggtggtgacaatgcagacgcatcccaggaacacgtctccttccatgtcatccagatcttctcatttgtcaaccaatcctgggcacgaggtcagggctcaggatggctggacgagttgcagactcatggctgggacagtgaatcaggcacaataattttcctgcataactggtccaagggcaacttcagcaatgaagagttgtcagacctagagttgttatttcgtttctacctctttggattaactcgggagattcaagaccatgcaagtcaagattactcgaaatatccctttgaagtacaggtgaaagcgggctgtgagctgcattctggaaagagcccagaaggcttctttcaggtagctttcaacggattagatttactgagtttccagaatacaacatgggtgccatctccaggctgtggaagtttggcccaaagtgtctgtcatctactcaatcatcagtatgaaggcgtcacagaaacagtgtataatctcataagaagcacttgcccccgatttctcttgggtctcctggatgcagggaagatgtatgtacacaggcaagtgaggccagaagcctggctgtccagtcgccccagccttgggtctggccagctgttgctggtttgtcatgcctccggcttctacccaaagcctgtttgggtgacatggatgcggaatgaacaggagcaactgggcactaaacatggtgatattcttcctaatgctgatgggacatggtatcttcaggtgatcctggaggtggcatctgaggagcctgctggcctgtcttgtcgagtgagacacagcagtctaggaggccaggacatcatcctctactggggacaccacttttccatgaattggattgccttggtagtgatagtgcccttggtgattctaatagtccttgtgttatggtttaagaagcactgctcatatcaggacatcctgtgagactcttccccctgactcccccattgtgttaagaacccagcaacccaggagcctagtacaatatagtgatgccatcccgtcgactctccatttaaattgtttctctttctgcataataaacatttgttaataaaaaccaaattctaatttggaatgtttttcttggaatctccactttttatatagcactcaaccttcaaagcccatttctgatgtcatttcctccaacgatcttccttgacccatactgaacccagagagcccctcaactgttatgtgcatgcaacacttcctaccctgtgttgcagctacttgagtctttcatttcacatttttaagcttttaggaggcaaggatcatgataaatgtgcctttcctgcatatgataggctcagtgaaacacaaaacaaaacatcatatctaagttggattaactgtcatgttgacaatttttctcattatattccttcccaatgttgttgtagcattggaaatattcatgcttctctttttgtttaaatgcttcatacctagcagataaattccactctcctttagctccctcattttctccttaaacatttaaggaaaagtgcagccttgtgccttgatacacttattttctaaacacagagaattacaaatgcaaatagacagagagtgtgcaagttacatgtgatgatcagtggtgcagatatgtcacagaatacttaagaaaaggaacaagagatttggtcctcagggttggagtgggatcaaggcaaccgttgtgctgtatatggaagacaaatttcctaaaggactgtgttatctgagatagccttggctaaactttagtccctttaggtttcattcactaattcaactaatattttttgggtactgagttgagacaggcacatacagcttctaaactggtggtggataaaacaaatgagattgtgtccactctcctgaagttgcaatgtttgcttcctcaatctgtccatgtttcttttctattgttttcatgtttttatttatttcaaaaaattttaaatagattttattgatgtataatttatagtaaaatttgaatctttaagtgtacagttctatttattttgataattatataagcccatgtaaacaaaatcacaatcaagatattaaatgtcataacccctcatacctgtttgtagtcaagcacaccaacaacctggcattcttgcaactactgatatactttatgtcacttaagcttaaacttgtattttctatgattttattaagatggaaataaacatatctacttggta

SEQ ID NO: 1531 - DNA, 3795 bp, Homo Sapiens
  NM_001766
gttttctacccaagaatgctacttcaggagatcagtcaaaaggttagggtgatggtgacggtggaaatatagaaaaaggaatttattcaagaggtattcaaaaagaagtgaaatagagatgagttggagatagattggataaaaagagtgagggagagggaggtgtcaggctgcagcccaggttctgagttgccaaagaggagtcttttcctccaggaaattgagacacgccggttgtgaaacctactgaagtgagcggcggcgccaggattcctgggaccccgacctctttgcagctcgcacagctaagggcgagggcgcccttcggcagaagcagcaaaccgccggcaagcccagcgaggagggctgccggggtctgggcttgggaattggctggcacccagcggaaagggacgtgagctgagcggcgggggagaagagtgcgcaggtcagagggcggcgcgcagcggcgctccgcgaggtccccacgccgggcgatatggggtgcctgctgtttctgctgctctgggcgctcctccaggcttggggaagcgctgaagtcccgcaaaggcttttccccctccgctgcctccagatctcgtccttcgccaatagcagctggacgcgcaccgacggcttggcgtggctgggggagctgcagacgcacagctggagcaacgactcggacaccgtccgctctctgaagccttggtcccagggcacgttcagcgaccagcagtgggagacgctgcagcatatatttcgggtttatcgaagcagcttcaccagggacgtgaaggaattcgccaaaatgctacgcttatcctatcccttggagctccaggtgtccgctggctgtgaggtgcaccctgggaacgcctcaaataacttcttccatgtagcatttcaaggaaaagatatcctgagtttccaaggaacttcttgggagccaacccaagaggccccactttgggtaaacttggccattcaagtgctcaaccaggacaagtggacgagggaaacagtgcagtggctccttaatggcacctgcccccaatttgtcagtggcctccttgagtcagggaagtcggaactgaagaagcaagtgaagcccaaggcctggctgtcccgtggccccagtcctggccctggccgtctgctgctggtgtgccatgtctcaggattctacccaaagcctgtatgggtgaagtggatgcggggtgagcaggagcagcagggcactcagccaggggacatcctgcccaatgctgacgagacatggtatctccgagcaaccctggatgtggtggctggggaggcagctggcctgtcctgtcgggtgaagcacagcagtctagagggccaggacatcgtcctctactggggtgggagctacacctccatgggcttgattgccttggcagtcctggcgtgcttgctgttcctcctcattgtgggctttacctcccggtttaagaggcaaacttcctatcagggcgtcctgtgactcgccttgccacatctgtgtctctggaacccaggacctctggacctcaggttcctaagacttcagtcctggtctgctcaggaattgaagatgtaaggaattgaagataggagagataccttgaaaaagtagagaacagtcatgaggcagctttcatcacacccttttaacatttatctaaaagaatttaaattctttttcaaaaattacactacaagtttataagcccaaatggctctgtgaaatcagaagtgcaaaggtgtgcaaacttgtatctgaagacctaccagggacaagcaggtaagagctgatgtgagtgtgtgtgatgggatctgtaaggaactggaacacacatgtcctatccaaaggaatcagctgcagctgcttgttgtcaagtataaagtcaggacctggcttggctttaaccgtttttcaagaaaactggaaatctggattttcagcgaacatgcctgattttaaaaggttgactcaagtttttacaaaatactatgtgggacacctcaaatacatacctactgactgatgacaaacccaggagtttgtgtgtcttttataaaaagtttgccctggatgtcatattggcagttggaggacacagtttctattgtaaatttggatttacgactgaagaaggacattttctctttaaaagaaagttaggttataagaaacagaggcgtctcacatttttacttggtgtaattaataaacgaagataaatcatagtgtatgtgtattatgttgaaaaaaactactctgagtaaggatatttctctcaaatggtcatcactttttttccttggaggaagattgtcatgaaggcatcccttccttcccaaaacgacaacggcaacaacaacagtctcctttacttacagctattaaaagagacaatgtagggaaagggccaacaccacttgggcaagcatgagctgcagcgatgatggtgatggtagcccagccatgctgtgttcttatcttagagaggacagagcaggaaacttacaggggtagcagacctttctgatgccaaagaaataaggaggccaaaatcatgtttgcctagctgggaggtaaatctcttggcagtcagggtccctgaacacccagaaaaaataagtgagacttaacggttggagagtgtttgcttgagaaaagtaacatttcacactctctatactagacttgcacatatgaatttaggatgtgcgtgaagattctgctagcttcaacatatcccaaagcacttggatatgcctataatccaagtgctttgggaggctgagataggaggattgtttaaggccaggcatttgaaatcagcctgggcaacatagtgagaccctgtctctacaaaaaattaaaaaactagccacccatggtggtgagcgcctgtagtcctagctactctggaggctgaggtgggaggatcccttgagcccatgaattccaggttagtgtgagctgtgattgtgtcactacagtgtaaggatgacagagggagaccctgtcttaaaaaaaaattatgctagcttttaaatcaatggttcccaaattgtagtaacctgaccaacagcctcagcaggacctgggaacttgttataaatgcaaattgttttgggcctcatcctatacccgctgaatgagaaactctgagtctggaagcaggctcaatagtcaagccccctggtgattctgatgcttagctaaagttagagaaccactgttcttagacattgtgcaatgttatacaacaacttcctcaaagtgctaagtgaaaaggacattggcctggcgttagtcagggaaggcgtcctggagggaggggaatttgaagcagagctttgaaaaacaaaggcagtgaggtgaaccagcaagtgcactggctgaggggactggagttctagcctctgaaccagtttcctcctgtgccaaaggaggataataattatctattattgattatctcctagacttgtggagttcaagtgtgtaatgccttaaaagatgtggaggctgttgctgtgtttggtaccacattgcccaccctcacgtggcgctcttcagcttaggttcctctagcagtgtcaagtttgtgaaccaaccccactggccttctgcattctgagggcacgtgtgttaaagtctctactgatgtccttttggaaatgcctctgcatgaatttatggtagctctgactcatctttaaacaattttaatttatttagaaaataaaggcttatctctccaggaaaaaaaaaaaaaa

SEQ ID NO: 1532 - DNA, 1595 bp, Homo Sapiens
  NM_001767
agaatcaaaagaggaaaccaacccctaagatgagctttccatgtaaatttgtagccagcttccttctgattttcaatgtttcttccaaaggtgcagtctccaaagagattacgaatgccttggaaacctggggtgccttgggtcaggacatcaacttggacattcctagttttcaaatgagtgatgatattgacgatataaaatgggaaaaaacttcagacaagaaaaagattgcacaattcagaaaagagaaagagactttcaaggaaaaagatacatataagctatttaaaaatggaactctgaaaattaagcatctgaagaccgatgatcaggatatctacaaggtatcaatatatgatacaaaaggaaaaaatgtgttggaaaaaatatttgatttgaagattcaagagagggtctcaaaaccaaagatctcctggacttgtatcaacacaaccctgacctgtgaggtaatgaatggaactgaccccgaattaaacctgtatcaagatgggaaacatctaaaactttctcagagggtcatcacacacaagtggaccaccagcctgagtgcaaaattcaagtgcacagcagggaacaaagtcagcaaggaatccagtgtcgagcctgtcagctgtccagagaaaggtctggacatctatctcatcattggcatatgtggaggaggcagcctcttgatggtctttgtggcactgctcgttttctatatcaccaaaaggaaaaaacagaggagtcggagaaatgatgaggagctggagacaagagcccacagagtagctactgaagaaaggggccggaagccccaccaaattccagcttcaacccctcagaatccagcaacttcccaacatcctcctccaccacctggtcatcgttcccaggcacctagtcatcgtcccccgcctcctggacaccgtgttcagcaccagcctcagaagaggcctcctgctccgtcgggcacacaagttcaccagcagaaaggcccgcccctccccagacctcgagttcagccaaaacctccccatggggcagcagaaaactcattgtccccttcctctaattaaaaaagatagaaactgtctttttcaataaaaagcactgtggatttctgccctcctgatgtgcatatccgtacttccatgaggtgttttctgtgtgcagaacattgtcacctcctgaggctgtgggccacagccacctctgcatcttcgaactcagccatgtggtcaacatctggagtttttggtctcctcagagagctccatcacaccagtaaggagaagcaatataagtgtgattgcaagaatggtagaggaccgagcacagaaatcttagagatttcttgtcccctctcaggtcatgtgtagatgcgataaatcaagtgattggtgtgcctgggtctcactacaagcagcctatctgcttaagagactctggagtttcttatgtgccctggtggacacttgcccaccatcctgtgagtaaaagtgaaataaaagctttgactagaaaaaaaaaaaaaaaaaaaaaaaaaaaaaaaaaaaaaaaaaaaaaaaaaaaaaaaaaaaaaaaaa

SEQ ID NO: 1533 - DNA, 3035 bp, Homo Sapiens
  NM_001768
agcacccaagggctggtcaaccaagctgggggttgaatttccatccagcaatgcaggccatgggaggctgcagcagtgacgctgtcagatcccctttgtgagaataataatttttataacaacgtggctggaggactgatcaggagagagactggtgtgaattgaaggctgttgcaatggctccaagaagagatgaggctgtgtggtgagtttagccgctggatgaaaggccggaagaatgaggtcagcagcgcactgacaccgacacccaaagcttcggctgctgccgctctcatggaaatctcctgggggaagggagagggtccttcctcggtgaaaactggggctgctctagcgagttcctcagaagcgggcaggtcgctagttcctcttccttttcagccctcagtgcccattttgccaataaaaagtcccaaggtgacagtacaagagacgcctttagtgaaggcaaaggaagggacactcccctcctttgctgcctactctcgccctcacttcttgaaatctttggtctcccttcacccactctgtcactctcacaagacaaccatttccaaggactatttccaagcccttttcctcatccccaaacccgcagttttcagctgcccccagttgcctggccaggctgcctcgacggccctattcacgggccccagcctcctcgccgggctggaaggcgacaaccgcgaaaaggagggtgactctcctcggcgggggcttcgggtgacatcacatcctccaaatgcgaaatcaggctccgggccggccgaagggcgcaactttcccccctcggcgccccaccggctcccgcgcgcctcccctcgcgcccgagcttcgagccaagcagcgtcctggggagcgcgtcatggccttaccagtgaccgccttgctcctgccgctggccttgctgctccacgccgccaggccgagccagttccgggtgtcgccgctggatcggacctggaacctgggcgagacagtggagctgaagtgccaggtgctgctgtccaacccgacgtcgggctgctcgtggctcttccagccgcgcggcgccgccgccagtcccaccttcctcctatacctctcccaaaacaagcccaaggcggccgaggggctggacacccagcggttctcgggcaagaggttgggggacaccttcgtcctcaccctgagcgacttccgccgagagaacgagggctactatttctgctcggccctgagcaactccatcatgtacttcagccacttcgtgccggtcttcctgccagcgaagcccaccacgacgccagcgccgcgaccaccaacaccggcgcccaccatcgcgtcgcagcccctgtccctgcgcccagaggcgtgccggccagcggcggggggcgcagtgcacacgagggggctggacttcgcctgtgatatctacatctgggcgcccttggccgggacttgtggggtccttctcctgtcactggttatcaccctttactgcaaccacaggaaccgaagacgtgtttgcaaatgtccccggcctgtggtcaaatcgggagacaagcccagcctttcggcgagatacgtctaaccctgtgcaacagccactacattacttcaaactgagatccttccttttgagggagcaagtccttccctttcattttttccagtcttcctccctgtgtattcattctcatgattattattttagtgggggcggggtgggaaagattactttttctttatgtgtttgacgggaaacaaaactaggtaaaatctacagtacaccacaagggtcacaatactgttgtgcgcacatcgcggtagggcgtggaaaggggcaggccagagctacccgcagagttctcagaatcatgctgagagagctggaggcacccatgccatctcaacctcttccccgcccgttttacaaagggggaggctaaagcccagagacagcttgatcaaaggcacacagcaagtcagggttggagcagtagctggagggaccttgtctcccagctcagggctctttcctccacaccattcaggtctttctttccgaggcccctgtctcagggtgaggtgcttgagtctccaacggcaagggaacaagtacttcttgatacctgggatactgtgcccagagcctcgaggaggtaatgaattaaagaagagaactgcctttggcagagttctataatgtaaacaatatcagactttttttttttataatcaagcctaaaattgtatagacctaaaataaaatgaagtggtgagcttaaccctggaaaatgaatccctctatctctaaagaaaatctctgtgaaacccctatgtggaggcggaattgctctcccagcccttgcattgcagaggggcccatgaaagaggacaggctacccctttacaaatagaatttgagcatcagtgaggttaaactaaggccctcttgaatctctgaatttgagatacaaacatgttcctgggatcactgatgactttttatactttgtaaagacaattgttggagagcccctcacacagccctggcctctgctcaactagcagatacagggatgaggcagacctgactctcttaaggaggctgagagcccaaactgctgtcccaaacatgcacttccttgcttaaggtatggtacaagcaatgcctgcccattggagagaaaaaacttaagtagataaggaaataagaaccactcataattcttcaccttaggaataatctcctgttaatatggtgtacattcttcctgattattttctacacatacatgtaaaatatgtctttcttttttaaatagggttgtactatgctgttatgagtggctttaatgaataaacatttgtagcatcctctttaatgggtaaacagcatccgaaaaaaaaaaaaaaaaaaaaaaaaaaaaaaaaaaaaaaaaaaaaaaaaaaaaaaaaaaaaaaaaaaaaaaaaaaaaaaaaaaaaaaaaaaaaaaaaaaaaaaaaaaaaaaaaaaaaaaaaaaaa

SEQ ID NO: 1534 - DNA, 1965 bp, Homo Sapiens
  NM_001770
aggcccctgcctgccccagcatcccctgcgcgaagctgggtgccccggagagtctgaccaccatgccacctcctcgcctcctcttcttcctcctcttcctcacccccatggaagtcaggcccgaggaacctctagtggtgaaggtggaagagggagataacgctgtgctgcagtgcctcaaggggacctcagatggccccactcagcagctgacctggtctcgggagtccccgcttaaacccttcttaaaactcagcctggggctgccaggcctgggaatccacatgaggcccctggccatctggcttttcatcttcaacgtctctcaacagatggggggcttctacctgtgccagccggggcccccctctgagaaggcctggcagcctggctggacagtcaatgtggagggcagcggggagctgttccggtggaatgtttcggacctaggtggcctgggctgtggcctgaagaacaggtcctcagagggccccagctccccttccgggaagctcatgagccccaagctgtatgtgtgggccaaagaccgccctgagatctgggagggagagcctccgtgtctcccaccgagggacagcctgaaccagagcctcagccaggacctcaccatggcccctggctccacactctggctgtcctgtggggtaccccctgactctgtgtccaggggccccctctcctggacccatgtgcaccccaaggggcctaagtcattgctgagcctagagctgaaggacgatcgcccggccagagatatgtgggtaatggagacgggtctgttgttgccccgggccacagctcaagacgctggaaagtattattgtcaccgtggcaacctgaccatgtcattccacctggagatcactgctcggccagtactatggcactggctgctgaggactggtggctggaaggtctcagctgtgactttggcttatctgatcttctgcctgtgttcccttgtgggcattcttcatcttcaaagagccctggtcctgaggaggaaaagaaagcgaatgactgaccccaccaggagattcttcaaagtgacgcctcccccaggaagcgggccccagaaccagtacgggaacgtgctgtctctccccacacccacctcaggcctcggacgcgcccagcgttgggccgcaggcctggggggcactgccccgtcttatggaaacccgagcagcgacgtccaggcggatggagccttggggtcccggagcccgccgggagtgggcccagaagaagaggaaggggagggctatgaggaacctgacagtgaggaggactccgagttctatgagaacgactccaaccttgggcaggaccagctctcccaggatggcagcggctacgagaaccctgaggatgagcccctgggtcctgaggatgaagactccttctccaacgctgagtcttatgagaacgaggatgaagagctgacccagccggtcgccaggacaatggacttcctgagccctcatgggtcagcctgggaccccagccgggaagcaacctccctggggtcccagtcctatgaggatatgagaggaatcctgtatgcagccccccagctccgctccattcggggccagcctggacccaatcatgaggaagatgcagactcttatgagaacatggataatcccgatgggccagacccagcctggggaggagggggccgcatgggcacctggagcaccaggtgatcctcaggtggccagcctggatctcctcaagtccccaagattcacacctgactctgaaatctgaagacctcgagcagatgatgccaacctctggagcaatgttgcttaggatgtgtgcatgtgtgtaagtgtgtgtgtgtgtgtgtgtgtgtatacatgccagtgacacttccagtcccctttgtattccttaaataaactcaatgagctcttccaatcctaaaaaaaaaaa

SEQ ID NO: 1535 - DNA, 3300 bp, Homo Sapiens
  NM_001771
acttctccttttgctctcagatgctgccagggtccctgaagagggaagacacgcggaaacaggcttgcacccagacacgacaccatgcatctcctcggcccctggctcctgctcctggttctagaatacttggctttctctgactcaagtaaatgggtttttgagcaccctgaaaccctctacgcctgggagggggcctgcgtctggatcccctgcacctacagagccctagatggtgacctggaaagcttcatcctgttccacaatcctgagtataacaagaacacctcgaagtttgatgggacaagactctatgaaagcacaaaggatgggaaggttccttctgagcagaaaagggtgcaattcctgggagacaagaataagaactgcacactgagtatccacccggtgcacctcaatgacagtggtcagctggggctgaggatggagtccaagactgagaaatggatggaacgaatacacctcaatgtctctgaaaggccttttccacctcatatccagctccctccagaaattcaagagtcccaggaagtcactctgacctgcttgctgaatttctcctgctatgggtatccgatccaattgcagtggctcctagagggggttccaatgaggcaggctgctgtcacctcgacctccttgaccatcaagtctgtcttcacccggagcgagctcaagttctccccacagtggagtcaccatgggaagattgtgacctgccagcttcaggatgcagatgggaagttcctctccaatgacacggtgcagctgaacgtgaagcacaccccgaagttggagatcaaggtcactcccagtgatgccatagtgagggagggggactctgtgaccatgacctgcgaggtcagcagcagcaacccggagtacacgacggtatcctggctcaaggatgggacctcgctgaagaagcagaatacattcacgctaaacctgcgcgaagtgaccaaggaccagagtgggaagtactgctgtcaggtctccaatgacgtgggcccgggaaggtcggaagaagtgttcctgcaagtgcagtatgccccggaaccttccacggttcagatcctccactcaccggctgtggagggaagtcaagtcgagtttctttgcatgtcactggccaatcctcttccaacaaattacacgtggtaccacaatgggaaagaaatgcagggaaggacagaggagaaagtccacatcccaaagatcctcccctggcacgctgggacttattcctgtgtggcagaaaacattcttggtactggacagaggggcccgggagctgagctggatgtccagtatcctcccaagaaggtgaccacagtgattcaaaaccccatgccgattcgagaaggagacacagtgaccctttcctgtaactacaattccagtaaccccagtgttacccggtatgaatggaaaccccatggcgcctgggaggagccatcgcttggggtgctgaagatccaaaacgttggctgggacaacacaaccatcgcctgcgcagcttgtaatagttggtgctcgtgggcctcccctgtcgccctgaatgtccagtatgccccccgagacgtgagggtccggaaaatcaagcccctttccgagattcactctggaaactcggtcagcctccaatgtgacttctcaagcagccaccccaaagaagtccagttcttctgggagaaaaatggcaggcttctggggaaagaaagccagctgaattttgactccatctccccagaagatgctgggagttacagctgctgggtgaacaactccataggacagacagcgtccaaggcctggacacttgaagtgctgtatgcacccaggaggctgcgtgtgtccatgagcccgggggaccaagtgatggaggggaagagtgcaaccctgacctgtgagagcgacgccaaccctcccgtctcccactacacctggtttgactggaataaccaaagcctcccctaccacagccagaagctgagattggagccggtgaaggtccagcactcgggtgcctactggtgccaggggaccaacagtgtgggcaagggccgttcgcctctcagcaccctcaccgtctactatagcccggagaccatcggcaggcgagtggctgtgggactcgggtcctgcctcgccatcctcatcctggcaatctgtgggctcaagctccagcgacgttggaagaggacacagagccagcaggggcttcaggagaattccagcggccagagcttctttgtgaggaataaaaaggttagaagggcccccctctctgaaggcccccactccctgggatgctacaatccaatgatggaagatggcattagctacaccaccctgcgctttcccgagatgaacataccacgaactggagatgcagagtcctcagagatgcagagacctcccccggactgcgatgacacggtcacttattcagcattgcacaagcgccaagtgggcgactatgagaacgtcattccagattttccagaagatgaggggattcattactcagagctgatccagtttggggtcggggagcggcctcaggcacaagaaaatgtggactatgtgatcctcaaacattgacactggatgggctgcagcagaggcactgggggcagcgggggccagggaagtccccgagtttccccagacaccgccacatggcttcctcctgcgcgcatgtgcgcacacacacacacacacgcacacacacacacacacactcactgcggagaaccttgtgcctggctcagagccagtctttttggtgagggtaaccccaaacctccaaaactcctgcccctgttctcttccactctccttgctacccagaaatccatctaaatacctgccctgacatgcacacctccccctgcccccaccacggccactggccatctccacccccagctgcttgtgtccctcctgggatctgctcgtcatcatttttccttcccttctccatctctctggccctctacccctgatctgacatccccactcacgaatattatgcccagtttctgcctctgagggaaagcccagaaaaggacagaaacgaagtagaaaggggcccagtcctggcctggcttctcctttggaagtgaggcattgcacggggagacgtacgtatcagcggccccttgactctggggactccgggtttgagatggacacactggtgtggattaacctgccagggagacagagctcacaataaaaatggctcagatgccacttcaaagaaaaaaaaaa

SEQ ID NO: 1536 - DNA, 1466 bp, Homo Sapiens
  NM_001772
tctgctcacacaggaagccctggaagctgcttcctcagacatgccgctgctgctactgctgcccctgctgtgggcaggggccctggctatggatccaaatttctggctgcaagtgcaggagtcagtgacggtacaggagggtttgtgcgtcctcgtgccctgcactttcttccatcccataccctactacgacaagaactccccagttcatggttactggttccgggaaggagccattatatccagggactctccagtggccacaaacaagctagatcaagaagtacaggaggagactcagggcagattccgcctccttggggatcccagtaggaacaactgctccctgagcatcgtagacgccaggaggagggataatggttcatacttctttcggatggagagaggaagtaccaaatacagttacaaatctccccagctctctgtgcatgtgacagacttgacccacaggcccaaaatcctcatccctggcactctagaacccggccactccaaaaacctgacctgctctgtgtcctgggcctgtgagcagggaacacccccgatcttctcctggttgtcagctgcccccacctccctgggccccaggactactcactcctcggtgctcataatcaccccacggccccaggaccacggcaccaacctgacctgtcaggtgaagttcgctggagctggtgtgactacggagagaaccatccagctcaacgtcacctatgttccacagaacccaacaactggtatctttccaggagatggctcagggaaacaagagaccagagcaggagtggttcatggggccattggaggagctggtgttacagccctgctcgctctttgtctctgcctcatcttcttcatagtgaagacccacaggaggaaagcagccaggacagcagtgggcaggaatgacacccaccctaccacagggtcagcctccccgaaacaccagaagaagtccaagttacatggccccactgaaacctcaagctgttcaggtgccgcccctactgtggagatggatgaggagctgcattatgcttccctcaactttcatgggatgaatccttccaaggacacctccaccgaatactcagaggtcaggacccagtgaggaacccacaagagcatcaggctcagctagaagatccacatcctctacaggtcggggaccaaaggctgattcttggagatttaacaccccacaggcaatgggtttatagacattatgtgagtttcctgctatattaacatcatcttagactttgcaagcagagagtcgtggaatcaaatctgtgctctttcatttgctaagtgtatgatgtcacacaagctccttaaccttccatgtctccattttcttctctgtgaagtaggtataagaagtcctatctcatagggatgctgtgagcattaaataaaggtacacatggaaaacaccagtc

SEQ ID NO: 1537 - DNA, 5346 bp, Homo Sapiens
  NM_001777
ggggagcaggcgggggagcgggcgggaagcagtgggagcgcgcgtgcgcgcggccgtgcagcctgggcagtgggtcctgcctgtgacgcgcggcggcggtcggtcctgcctgtaacggcggcggcggctgctgctccagacacctgcggcggcggcggcgaccccgcggcgggcgcggagatgtggcccctggtagcggcgctgttgctgggctcggcgtgctgcggatcagctcagctactatttaataaaacaaaatctgtagaattcacgttttgtaatgacactgtcgtcattccatgctttgttactaatatggaggcacaaaacactactgaagtatacgtaaagtggaaatttaaaggaagagatatttacacctttgatggagctctaaacaagtccactgtccccactgactttagtagtgcaaaaattgaagtctcacaattactaaaaggagatgcctctttgaagatggataagagtgatgctgtctcacacacaggaaactacacttgtgaagtaacagaattaaccagagaaggtgaaacgatcatcgagctaaaatatcgtgttgtttcatggttttctccaaatgaaaatattcttattgttattttcccaatttttgctatactcctgttctggggacagtttggtattaaaacacttaaatatagatccggtggtatggatgagaaaacaattgctttacttgttgctggactagtgatcactgtcattgtcattgttggagccattcttttcgtcccaggtgaatattcattaaagaatgctactggccttggtttaattgtgacttctacagggatattaatattacttcactactatgtgtttagtacagcgattggattaacctccttcgtcattgccatattggttattcaggtgatagcctatatcctcgctgtggttggactgagtctctgtattgcggcgtgtataccaatgcatggccctcttctgatttcaggtttgagtatcttagctctagcacaattacttggactagtttatatgaaatttgtggcttccaatcagaagactatacaacctcctaggaaagctgtagaggaaccccttaatgcattcaaagaatcaaaaggaatgatgaatgatgaataactgaagtgaagtgatggactccgatttggagagtagtaagacgtgaaaggaatacacttgtgtttaagcaccatggccttgatgattcactgttggggagaagaaacaagaaaagtaactggttgtcacctatgagacccttacgtgattgttagttaagtttttattcaaagcagctgtaatttagttaataaaataattatgatctatgttgtttgcccaattgagatccagttttttgttgttatttttaatcaattaggggcaatagtagaatggacaatttccaagaatgatgcctttcaggtcctagggcctctggcctctaggtaaccagtttaaattggttcagggtgataactacttagcactgccctggtgattacccagagatatctatgaaaaccagtggcttccatcaaacctttgccaactcaggttcacagcagctttgggcagttatggcagtatggcattagctgagaggtgtctgccacttctgggtcaatggaataataaattaagtacaggcaggaatttggttgggagcatcttgtatgatctccgtatgatgtgatattgatggagatagtggtcctcattcttgggggttgccattcccacattcccccttcaacaaacagtgtaacaggtccttcccagatttagggtacttttattgatggatatgttttccttttattcacataaccccttgaaaccctgtcttgtcctcctgttacttgcttctgctgtacaagatgtagcaccttttctcctctttgaacatggtctagtgacacggtagcaccagttgcaggaaggagccagacttgttctcagagcactgtgttcacacttttcagcaaaaatagctatggttgtaacatatgtattcccttcctctgatttgaaggcaaaaatctacagtgtttcttcacttcttttctgatctggggcatgaaaaaagcaagattgaaatttgaactatgagtctcctgcatggcaacaaaatgtgtgtcaccatcaggccaacaggccagcccttgaatggggatttattactgttgtatctatgttgcatgataaacattcatcaccttcctcctgtagtcctgcctcgtactccccttcccctatgattgaaaagtaaacaaaacccacatttcctatcctggttagaagaaaattaatgttctgacagttgtgatcgcctggagtacttttagacttttagcattcgttttttacctgtttgtggatgtgtgtttgtatgtgcatacgtatgagataggcacatgcatcttctgtatggacaaaggtggggtacctacaggagagcaaaggttaattttgtgcttttagtaaaaacatttaaatacaaagttctttattgggtggaattatatttgatgcaaatatttgatcacttaaaacttttaaaacttctaggtaatttgccacgctttttgactgctcaccaataccctgtaaaaatacgtaattcttcctgtttgtgtaataagatattcatatttgtagttgcattaataatagttatttcttagtccatcagatgttcccgtgtgcctcttttatgccaaattgattgtcatatttcatgttgggaccaagtagtttgcccatggcaaacctaaatttatgacctgctgaggcctctcagaaaactgagcatactagcaagacagctcttcttgaaaaaaaaaatatgtatacacaaatatatacgtatatctatatatacgtatgtatatacacacatgtatattcttccttgattgtgtagctgtccaaaataataacatatatagagggagctgtattcctttatacaaatctgatggctcctgcagcactttttccttctgaaaatatttacattttgctaacctagtttgttactttaaaaatcagttttgatgaaaggagggaaaagcagatggacttgaaaaagatccaagctcctattagaaaaggtatgaaaatctttatagtaaaattttttataaactaaagttgtaccttttaatatgtagtaaactctcatttatttggggttcgctcttggatctcatccatccattgtgttctctttaatgctgcctgccttttgaggcattcactgccctagacaatgccaccagagatagtgggggaaatgccagatgaaaccaactcttgctctcactagttgtcagcttctctggataagtgaccacagaagcaggagtcctcctgcttgggcatcattgggccagttccttctctttaaatcagatttgtaatggctcccaaattccatcacatcacatttaaattgcagacagtgttttgcacatcatgtatctgttttgtcccataatatgctttttactccctgatcccagtttctgctgttgactcttccattcagttttatttattgtgtgttctcacagtgacaccatttgtccttttctgcaacaacctttccagctacttttgccaaattctatttgtcttctccttcaaaacattctcctttgcagttcctcttcatctgtgtagctgctcttttgtctcttaacttaccattcctatagtactttatgcatctctgcttagttctattagttttttggccttgctcttctccttgattttaaaattccttctatagctagagcttttctttctttcattctctcttcctgcagtgttttgcatacatcagaagctaggtacataagttaaatgattgagagttggctgtatttagatttatcactttttaatagggtgagcttgagagttttctttctttctgttttttttttttgttttttttttttttttttttttttttttttttgactaatttcacatgctctaaaaaccttcaaaggtgattatttttctcctggaaactccaggtccattctgtttaaatccctaagaatgtcagaattaaaataacagggctatcccgtaattggaaatatttcttttttcaggatgctatagtcaatttagtaagtgaccaccaaattgttatttgcactaacaaagctcaaaacacgataagtttactcctccatctcagtaataaaaattaagctgtaatcaaccttctaggtttctcttgtcttaaaatgggtattcaaaaatggggatctgtggtgtatgtatggaaacacatactccttaatttacctgttgttggaaactggagaaatgattgtcgggcaaccgtttattttttattgtattttatttggttgagggatttttttataaacagttttacttgtgtcatattttaaaattactaactgccatcacctgctggggtcctttgttaggtcattttcagtgactaatagggataatccaggtaactttgaagagatgagcagtgagtgaccaggcagtttttctgcctttagctttgacagttcttaattaagatcattgaagaccagctttctcataaatttctctttttgaaaaaaagaaagcatttgtactaagctcctctgtaagacaacatcttaaatcttaaaagtgttgttatcatgactggtgagagaagaaaacattttgtttttattaaatggagcattatttacaaaaagccattgttgagaattagatcccacatcgtataaatatctattaaccattctaaataaagagaactccagtgttgctatgtgcaagatcctctcttggagcttttttgcatagcaattaaaggtgtgctatttgtcagtagccatttttttgcagtgatttgaagaccaaagttgttttacagctgtgttaccgttaaaggtttttttttttatatgtattaaatcaatttatcactgtttaaagctttgaatatctgcaatctttgccaaggtacttttttatttaaaaaaaaacataactttgtaaatattaccctgtaatattatatatacttaataaaacattttaagctattttgttgggctatttctattgctgctacagcagaccacaagcacatttctgaaaaatttaatttattaatgtatttttaagttgcttatattctaggtaacaatgtaaagaatgatttaaaatattaattatgaattttttgagtataatacccaataagcttttaattagagcagagttttaattaaaagttttaaatcagtc

SEQ ID NO: 1538 - DNA, 1153 bp, Homo Sapiens
  NM_001779
gggccgccggctgccagcccagggcggggcggagccctacttctggccgaccgcgtaggcggtgcttgaacttagggctgcttgtggctgggcactcgcgcagaggccggcccgacgagccatggttgctgggagcgacgcggggcgggccctgggggtcctcagcgtggtctgcctgctgcactgctttggtttcatcagctgtttttcccaacaaatatatggtgttgtgtatgggaatgtaactttccatgtaccaagcaatgtgcctttaaaagaggtcctatggaaaaaacaaaaggataaagttgcagaactggaaaattctgaattcagagctttctcatcttttaaaaatagggtttatttagacactgtgtcaggtagcctcactatctacaacttaacatcatcagatgaagatgagtatgaaatggaatcgccaaatattactgataccatgaagttctttctttatgtgcttgagtctcttccatctcccacactaacttgtgcattgactaatggaagcattgaagtccaatgcatgataccagagcattacaacagccatcgaggacttataatgtactcatgggattgtcctatggagcaatgtaaacgtaactcaaccagtatatattttaagatggaaaatgatcttccacaaaaaatacagtgtactcttagcaatccattatttaatacaacatcatcaatcattttgacaacctgtatcccaagcagcggtcattcaagacacagatatgcacttatacccataccattagcagtaattacaacatgtattgtgctgtatatgaatggtattctgaaatgtgacagaaaaccagacagaaccaactccaattgattggtaacagaagatgaagacaacagcataactaaattattttaaaaactaaaaagccatctgatttctcatttgagtattacaatttttgaacaactgttggaaatgtaacttgaagcagctgctttaagaagaaatacccactaacaaagaacaagcattagttttggctgtcatcaacttattatatgactaggtgcttgctttttttgtcagtaaattgtttttactgatgatgtagatacttttgtaaataaatgtaaatatgtacacaagtga

SEQ ID NO: 1539 - DNA, 1548 bp, Homo Sapiens
  NM_001782
aattgctaagccgtgcagtcacagagggaacacagagcctagttgtaaacggacagagacgagaggggcaagggaggacagtggatgacagggaagacgagtgggggcagagctgctcaggaccatggctgaggccatcacctatgcagatctgaggtttgtgaaggctcccctgaagaagagcatctccagccggttaggacaggacccaggggctgatgatgatggggaaatcacctacgagaatgttcaagtgcccgcagtcctaggggtgccctcaagcttggcttcttctgtactaggggacaaagcagcggtcaagtcggagcagccaactgcgtcctggagagccgtgacgtcaccagctgtcgggcggattctcccctgccgcacaacctgcctgcgatacctcctgctcggcctgctcctcacctgcctgctgttaggagtgaccgccatctgcctgggagtgcgctatctgcaggtgtctcagcagctccagcagacgaacagggttctggaagtcactaacagcagcctgaggcagcagctccgcctcaagataacgcagctgggacagagtgcagaggatctgcaggggtccaggagagagctggcgcagagtcaggaagcactacaggtggaacagagggctcatcaggcggccgaagggcagctacaggcctgccaggcagacagacagaagacgaaggagaccttgcaaagtgaggagcaacagaggagggccttggagcagaagctgagcaacatggagaacagactgaagcccttcttcacatgcggctcagcagacacctgctgtccgtcgggatggataatgcatcagaaaagctgcttttacatctcacttacttcaaaaaattggcaggagagccaaaaacaatgtgaaactctgtcttccaagctggccacattcagtgaaatttatccacaatcacactcttactacttcttaaattcactgttgccaaatggtggttcagggaattcatattggactggcctcagctctaacaaggattggaagttgactgatgatacacaacgcactaggacttatgctcaaagctcaaaatgtaacaaggtacataaaacttggtcatggtggacactggagtcagagtcatgtagaagttctcttccctacatctgtgagatgacagctttcaggtttccagattaggacagtcctttgcactgagttgacactcatgccaacaagaacctgtgcccctccttcctaacctgaggcctggggttcctcagaccatctccttcattctgggcagtgcccagccaccggctgacccacacctgacacttccagccagtctgctgcctgctccctcttcctgaaactggactgttcctgggaaaagggtgaagccacctctagaagggactttggcctccccccaagaacttcccatggtagaatggggtgggggaggagggcgcacgggctgagcggataggggcggcccggagccagccaggcagttttattgaaatctttttaaataattg

SEQ ID NO: 1540 - DNA, 1258 bp, Homo Sapiens
  NM_001783
tccactcacagcctgaagcatacccggcaggggctgtccccaggcccaacaagcaaagggcccagtagcgagggccactggagcccatctccggggggctgggcaggaagtagggtggggtttggggtagggatctggtaccctgggactgctgcaactcaaactaaccaacccactgggagaagatgcctgggggtccaggagtcctccaagctctgcctgccaccatcttcctcctcttcctgctgtctgctgtctacctgggccctgggtgccaggccctgtggatgcacaaggtcccagcatcattgatggtgagcctgggggaagacgcccacttccaatgcccgcacaatagcagcaacaacgccaacgtcacctggtggcgcgtcctccatggcaactacacgtggccccctgagttcttgggcccgggcgaggaccccaatggtacgctgatcatccagaatgtgaacaagagccatgggggcatatacgtgtgccgggtccaggagggcaacgagtcataccagcagtcctgcggcacctacctccgcgtgcgccagccgccccccaggcccttcctggacatgggggagggcaccaagaaccgaatcatcacagccgaggggatcatcctcctgttctgcgcggtggtgcctgggacgctgctgctgttcaggaaacgatggcagaacgagaagctcgggttggatgccggggatgaatatgaagatgaaaacctttatgaaggcctgaacctggacgactgctccatgtatgaggacatctcccggggcctccagggcacctaccaggatgtgggcagcctcaacataggagatgtccagctggagaagccgtgacacccctactcctgccaggctgcccccgcctgctgtgcacccagctccagtgtctcagctcacttccctgggacattctcctttcagcccttctgggggcttccttagtcatattcccccagtggggggtgggagggtaacctcactcttctccaggccaggcctccttggactcccctgggggtgtcccactcttcttccctctaaactgccccacctcctaacctaatccccccgccccgctgcctttcccaggctcccctcaccccagcgggtaatgagcccttaatcgctgcctctaggggagctgattgtagcagcctcgttagtgtcaccccctcctccctgatctgtcagggccacttagtgataataaattcttcccaactgca

SEQ ID NO: 1541 - DNA, 985 bp, Homo Sapiens
  NM_001785
caaaccatgggaggctcctctcctagaccctgcatcctgaaagctgcgtacctgagagcctgcggtctggctgcagggacacacccaaggggaggagctgcaatcgtgtctggggccccagcccaggctggccggagctcctgtttcccgctgctctgctgcctgcccggggtaccaacatggcccagaagcgtcctgcctgcaccctgaagcctgagtgtgtccagcagctgctggtttgctcccaggaggccaagaagtcagcctactgcccctacagtcactttcctgtgggggctgccctgctcacccaggaggggagaatcttcaaagggtgcaacatagaaaatgcctgctacccgctgggcatctgtgctgaacggaccgctatccagaaggccgtctcagaagggtacaaggatttcagggcaattgctatcgccagtgacatgcaagatgattttatctctccatgtggggcctgcaggcaagtcatgagagagtttggcaccaactggcccgtgtacatgaccaagccggatggtacgtatattgtcatgacggtccaggagctgctgccctcctcctttgggcctgaggacctgcagaagacccagtgacagccagagaatgcccactgcctgtaacagccacctggagaacttcataaagatgtctcacagccctggggacacctgcccagtgggccccagccctacagggactgggcaaagatgatgtttccagattacactccagcctgagtcagcacccctcctagcaacctgccttgggacttagaacaccgccgccccctgccccacctttcctttccttcctgtgggccctctttcaaagtccagcctagtctggactgcttccccatcagccttcccaaggttctatcctgttccgagcaacttttctaattataaacatcacagaacatcctggatcaaaaaaaaaaaaaaaaaaaaaaaaaaaa

SEQ ID NO: 1542 - DNA, 1923 bp, Homo Sapiens
  NM_001786
agcgcggtgagtttgaaactgctcgcacttggcttcaaagctggctcttggaaattgagcggagagcgacgcggttgttgtagctgccgctgcggccgccgcggaataataagccgggatctaccatacccattgactaactatggaagattataccaaaatagagaaaattggagaaggtacctatggagttgtgtataagggtagacacaaaactacaggtcaagtggtagccatgaaaaaaatcagactagaaagtgaagaggaaggggttcctagtactgcaattcgggaaatttctctattaaaggaacttcgtcatccaaatatagtcagtcttcaggatgtgcttatgcaggattccaggttatatctcatctttgagtttctttccatggatctgaagaaatacttggattctatccctcctggtcagtacatggattcttcacttgttaagagttatttataccaaatcctacaggggattgtgttttgtcactctagaagagttcttcacagagacttaaaacctcaaaatctcttgattgatgacaaaggaacaattaaactggctgattttggccttgccagagcttttggaatacctatcagagtatatacacatgaggtagtaacactctggtacagatctccagaagtattgctggggtcagctcgttactcaactccagttgacatttggagtataggcaccatatttgctgaactagcaactaagaaaccacttttccatggggattcagaaattgatcaactcttcaggattttcagagctttgggcactcccaataatgaagtgtggccagaagtggaatctttacaggactataagaatacatttcccaaatggaaaccaggaagcctagcatcccatgtcaaaaacttggatgaaaatggcttggatttgctctcgaaaatgttaatctatgatccagccaaacgaatttctggcaaaatggcactgaatcatccatattttaatgatttggacaatcagattaagaagatgtagctttctgacaaaaagtttccatatgttatatcaacagatagttgtgtttttattgttaactcttgtctatttttgtcttatatatatttctttgttatcaaacttcagctgtacttcgtcttctaatttcaaaaatataacttaaaaatgtaaatattctatatgaatttaaatataattctgtaaatgtgtgtaggtctcactgtaacaactatttgttactataataaaactataatattgatgtcaggaatcaggaaaaaatttgagttggcttaaatcatctcagtccttatggcagttttattttcctgtagttggaactactaaaatttaggaaaatgctaagttcaagtttcgtaatgctttgaagtatttttatgctctgaatgtttaaatgttctcatcagtttcttgccatgttgttaactatacaacctggctaaagatgaatatttttctactggtattttaatttttgacctaaatgtttaagcattcggaatgagaaaactatacagatttgagaaatgatgctaaatttataggagttttcagtaacttaaaaagctaacatgagagcatgccaaaatttgctaagtcttacaaagatcaagggctgtccgcaacagggaagaacagttttgaaaatttatgaactatcttatttttaggtaggttttgaaagctttttgtctaagtgaattcttatgccttggtcagagtaataactgaaggagttgcttatcttggctttcgagtctgagtttaaaactacacattttgacatagtgtttattagcagccatctaaaaaggctctaatgtatatttaactaaaattactagctttgggaattaaactgtttaacaaataaaaaaaaaaaa

SEQ ID NO: 1543 - DNA, 3717 bp, Homo Sapiens
  NM_001789
gaacagcgaagacagcgtgagcctgggccgttgcctcgaggctctcgcccggcttctcttgccgacccgccacgtttgtttggatttaatcttcaggttgccggcgcccgcccgcccgctggcctcgcggtgtgagagggaagcacccgtgcctgtggctggtggctggcgcctggagggtccgcacacccgcccggccgcgccgcttgcccgcggcagccgcgtccctgaaccgcggagtcgtgtttgtgtttgacccgcgggcgccggtggcgcgcggccgaggccggtgtcggcggggcggggcggtcgcggcggaggcagaggaagagggagcgggagctctgcgaggccgggcgccgccatggaactgggcccggagcccccgcaccgccgccgcctgctcttcgcctgcagcccccctcccgcgtcgcagcccgtcgtgaaggcgctatttggcgcttcagccgccgggggactgtcgcctgtcaccaacctgaccgtcactatggaccagctgcagggtctgggcagtgattatgagcaaccactggaggtgaagaacaacagtaatctgcagagaatgggctcctccgagtcaacagattcaggtttctgtctagattctcctgggccattggacagtaaagaaaaccttgaaaatcctatgagaagaatacattccctacctcagaagctgttgggatgtagtccagctctgaagaggagccattctgattctcttgaccatgacatctttcagctcatcgacccagatgagaacaaggaaaatgaagcctttgagtttaagaagccagtaagacctgtatctcgtggctgcctgcactctcatggactccaggagggtaaagatctcttcacacagaggcagaactctgccccagctcggatgctttcctcaaatgaaagagatagcagtgaaccagggaatttcattcctctttttacaccccagtcacctgtgacagccactttgtctgatgaggatgatggcttcgtggaccttctcgatggagagaatctgaagaatgaggaggagaccccctcgtgcatggcaagcctctggacagctcctctcgtcatgagaactacaaaccttgacaaccgatgcaagctgtttgactccccttccctgtgtagctccagcactcggtcagtgttgaagagaccagaacgatctcaagaggagtctccacctggaagtacaaagaggaggaagagcatgtctggggccagccccaaagagtcaactaatccagagaaggcccatgagactcttcatcagtctttatccctggcatcttcccccaaaggaaccattgagaacattttggacaatgacccaagggaccttataggagacttctccaagggttatctctttcatacagttgctgggaaacatcaggatttaaaatacatctctccagaaattatggcatctgttttgaatggcaagtttgccaacctcattaaagagtttgttatcatcgactgtcgatacccatatgaatacgagggaggccacatcaagggtgcagtgaacttgcacatggaagaagaggttgaagacttcttattgaagaagcccattgtacctactgatggcaagcgtgtcattgttgtgtttcactgcgagttttcttctgagagaggtccccgcatgtgccggtatgtgagagagagagatcgcctgggtaatgaataccccaaactccactaccctgagctgtatgtcctgaaggggggatacaaggagttctttatgaaatgccagtcttactgtgagccccctagctaccggcccatgcaccacgaggactttaaagaagacctgaagaagttccgcaccaagagccggacctgggcaggggagaagagcaagagggagatgtacagtcgtctgaagaagctctgagggcggcaggaccagccagcagcagcccaagcttccctccatccccctttaccctctttgctgcagagaaacttaagcaaaggggacagctgtgtgacatttggagagggggcctgggacttccatgccttaaacctacctcccacactcccaaggttggagcccagggcatcttgctggctacgcctcttctgtccctgttagacgtcctccgtccatatcagaactgtgccacaatgcagttctgagcaccgtgtcaagctgctctgagccacagtgggatgaaccagccggggccttatcgggctccagccatctcatgaggggagaggagacggaggggagtagagaagttacacagaaatgctgctggccaaatagcaaagacaacctgggaaggaaaggtctttgtgggataatccatatgtttaatttattcaacttcatcaatcactttattttatttttttttctaactcctggagacttattttactgcttcattaggttgaaatactgccattctaggtagggttttattatcccagggactacctcggcttttaatttaaaaaaaaaaaagaagtgggtaagaaaatgcaaacctgttataagttatcggacagaaagctaggtgctctgtcacccccaggaggcgctgtggtactggggctgctgctatttaagccaagaactgaggtcctggtgagagcgttggacccaggcttggctgcctgacataagctaaatctcccagacccaccactggctaccgatatctatttggtgggaggtgtggccctgttcttcctcaccccagttccatgacattggctggtataggagccacagtcaggaaagcacttgaggcagcatctgttgggccacccccggctcagtgctggaatgttgcagtgtaggtttcccagggaaggggggtgggggtaggtgggctccacaggatgggggaggagcatgtccactgagtatcttccttatgttgctgtgatattgatagcttttattttctaatttttaaaaaatggtcatattatgagtcaaagagtatcaaatcagtgttggatggaccacccaagggtgaggagaggggctggaagccctgggcattaggagaagggagtgggtgctggcatggacatgactggatagaattttctcaggagggagcttggtggattttgaaggtaaaactttctgggtttatcatgttttaattttagagacagggagtgatgaatcatcaccggttgtccccttatctaactccataaaagtgggaatttcaaaagaacacctcatccaaggagctggggcagacttcattgattctagagagacctgtttcagtgcctactcatccctgccctctggtgccagcctccttaccatcacggcttcactgaggtgtaggtgggtttttcttaaacaggagacagtctctcccctcttacctcaacttcttggggtgggaatcagtgatactggagatggctagttgctgtgttacgggtttgagttacatttggctataaaacaatcttgttgggaaaaatgtgggggagaggacttcttcctacacgcgcattgagacagattccaactggttaatgatattgtttgtaagaaagagattctgttggttgactgcctaaagagaaaggtgggatggccttcagattataccagcttagctagcattactaaccaactgttggaagctctgaaaataaaagatcttgaacccataaaaaaaaaaa

SEQ ID NO: 1544 - DNA, 1534 bp, Homo Sapiens
  NM_001799
ggaacgccaaccgcctgggcctagcgcagcttcctccgcccaccacggaagtgaggcggggatactaaagcgacggagcccggtggacggaagtgggtgttggaggctttaaggtagctttaaattcgtgttgtcctgggagctcgcccttttcggctggagtcgggctttacggcgccggatggctctggacgtgaagtctcgggcaaagcgttatgagaagctggacttccttggggagggacagtttgccaccgtttacaaggccagagataagaacaccaaccaaattgtcgccattaagaaaatcaaacttggacatagatcagaagctaaagatggtataaatagaaccgccttaagagagataaaattattacaggagctaagtcatccaaatataattggtctccttgatgcttttggacataaatctaatattagccttgtctttgattttatggaaactgatctagaggttataataaaggataatagtcttgtgctgacaccatcacacatcaaagcctacatgttgatgactcttcaaggattagaatatttacatcaacattggatcctacatagggatctgaaaccaaacaacttgttgctagatgaaaatggagttctaaaactggcagattttggcctggccaaatcttttgggagccccaatagagcttatacacatcaggttgtaaccaggtggtatcgggcccccgagttactatttggagctaggatgtatggtgtaggtgtggacatgtgggctgttggctgtatattagcagagttacttctaagggttccttttttgccaggagattcagaccttgatcagctaacaagaatatttgaaactttgggcacaccaactgaggaacagtggccggacatgtgtagtcttccagattatgtgacatttaagagtttccctggaatacctttgcatcacatcttcagtgcagcaggagacgacttactagatctcatacaaggcttattcttatttaatccatgtgctcgaattacggccacacaggcactgaaaatgaagtatttcagtaatcggccagggccaacacctggatgtcagctgccaagaccaaactgtccagtggaaaccttaaaggagcaatcaaatccagctttggcaataaaaaggaaaagaacagaggccttagaacaaggaggattgcccaagaaactaattttttaaagagaacactggacaacattttactactgagggaaatagccaaaaaggcaaataatggaaaaatagtaaacattaagtaaatgctgtagaagtgagtttgtaaatattctacacatgtaaaatatgtaaaactatgggttatttttattaaatgtattttaaaataaaaatttaattctggtttttctgattagagtgcaaaagtgagaaaagttcaatactcttgaaatgtagaattgaaaatgcattagggaaaacttaataaaaattattaccagttatttggaagatctgaaaaaaaaaaaaaaaaaa

SEQ ID NO: 1545 - DNA, 1416 bp, Homo Sapiens
  NM_001800
ggagggagggtgagttagggggagacccggcccccaaggggcgggcgccgggcagggccccgcgggcggccgagggttgggcccggctcccagcccctcgccgtcctccggctgacagggggaggagcccgccgggagggccggggtctcgggctggggagccgggacgggagagcagcgcagccgggtgcaccgcggccgcgccccgggagggctgttcgggccagcgcccgccggctgctccgcgctgacagcgccgggctggggcggggcggggggctttgcaggccgccagtgtcgacatgctgctggaggaggttcgcgccggcgaccggctgagtggggcggcggcccggggcgacgtgcaggaggtgcgccgccttctgcaccgcgagctggtgcatcccgacgccctcaaccgcttcggcaagacggcgctgcaggtcatgatgtttggcagcaccgccatcgccctggagctgctgaagcaaggtgccagccccaatgtccaggacacctccggtaccagtccagtccatgacgcagcccgcactggattcctggacaccctgaaggtcctagtggagcacggggctgatgtcaacgtgcctgatggcaccggggcacttccaatccatctggcagttcaagagggtcacactgctgtggtcagctttctggcagctgaatctgatctccatcgcagggacgccaggggtctcacacccttggagctggcactgcagagaggggctcaggacctcgtggacatcctgcagggccacatggtggccccgctgtgatctggggtcaccctctccagcaagagaaccccgtggggttatgtatcagaagagaggggaagaaacactttctcttcttgtttctcctgcccactgctgcagtaggggaggagcacagtttgtggcttataggtgttggttttgggggtgtgagtgtttgggggacgtttctcatttgtttttctcactccttttggtgtgttggacagagaagggctcctgcaggccacagccacctaaacggttcagtttcttctgcgcctcaggctgctggggcctcagacgagacccaagggcagagcatttaagagtgaagtcatgacctccagggagcctagaagctggtggccttggccggctgtgctcagagacctgaagtgtgcacgttgcttcaggcatggggggtggggggagcgtcccaaatcaataagaaggtagaatgagttatgagttattcatattctgttggaagcttgttttccagtctcttgtacagcgttttaaaagaaatggattctatttattatgctttattggaaaaaatgttgtaataatttaatgtttttacccattaaattaagacttgtgcatgatcaaaaaaaaaaaaaaaaaa

SEQ ID NO: 1546 - DNA, 2702 bp, Homo Sapiens
  NM_001802
gccaaagtgccacgttgggcccggcggcggcgtgaagactggcggctgcgtgagactccggctccaggcgttcgcaccgtaatgcccggccgttggggccgtcggtaggcgcgaggcgagtcgaggcagccggccggtcggcggccgccggcgggaacggggctgaggcggcgcagcggagtctgggcggcggcgcgtcccgcccgagggcggctctggctgagggcggaggggccggggaagagcccggggcagcggctgaggcgggacggcggcgggggccgctgcccctagaagacccagccgagatgctggcggaaaacctggtagaggagtttgagatgaaggaggacgagccgtggtacgaccaccaggacctccagcaagatcttcaacttgctgctgagcttgggaagacattactggatcggaacacagagttggaggactctgttcagcagatgtatacaaccaatcaggagcagttacaggaaattgagtatctgacgaagcaagtggaacttctacggcagatgaacgaacaacatgcaaaggtttatgaacaattagacgtcacagcaagggaactggaagaaacaaatcaaaagctagttgctgacagcaaggcctcacagcaaaagattctgagcctgactgaaacgattgaatgcctgcaaaccaacattgatcacctccagagccaagtggaggagctgaagtcatctggccaagggagaaggagcccgggaaagtgtgaccaggagaaaccggcacccagctttgcatgtctgaaggagctgtatgacctccgccaacacttcgtgtatgatcatgtgttcgctgagaagatcacttccttgcaaggtcagccaagccctgatgaagaggaaaatgagcacttgaaaaaaacagtgacaatgttgcaggcccagctgagcctggagcggcagaagcgggtgactatggaggaggaatatgggctcgtgttaaaggagaacagtgaactggagcagcagctgggggccacaggtgcctaccgagcacgggcgctggaactagaggccgaggtggcagagatgcgacagatgttgcagtcagagcatccatttgtgaatggagttgagaagctggtgccagactctctgtatgttcctttcaaagagcccagccagagcctgctggaagagatgttcctgactgtgccggaatcacatagaaagcctctcaagcgcagcagcagtgagacgatcctcagcagcttggcagggagtgacatcgtgaagggccacgaggagacctgcatcaggagggccaaggctgtgaaacagaggggcatctcccttctgcacgaagtggacacgcagtacagcgccctgaaggtgaagtatgaagagttgctgaagaagtgccaagaggaacaggactccctgtcacacaaggctgtgcagacctccagggctgcagccaaggacctgactggagtgaacgcccagtctgagcctgttgccagcggctgggaactggcctctgtcaacccagagcccgtgagttcccctacaacacctccagaatacaaagcgttgtttaaggagatctttagttgcatcaagaaaactaagcaggaaatagatgaacagagaacaaaataccgatcactctcctctcattcttaattgaacctctagctctactactaatttgcctattgcctatcgcctctctctcccattcagacaagtgtttgtagactctgaagcctaatgttactcatgacgtttgcctcattgctttgcttatttagcaaatgcatacaacgaggaaaggaggtggctagtggtatcagttctctgatccacttccatttaagctccccaggaaatcccatgacaaactggcctctggctggcgcgctgattagacttcagttcctgaaaaggaccagtggagggaagagctatacttctggagaagtaggcctggagttactacagtatgggggaaaagggtcgagttagaacaaagctaaggcaattcctattgcttccttgcgcaacttctcaaaacgatgaaagtcagaaggctgtcaaactcaaatatctttgcaaacagtttgaatactgtgaattcattacgaagaatgttcgagagaaagcaggggtctaatccaaaagaaatgtcattaaccaatactccaagtccttgagttttgttatatctgaactagttgaactgtgactgacaggtaatcctaatatatccaaatccaactgaataccaaattgagatggcaaatttttgtttgatataagttagcttgttagcatatgccctagagggcctccatccctgtattctaatgtttttactcaaagctctagcctttaggataggtgaatatgtaaatcttttatcactttctcaaattcaaactaaaggggaaagatcaaaccccttcccttcctacctgttttctgagctggctgacttgccagccacaagctgctcttgcagagttcttaccattcctgtaaatgttttgacttgttgcagaaattcctatctactttattaagcagtattgatctgactgtggaaacatcctctcacttgcattcttttaacttaaaactatttaagaactgatgttccgattattgtatatatttttctaaaaaccaaataaagctacctatgaaaatgaa

SEQ ID NO: 1547 - DNA, 523 bp, Homo Sapiens
  NM_001803
ctcctggttcaaaagcagctaaaccaaaagaagcctccagacagccctgagatcacctaaaaagctgctaccaagacagccacgaagatcctaccaaaatgaagcgcttcctcttcctcctactcaccatcagcctcctggttatggtacagatacaaactggactctcaggacaaaacgacaccagccaaaccagcagcccctcagcatccagcaacataagcggaggcattttccttttcttcgtggccaatgccataatccacctcttctgcttcagttgaggtgacacgtctcagccttagccctgtgccccctgaaacagctgccaccatcactcgcaagagaatcccctccatctttgggaggggttgatgccagacatcaccaggttgtagaagttgacaggcagtgccatgggggcaacagccaaaataggggggtaatgatgtaggggccaagcagtgcccagctgggggtcaataaagttacccttgtacttgcaaaaaaaaaaaaaaaaaaa

SEQ ID NO: 1548 - DNA, 1250 bp, Homo Sapiens
  NM_001805
gagagaggccacacaggagtgggtgacagaggagactgcagagggcaggtctagggcagaagatcgagagagggcaggcccaggtcaggaggaggtagagagagggcagccggagcaccccaaggggtgcctcaagagcaggtgggggcggggagccgagggggcgggccggccatgtcccacgggacctactacgagtgtgagccccggggtggccagcagccactcgagttctcagggggccgagctgggcccggggagctaggggacatgtgtgagcatgaggcctccattgacctctccgcctacatcgagtctggggaagagcagcttctctccgatctctttgccgtgaagccagcgcctgaggccagaggcctcaagggccccggaacccctgccttcccccactacttgccgcctgaccctcggccctttgcctaccctccacataccttcggcccagacaggaaggcgctggggcctggcatctacagcagcccagggagctacgaccccagggctgtggcggtgaaggaggagccccgggggccagagggcagccgagctgccagccgaggcagctacaatcccctgcagtaccaagtggcacactgtgggcagacagccatgcacctgcccccaactctggcagcacccggccagcctctgcgcgttctcaaggcccctttggccactgccgcacccccctgcagtcccctcctgaaggcgccctccccggctggccccttacacaagggcaagaaggcagtgaacaaagatagccttgagtaccggctgaggcgggagcgcaacaacatcgccgtgcgcaagagccgagacaaggccaagaggcgcattctggagacgcagcagaaggtgctggagtacatggcagagaacgagcgcctccgcagccgcgtggagcagctcacccaggagctagacaccctccgcaacctcttccgccagattcctgaggcggccaacctcatcaagggcgtggggggttgcagctgaggctggctggtggattgtgggcaccaggctccctggcacggcctaactctgcggacccccatcctgctgggggcctagaaccctgagacatagaccatggataaatggcaaccggggtggcaaagagggcaggacccagcataatgattatatggctgaataaagttgcactgtgactgggaaaaaaaaaaaaaaaaaaaaaaaaaaaaaaaaaaaaaaaaaaaaaaaaa

SEQ ID NO: 1549 - DNA, 2384 bp, Homo Sapiens
  NM_001807
ggccacccagaggctgatgctcaccatggggcgcctgcaactggttgtgttgggcctcacctgctgctgggcagtggcgagtgccgcgaagctgggcgccgtgtacacagaaggtgggttcgtggaaggcgtcaataagaagctcggcctcctgggtgactctgtggacatcttcaagggcatccccttcgcagctcccaccaaggccctggaaaatcctcagccacatcctggctggcaagggaccctgaaggccaagaacttcaagaagagatgcctgcaggccaccatcacccaggacagcacctacggggatgaagactgcctgtacctcaacatttgggtgccccagggcaggaagcaagtctcccgggacctgcccgttatgatctggatctatggaggcgccttcctcatggggtccggccatggggccaacttcctcaacaactacctgtatgacggcgaggagatcgccacacgcggaaacgtcatcgtggtcaccttcaactaccgtgtcggcccccttgggttcctcagcactggggacgccaatctgccaggtaactatggccttcgggatcagcacatggccattgcttgggtgaagaggaatatcgcggccttcgggggggaccccaacaacatcacgctcttcggggagtctgctggaggtgccagcgtctctctgcagaccctctccccctacaacaagggcctcatccggcgagccatcagccagagcggcgtggccctgagtccctgggtcatccagaaaaacccactcttctgggccaaaaaggtggctgagaaggtgggttgccctgtgggtgatgccgccaggatggcccagtgtctgaaggttactgatccccgagccctgacgctggcctataaggtgccgctggcaggcctggagtaccccatgctgcactatgtgggcttcgtccctgtcattgatggagacttcatccccgctgacccgatcaacctgtacgccaacgccgccgacatcgactatatagcaggcaccaacaacatggacggccacatcttcgccagcatcgacatgcctgccatcaacaagggcaacaagaaagtcacggaggaggacttctacaagctggtcagtgagttcacaatcaccaaggggctcagaggcgccaagacgacctttgatgtctacaccgagtcctgggcccaggacccatcccaggagaataagaagaagactgtggtggactttgagaccgatgtcctcttcctggtgcccaccgagattgccctagcccagcacagagccaatgccaagagtgccaagacctacgcctacctgttttcccatccctctcggatgcccgtctaccccaaatgggtgggggccgaccatgcagatgacattcagtacgttttcgggaagcccttcgccacccccacgggctaccggccccaagacaggacagtctctaaggccatgatcgcctactggaccaactttgccaaaacaggggaccccaacatgggcgactcggctgtgcccacacactgggaaccctacactacggaaaacagcggctacctggagatcaccaagaagatgggcagcagctccatgaagcggagcctgagaaccaacttcctgcgctactggaccctcacctatctggcgctgcccacagtgaccgaccaggaggccacccctgtgccccccacaggggactccgaggccactcccgtgccccccacgggtgactccgagaccgcccccgtgccgcccacgggtgactccggggccccccccgtgccgcccacgggtgactccggggccccccccgtgccgcccacgggtgactccggggccccccccgtgccgcccacgggtgactccggggccccccccgtgccgcccacgggtgactccggggccccccccgtgccgcccacgggtgactccggggccccccccgtgccgcccacgggtgactccggggccccccccgtgccgcccacgggtgactccggcgccccccccgtgccgcccacgggtgacgccgggcccccccccgtgccgcccacgggtgactccggcgccccccccgtgccgcccacgggtgactccggggccccccccgtgacccccacgggtgactccgagaccgcccccgtgccgcccacgggtgactccggggccccccctgtgccccccacgggtgactctgaggctgcccctgtgccccccacagatgactccaaggaagctcagatgcctgcagtcattaggttttagcgtcccatgagccttggtatcaagaggccacaagagtgggaccccaggggctcccctcccatcttgagctcttcctgaataaagcctcatacccctg

SEQ ID NO: 1550 - DNA, 2856 bp, Homo Sapiens
  NM_001810
gcccgccgcccggcgacgcgcccgccggcgtccccggaggtgcccccggcccggccgggtcgtcgccccgccgccgcgcccgcgagccgctttgtctcgggcggggcgcgcgggagaggccgccaggtgccccccgccacgggcccgggccccccgccccggggcggcggcggcggcgccgggccccggggcggggggcgcgccgggatgggccccaagaggcgacagctgacgttccgggagaagtcacggatcatccaggaggtggaggagaatccggacctgcgcaagggcgagatcgcgcggcgcttcaacatcccgccgtccacgctgagcacgatcctgaagaacaagcgcgccatcctggcgtcggagcgcaagtacggggtggcctccacctgccgcaagaccaacaagctgtctccctacgacaagctcgagggcttgctcatcgcctggttccagcagatccgcgccgccggcctgccggtcaagggcatcatcctcaaggagaaggcgctgcgcatagccgaggagctgggcatggacgacttcaccgcctccaacggctggctggaccgcttccgccggcgccacggcgtggtgtcctgcagcggcgtggcccgcgcccgcgcgcgaaacgctgccccccgcaccccggcggcgcctgccagtccggccgcggtgccctcggagggcagtggcgggagcactactggttggcgcgctcgggaggagcagccgccgtcggtggccgagggctacgcctcgcaggacgtgttcagcgccaccgagaccagtctatggtacgacttcctgcccgaccaggccgcggggctgtgcggaggcgacggacggccgcgtcaagccacccagcgcctgagcgtcctgctatgcgccaatgccgacggcagcgagaagctgcccccgctggtggccggcaagtcggccaagccccgcgcaggccaagccggcctgccctgcgactacaccgccaactccaagggtggtgtcaccacccaggccctggccaagtacttgaaggccttggacacccgaatggctgcagagtctcgccgggtcctgctgttggccggccgcttggctgcccagtccttggacacctcgggcctgcggcatgtgcagctggccttcttccctcccggcaccgtgcatccgctggagaggggagtggtccagcaggtgaagggccactaccgccaggccatgctgctcaaggccatggccgcgctagagggccaggatccctcaggcctgcagctgggtctcacggaggccctgcactttgtggctgccgcctggcaggcagtggagccttcggacatagccgcctgctttcgtgaggctggctttgggggtggccctaatgccaccatcaccacttccctcaagagtgagggagaggaagaggaggaggaggaggaagaagaggaggaggaagagggtgaaggagaggaagaggaggaggaaggggaggaggaggaggaggaagggggggaaggagaggaattgggggaggaagaggaggtggaggaggagggtgatgttgatagtgatgaagaagaggaggaagatgaggagagctcctcggagggcttggaggctgaggactgggcccagggagtagtggaggccggtggcagcttcggggcttatggtgcccaggaggaagcccagtgccctactctgcatttcctggaaggtggggaggactctgattcagacagtgaggaagaggacgatgaggaagaggatgatgaagatgaagacgacgatgatgatgaggaggatggtgatgaggtgcctgtacccagctttggggaggccatggcttactttgccatggtcaagaggtacctgacctccttccccattgatgaccgcgtgcagagccacatcctccacttggaacacgatctggttcatgtgaccaggaagaaccacgccaggcaggcgggagttcgaggtcttggacatcaaagctgagtcactggacctagctgtgcccccaacctagattggcagcaccaccccagggcagaggactctctgggcacccgctgtgcatggagccagagtgcagagccccagatcctttagtaatgcttcccctggtcctgcaacaggcccggtcacctcggccgggcccggggctgaggtcagcctcactgcctgcttattgcctctttctcagaatcctctttcctccccatttggccctgggctcaggggaccaggtggggcgggtggggagctgtccggtgctaccacaccgtgccctcagtggactaaccacagcagcagccagggatgggccctggaggttcccggccggagagtgcctctcccctctgccatccacgtcaggtctttggtggggggaccccaaagccattctgggaagggctccagaagaaggtccagcctaggccccctgcaaggctggcagcccccacccccaccccccaggccgccttgagaagcacagtttaactcactgcgggctcctgagcctgcttctgcctgctttccacctccccagtccctttctctggccctgtccatgtgactttggcccttggttttctttccagattggaggtttccaagaggccccccaccgtggaagtaaccaagggcgcttccttgtgggcagctgcaggccccatgcctctcctccctctctggcagggccccatcctgggcagaggggcctggggctgggcccagagtccagccgtccagctgctcctttcccagtttgatttcaataaatctgtccactccccttttgtgggggtgaacgttttaacagccaaaaaaaaaaaaaaaaaa

SEQ ID NO: 1551 - DNA, 8630 bp, Homo Sapiens
  NM_001813
taaatttaaaggcggggcggcctgtgagccctgaagtgccggccgcggagggtcctggccattttcctgggaccagttcagcctgataggatggcggaggaaggagccgtggccgtctgcgtgcgagtgcggccgctgaacagcagagaagaatcacttggagaaactgcccaagtttactggaaaactgacaataatgtcatttatcaagttgatggaagtaaatccttcaattttgatcgtgtctttcatggtaatgaaactaccaaaaatgtgtatgaagaaatagcagcaccaatcatcgattctgccatacaaggctacaatggtactatatttgcctatggacagactgcttcaggaaaaacatataccatgatgggttcagaagatcatttgggagttatacccagggcaattcatgacattttccaaaaaattaagaagtttcctgatagggaatttctcttacgtgtatcttacatggaaatatacaatgaaaccattacagatttactctgtggcactcaaaaaatgaaacctttaattattcgagaagatgtcaataggaatgtgtatgttgctgatctcacagaagaagttgtatatacatcagaaatggctttgaaatggattacaaagggagaaaagagcaggcattatggagaaacaaaaatgaatcaaagaagcagtcgttctcataccatctttaggatgattttggaaagcagagagaagggtgaaccttctaattgtgaaggatctgttaaggtatcccatttgaatttggttgatcttgcaggcagtgaaagagctgctcaaacaggcgctgcaggtgtgcggctcaaggaaggctgtaatataaatcgaagcttatttattttgggacaagtgatcaagaaacttagtgatggacaagttggtggtttcataaattatcgagatagcaagttaacacgaattctccagaattccttgggaggaaatgcaaagacacgtattatctgcacaattactccagtatcttttgatgaaacacttactgctctccagtttgccagtactgctaaatatatgaagaatactccttatgttaatgaggtatcaactgatgaagctctcctgaaaaggtatagaaaagaaataatggatcttaaaaaacaattagaggaggtttctttagagacgcgggctcaggcaatggaaaaagaccaattggcccaacttttggaagaaaaagatttgcttcagaaagtacagaatgagaaaattgaaaacttaacacggatgctggtgacctcttcttccctcacgttgcaacaggaattaaaggctaaaagaaaacgaagagttacttggtgccttggcaaaattaacaaaatgaagaactcaaactatgcagatcaatttaatataccaacaaatataacaacaaaaacacataagctttctataaatttattacgagaaattgatgaatctgtctgttcagagtctgatgttttcagtaacactcttgatacattaagtgagatagaatggaatccagcaacaaagctactaaatcaggagaatatagaaagtgagttgaactcacttcgtgctgactatgataatctggtattagactatgaacaactacgaacagaaaaagaagaaatggaattgaaattaaaagaaaagaatgatttggatgaatttgaggctctagaaagaaaaactaaaaaagatcaagagatgcaactaattcatgaaatttcgaacttaaagaatttagttaagcatgcagaagtatataatcaagatcttgagaatgaactcagttcaaaagtagagctgcttagagaaaaggaagaccagattaagaagctacaggaatacatagactctcaaaagctagaaaatataaaaatggacttgtcatactcattggaaagcattgaagacccaaaacaaatgaagcagactctgtttgatgctgaaactgtagcccttgatgccaagagagaatcagcctttcttagaagtgaaaatctggagctgaaggagaaaatgaaagaacttgcaactacatacaagcaaatggaaaatgatattcagttatatcaaagccagttggaggcaaaaaagaaaatgcaagttgatctggagaaagaattacaatctgcttttaatgagataacaaaactcacctcccttatagatggcaaagttccaaaagatttgctctgtaatttggaattggaaggaaagattactgatcttcagaaagaactaaataaagaagttgaagaaaatgaagctttgcgggaagaagtcattttgctttcagaattgaaatctttaccttctgaagtagaaaggctgaggaaagagatacaagacaaatctgaagagctccatataataacatcagaaaaagataaattgttttctgaagtagttcataaggagagtagagttcaaggtttacttgaagaaattgggaaaacaaaagatgacctagcaactacacagtcgaattataaaagcactgatcaagaattccaaaatttcaaaacccttcatatggactttgagcaaaagtataagatggtccttgaggagaatgagagaatgaatcaggaaatagttaatctctctaaagaagcccaaaaatttgattcgagtttgggtgctttgaagaccgagctttcttacaagacccaagaacttcaggagaaaacacgtgaggttcaagaaagactaaatgagatggaacagctgaaggaacaattagaaaatagagattctacgctgcaaactgtagaaagggagaaaacactgattactgagaaactgcagcaaactttagaagaagtaaaaactttaactcaagaaaaagatgatctaaaacaactccaagaaagcttgcaaattgagagggaccaactcaaaagtgatattcacgatactgttaacatgaatatagatactcaagaacaattacgaaatgctcttgagtctctgaaacaacatcaagaaacaattaatacactaaaatcgaaaatttctgaggaagtttccaggaatttgcatatggaggaaaatacaggagaaactaaagatgaatttcagcaaaagatggttggcatagataaaaaacaggatttggaagctaaaaatacccaaacactaactgcagatgttaaggataatgagataattgagcaacaaaggaagatattttctttaatacaggagaaaaatgaactccaacaaatgttagagagtgttatagcagaaaaggaacaattgaagactgacctaaaggaaaatattgaaatgaccattgaaaaccaggaagaattaagacttcttggggatgaacttaaaaagcaacaagagatagttgcacaagaaaagaaccatgccataaagaaagaaggagagctttctaggacctgtgacagactggcagaagttgaagaaaaactaaaggaaaagagccagcaactccaagaaaaacagcaacaacttcttaatgtacaagaagagatgagtgagatgcagaaaaagattaatgaaatagagaatttaaagaatgaattaaagaacaaagaattgacattggaacatatggaaacagagaggcttgagttggctcagaaacttaatgaaaattatgaggaagtgaaatctataaccaaagaaagaaaagttctaaaggaattacagaagtcatttgaaacagagagagaccaccttagaggatatataagagaaattgaagctacaggcctacaaaccaaagaagaactaaaaattgctcatattcacctaaaagaacaccaagaaactattgatgaactaagaagaagcgtatctgagaagacagctcaaataataaatactcaggacttagaaaaatcccataccaaattacaagaagagatcccagtgcttcatgaggaacaagagttactgcctaatgtgaaagaagtcagtgagactcaggaaacaatgaatgaactggagttattaacagaacagtccacaaccaaggactcaacaacactggcaagaatagaaatggaaaggctcaggttgaatgaaaaatttcaagaaagtcaggaagagataaaatctctaaccaaggaaagagacaaccttaaaacgataaaagaagcccttgaagttaaacatgaccagctgaaagaacatattagagaaactttggctaaaatccaggagtctcaaagcaaacaagaacagtccttaaatatgaaagaaaaagacaatgaaactaccaaaatcgtgagtgagatggagcaattcaaacccaaagattcagcactactaaggatagaaatagaaatgctcggattgtccaaaagacttcaagaaagtcatgatgaaatgaaatctgtagctaaggagaaagatgacctacagaggctgcaagaagttcttcaatctgaaagtgaccagctcaaagaaaacataaaagaaattgtagctaaacacctggaaactgaagaggaacttaaagttgctcattgttgcctgaaagaacaagaggaaactattaatgagttaagagtgaatctttcagagaaggaaactgaaatatcaaccattcaaaagcagttagaagcaatcaatgataaattacagaacaagatccaagagatttatgagaaagaggaacaatttaatataaaacaaattagtgaggttcaggaaaaagtgaatgaactgaaacaattcaaggagcatcgcaaagccaaggattcagcactacaaagtatagaaagtaagatgctcgagttgaccaacagacttcaagaaagtcaagaagaaatacaaattatgattaaggaaaaagaggaaatgaaaagagtacaggaggcccttcagatagagagagaccaactgaaagaaaacactaaagaaattgtagctaaaatgaaagaatctcaagaaaaagaatatcagtttcttaagatgacagctgtcaatgagactcaggagaaaatgtgtgaaatagaacacttgaaggagcaatttgagacccagaagttaaacctggaaaacatagaaacggagaatataaggttgactcagatactacatgaaaaccttgaagaaatgagatctgtaacaaaagaaagagatgaccttaggagtgtggaggagactctcaaagtagagagagaccagctcaaggaaaaccttagagaaactataactagagacctagaaaaacaagaggagctaaaaattgttcacatgcatctgaaggagcaccaagaaactattgataaactaagagggattgtttcagagaaaacaaatgaaatatcaaatatgcaaaaggacttagaacactcaaatgatgccttaaaagcacaggatctgaaaatacaagaggaactaagaattgctcacatgcatctgaaagagcagcaggaaactattgacaaactcagaggaattgtttctgagaagacagataaactatcaaatatgcaaaaagatttagaaaattcaaatgctaaattacaagaaaagattcaagaacttaaggcaaatgaacatcaacttattacgttaaaaaaagatgtcaatgagacacagaaaaaagtgtctgaaatggagcaactaaagaaacaaataaaagaccaaagcttaactctgagtaaattagaaatagagaatttaaatttggctcagaaacttcatgaaaaccttgaagaaatgaaatctgtaatgaaagaaagagataatctaagaagagtagaggagacactcaaactggagagagaccaactcaaggaaagcctgcaagaaaccaaagctagagatctggaaatacaacaggaactaaaaactgctcgtatgctatcaaaagaacacaaagaaactgttgataaacttagagaaaaaatttcagaaaagacaattcaaatttcagacattcaaaaggatttagataaatcaaaagatgaattacagaaaaagatccaagaacttcagaaaaaagaacttcaactgcttagagtgaaagaagatgtcaatatgagtcataaaaaaattaatgaaatggaacagttgaagaagcaatttgaggcccaaaacttatctatgcaaagtgtgagaatggataacttccagttgactaagaaacttcatgaaagccttgaagaaataagaattgtagctaaagaaagagatgagctaaggaggataaaagaatctctcaaaatggaaagggaccaattcatagcaaccttaagggaaatgatagctagagaccgacagaaccaccaagtaaaacctgaaaaaaggttactaagtgatggacaacagcaccttacggaaagcctgagagaaaagtgctctagaataaaagagcttttgaagagatactcagagatggatgatcattatgagtgcttgaatagattgtctcttgacttggagaaggaaattgaattccaaaaagagctttcaatgagagttaaagcaaacctctcacttccctatttacaaaccaaacacattgaaaaactttttactgcaaaccagagatgctccatggaattccacagaatcatgaagaaactgaagtatgtgttaagctatgttacaaaaataaaagaagaacaacatgaatccatcaataaatttgaaatggattttattgatgaagtggaaaagcaaaaggaattgctaattaaaatacagcaccttcaacaagattgtgatgtaccatccagagaattaagggatctcaaattgaaccagaatatggatctacatattgaggaaattctcaaagatttctcagaaagtgagttccctagcataaagactgaatttcaacaagtactaagtaataggaaagaaatgacacagtttttggaagagtggttaaatactcgttttgatatagaaaagcttaaaaatggcatccagaaagaaaatgataggatttgtcaagtgaataacttctttaataacagaataattgccataatgaatgaatcaacagagtttgaggaaagaagtgctaccatatccaaagagtgggaacaggacctgaaatcactgaaagagaaaaatgaaaaactatttaaaaactaccaaacattgaagacttccttggcatctggtgcccaggttaatcctaccacacaagacaataagaatcctcatgttacatcaagagctacacagttaaccacagagaaaattcgagagctggaaaattcactgcatgaagctaaagaaagtgctatgcataaggaaagcaagattataaagatgcagaaagaacttgaggtgactaatgacataatagcaaaacttcaagccaaagttcatgaatcaaataaatgccttgaaaaaacaaaagagacaattcaagtacttcaggacaaagttgctttaggagctaagccatataaagaagaaattgaagatctcaaaatgaagcttgtgaaaatagacctagagaaaatgaaaaatgccaaagaatttgaaaaggaaatcagtgctacaaaagccactgtagaatatcaaaaggaagttataaggctattgagagaaaatctcagaagaagtcaacaggcccaagatacctcagtgatatcagaacatactgatcctcagccttcaaataaacccttaacttgtggaggtggcagcggcattgtacaaaacacaaaagctcttattttgaaaagtgaacatataaggctagaaaaagaaatttctaagttaaagcagcaaaatgaacagctaataaaacaaaagaatgaattgttaagcaataatcagcatctttccaatgaggtcaaaacttggaaggaaagaacccttaaaagagaggctcacaaacaagtaacttgtgagaattctccaaagtctcctaaagtgactggaacagcttctaaaaagaaacaaattacaccctctcaatgcaaggaacggaatttacaagatcctgtgccaaaggaatcaccaaaatcttgtttttttgatagccgatcaaagtctttaccatcacctcatccagttcgctattttgataactcaagtttaggcctttgtccagaggtgcaaaatgcaggagcagagagtgtggattctcagccaggtccttggcacgcctcctcaggcaaggatgtgcctgagtgcaaaactcagtagactcctctttgtcacttctctggagatccagcattccttatttggaaatgactttgtttatgtgtctatccctggtaatgatgttgtagtgcagcttaatttcaattcagtctttactttgccactagagttgaaagataagggaacaggaaatgaatgcattgtggtaatttagaatggtgatagcaataccttcttcttgcatatggtaatacttttaaaagttgaattgttttatttatttgtatattttgtaaagaataaagttattgaaagaaatgtaaagttatctacatgacttagcatattccaaagcataatacatacattaatataaaacatcattttattaacaaaattgtaaatgtttttaataccttacacattcaataaatgtttagtagttctgaatcaccaaaaaaaaaaaaaaaaaa

SEQ ID NO: 1552 - DNA, 1924 bp, Homo Sapiens
  NM_001814
cgtagctatttcaaggcgcgcgcctcgtggtggactcaccgctagcccgcagcgctcggcttcctggtaattcttcacctcttttctcagctccctgcagcatgggtgctgggccctccttgctgctcgccgccctcctgctgcttctctccggcgacggcgccgtgcgctgcgacacacctgccaactgcacctatcttgacctgctgggcacctgggtcttccaggtgggctccagcggttcccagcgcgatgtcaactgctcggttatgggaccacaagaaaaaaaagtagtggtgtaccttcagaagctggatacagcatatgatgaccttggcaattctggccatttcaccatcatttacaaccaaggctttgagattgtgttgaatgactacaagtggtttgccttttttaagtataaagaagagggcagcaaggtgaccacttactgcaacgagacaatgactgggtgggtgcatgatgtgttgggccggaactgggcttgtttcaccggaaagaaggtgggaactgcctctgagaatgtgtatgtcaacacagcacaccttaagaattctcaggaaaagtattctaataggctctacaagtatgatcacaactttgtgaaagctatcaatgccattcagaagtcttggactgcaactacatacatggaatatgagactcttaccctgggagatatgattaggagaagtggtggccacagtcgaaaaatcccaaggcccaaacctgcaccactgactgctgaaatacagcaaaagattttgcatttgccaacatcttgggactggagaaatgttcatggtatcaattttgtcagtcctgttcgaaaccaagcatcctgtggcagctgctactcatttgcttctatgggtatgctagaagcgagaatccgtatactaaccaacaattctcagaccccaatcctaagccctcaggaggttgtgtcttgtagccagtatgctcaaggctgtgaaggcggcttcccataccttattgcaggaaagtacgcccaagattttgggctggtggaagaagcttgcttcccctacacaggcactgattctccatgcaaaatgaaggaagactgctttcgttattactcctctgagtaccactatgtaggaggtttctatggaggctgcaatgaagccctgatgaagcttgagttggtccatcatgggcccatggcagttgcttttgaagtatatgatgacttcctccactacaaaaaggggatctaccaccacactggtctaagagaccctttcaacccctttgagctgactaatcatgctgttctgcttgtgggctatggcactgactcagcctctgggatggattactggattgttaaaaacagctggggcaccggctggggtgagaatggctacttccggatccgcagaggaactgatgagtgtgcaattgagagcatagcagtggcagccacaccaattcctaaattgtagggtatgccttccagtatttcataatgatctgcatcagttgtaaaggggaattggtatattcacagactgtagactttcagcagcaatctcagaagcttacaaatagatttccatgaagatatttgtcttcagaattaaaactgcccttaattttaatatacctttcaatcggccactggccatttttttctaagtattcaattaagtgggaattttctggaagatggtcagctatgaagtaatagagtttgcttaatcatttgtaattcaaacatgctatattttttaaaatcaatgtgaaaacatagacttatttttaaattgtaccaatcacaagaaaataatggcaataattatcaaaacttttaaaatagatgctcatatttttaaaataaagttttaaaaataactgcaaaaaaaaaaaaaaaaaa

SEQ ID NO: 1553 - DNA, 2333 bp, Homo Sapiens
  NM_001816
agcacaaaaggaggaaggacagcacagctgacagccgtgctcagaaagtttctggatcccaggctcatctccacagaggagaacacgcaggcagcagagaccatggggcccatctcagccccttcctgcagatggcgcatcccctggcaggggctcctgctcacagcctcacttttcaccttctggaacccgcccaccactgctcagctcactattgaagctgtgccatccaatgctgcagaggggaaggaggttcttctacttgtccacaatctgccccaggaccctcgtggctacaactggtacaaaggggaaacagtggatgccaaccgtcgaattataggatatgtaatatcaaatcaacagattaccccagggcctgcatacagcaatcgagagacaatataccccaatgcatccctgctgatgcggaacgtcaccagaaatgacacaggatcctacaccctacaagtcataaagctaaatcttatgagtgaagaagtaactggccagttcagcgtacatccggagactcccaagccctccatctccagcaacaactccaaccccgtggaggacaaggatgctgtggccttcacctgtgaacctgagactcagaacacaacctacctgtggtgggtaaatggtcagagtctcccggtcagtcccaggctgcagctgtccaatggcaacaggaccctcactctactcagtgtcacaaggaatgacgtaggaccctatgaatgtgaaatacagaacccagcgagtgcaaacttcagtgacccagtcaccctgaatgtcctctatggcccagatgcccccaccatttccccttcagacacctattaccatgcaggggtaaatctcaacctctcctgccatgcggcctctaatccaccctcacagtattcttggtctgtcaatggcacattccagcaatacacacaaaagctctttatccccaacatcactacaaagaacagcggatcctatgcctgccacaccactaactcagccactggccgcaacaggaccacagtcaggatgatcacagtctctgatgctttagtacaaggaagttctcctggcctctcagctagagccactgtcagcatcatgattggagtactggccagggtggctctgatatagtagctctggtgtagtttctgcatttcaagaagactggcagacagttgtttttattcttcctcaaagcatttgcaatcagctaccattcaaaattgcttcttcttcaagatttatggaaaatactctgacgagtactcttgaacacaagttcctgataactttaagatcacgccactggactgtctatgaacttgcaaacaggctgatacctttgtgaagttgcccaccaaaacacagaaggaaaaaaacatgaatttcattgaactaaataataatgaggataatgtttttaagatttttttttttttttttttgagatggaatctcgctctgtcgcccaggctggagtgcagtggcacgatctcaactcactgcaagctccgcctcctgggttcacaccattctcctgcctcagcctcctgagtagctgggactacaggcgcctgccacaacgcccggctaattttttgtatttttagtagagacggggtttcactgtggtctcaatctcctgacttcatggtccgcctgcctcagcctcccaaagttctgggattacaggtgtgagccaccgcgcccagcccgtttttaagattttttatttgaaaaattgccaattctttaagtgttttctttttcagatttatgaatttctttatcttttaagctatctataccttactgcaatttggtaaagcagacttttgtgaacaaaaattataacatttacttttgctccctacctgactgccacagaactgggcaactattcatgagtattcatatgtttatggtaattcagttatttgcacaagttcagtgagaatctgctgtctttataatgggatatagtttaaaacattggttatattaccaaggctttgattgggatgttatatttgagaaaatacagagaatgatagattaacggagtgtctaatctatcgtgtcaaccccaaatttttacgtatgagatcctttagtccacccaatggctgacagtaacagcatctttaacacaactctttgttcaaatgtactatggtctcttttagagtcagactcctagactcacttgttctcactgtctgttttaatttaacccaggcatgcaatgctagataataaaattgctccctattggctgatcaaaaaaaaaaaaaaaaaaaaaaaaaaaaaaa

SEQ ID NO: 1554 - DNA, 1205 bp, Homo Sapiens
  NM_001817
acagaaggaggaaggtcagcagccccgacagccgacagtcacagcagctctgacaagagcgttcctggagcccagctcctctccacagaggacaagcaggcagcagagaccatgggccccccctcagccgctccccgtggagggcacaggccctggcaggggctcctgatcacagcctcacttttaaccttctggcacccgcccaccactgtccagttcactattgaagccctgccgtccagtgctgcagagggaaaggatgttcttctactggcctgcaatatttcagaaactattcaagcctattattggcacaaggggaaaacggcagaagggagccctctcattgctggttatataacagacattcaagcaaatatcccaggggccgcatacagtggtcgagagacagtataccccaatggatccctgctgttccaaaacatcaccctggaggacgcaggatcctacaccctacgaaccataaatgccagttacgactctgaccaagcaactggccagctccacgtacaccaaaacaacgtcccaggccttcctgtgggggccgtcgctggcatcgtgactggggtcctggttggggtggctctggtggccgccctggtgtgttttctgcttctctccaggactggaagggccagcatccagcgtgacctcagggagcagccgcccccagcctccacccctggccatggtccctctcacagatccaccttctcggcccctctacccagccccagaacagccactcccatctatgaggaattgctatactctgatgcaaacatttactgccagatcgaccacaaagcagatgtggtctcttaggttcctctgggagctgctcttgtgggttgatggagcgtccccaaagctcccagccctggggacggggaaggacatggagcctgagccagagaaccagctctgagtcctgaggagacacaggcctggggacagggagggatgggagtccctgctgaatatctggagaccctgacaggttgccctgggctctgggtgggccgggacaaaggcctctcatcaccacaggaagcgggggcttgcaaggaaagtgaatgggcctgtggcccacccggggtcaccaggaaaggatctgaataaagaggacccttcctctcattggctctttttctgctcacgggaacttagcagaaactcacctg

SEQ ID NO: 1555 - DNA, 1194 bp, Homo Sapiens
  NM_001818
acaggatctgcttagtgaaagaagtggcaagcaatggatcccaaatatcagcgtgtagagctaaatgatggtcacttcatgcccgtattgggatttggcacctatgcacctccagaggttccgaggaacagagctgtagaggtcaccaaattagcaatagaagctggcttccgccatattgattctgcttatttatacaataatgaggagcaggttggactggccatccgaagcaagattgcagatggcagtgtgaagagagaagacatattctacacttcaaagctttggtgcactttctttcaaccacagatggtccaaccagccttggaaagctcactgaaaaaacttcaactggactatgttgacctctatcttcttcatttcccaatggctctcaagccaggtgagacgccactaccaaaagatgaaaatggaaaagtaatattcgacacagtggatctctctgccacatgggaggtcatggagaagtgtaaggatgcaggattggccaagtccatcggggtgtcaaacttcaactgcaggcagctggagatgatcctcaacaagccaggactcaagtacaagcctgtctgcaaccaggtagaatgtcatccttacctcaaccagagcaaactgctggatttctgcaagtcaaaagacattgttctggttgcccacagtgctctgggaacccaacgacataaactatgggtggacccaaactccccagttcttttggaggacccagttctttgtgccttagcaaagaaacacaaacaaaccccagccctgattgccctgcgctaccagctgcagcgtggggttgtggtcctggccaagagctacaatgagcagcggatcagagagaacatccaggtttttgaattccagttgacatcagaggatatgaaagttctagatggtctaaacagaaattatcgatatgttgtcatggattttcttatggaccatcctgattatccattttcagatgaatattagcatagagggtgttgcacgacatctagcagaaggccctgtgtgtggatggtgatgcagaggatgtctctatgctggtgactggacacacagcctctggttaaatccctcccctcctgcttggcaacttcagctagctagatatatccatggtccagaaagcaaacataataaatttttatcttgaagtaa

SEQ ID NO: 1556 - DNA, 834 bp, Homo Sapiens
  NM_001826
ggcggcgtgtttgaaagcgaggccaaagtgggtgggagcgcgtgctgttgggagttgcttggaggttggcggcgcggggctgaaggctagcaaaccgagcgatcatgtcgcacaaacaaatttactattcggacaaatacgacgacgaggagtttgagtatcgacatgtcatgctgcccaaggacatagccaagctggtccctaaaacccatctgatgtctgaatctgaatggaggaatcttggcgttcagcagagtcagggatgggtccattatatgatccatgaaccagaacctcacatcttgctgttccggcgcccactacccaagaaaccaaagaaatgaagctggcaagctacttttcagcctcaagctttacacagctgtccttacttcctaacatctttctgataacattattatgttgccttcttgtttctcactttgatatttaaaagatgttcaatacactgtttgaatgtgctggtaactgctttgcttcttgagtagagccaccaccaccatagcccagccagatgagtgctctgtggacccacagcctaagctgagtgtgaccccagaagccacgatgtgctctgtatccagaacacacttggcagatggaggaagcatctgagtttgagaccatggctgttacagggatcatgtaaacttgctgtttttgttttttcctgccgggtgttgtatgtgtggtgacttgcggatttatgtttcagtgtactggaaactttccattttattcaagaaatctgttcatgttaaaagccttgattaaagaggaagtttttataatctaaaaaaaaaaaaaaaaaaa

SEQ ID NO: 1557 - DNA, 627 bp, Homo Sapiens
  NM_001827
agtctccggcgagttgttgcctgggctggacgtggttttgtctgctgcgcccgctcttcgcgctctcgtttcattttctgcagcgcgccacgaggatggcccacaagcagatctactactcggacaagtacttcgacgaacactacgagtaccggcatgttatgttacccagagaactttccaaacaagtacctaaaactcatctgatgtctgaagaggagtggaggagacttggtgtccaacagagtctaggctgggttcattacatgattcatgagccagaaccacatattcttctctttagacgacctcttccaaaagatcaacaaaaatgaagtttatctggggatcgtcaaatctttttcaaatttaatgtatatgtgtatataaggtagtattcagtgaatacttgagaaatgtacaaatctttcatccatacctgtgcatgagctgtattcttcacagcaacagagctcagttaaatgcaactgcaagtaggttactgtaagatgtttaagataaaagttcttccagtcagtttttctcttaagtgcctgtttgagtttactgaaacagtttacttttgttcaataaagtttgtatgttgcatttaaaaaaaaaaaaaaa

SEQ ID NO: 1558 - DNA, 2207 bp, Homo Sapiens
  NM_001838
cacttcctccccagacaggggtagtgcgaggccgggcacagccttcctgtgtggttttaccgcccagagagcgtcatggacctggggaaaccaatgaaaagcgtgctggtggtggctctccttgtcattttccaggtatgcctgtgtcaagatgaggtcacggacgattacatcggagacaacaccacagtggactacactttgttcgagtctttgtgctccaagaaggacgtgcggaactttaaagcctggttcctccctatcatgtactccatcatttgtttcgtgggcctactgggcaatgggctggtcgtgttgacctatatctatttcaagaggctcaagaccatgaccgatacctacctgctcaacctggcggtggcagacatcctcttcctcctgacccttcccttctgggcctacagcgcggccaagtcctgggtcttcggtgtccacttttgcaagctcatctttgccatctacaagatgagcttcttcagtggcatgctcctacttctttgcatcagcattgaccgctacgtggccatcgtccaggctgtctcagctcaccgccaccgtgcccgcgtccttctcatcagcaagctgtcctgtgtgggcatctggatactagccacagtgctctccatcccagagctcctgtacagtgacctccagaggagcagcagtgagcaagcgatgcgatgctctctcatcacagagcatgtggaggcctttatcaccatccaggtggcccagatggtgatcggctttctggtccccctgctggccatgagcttctgttaccttgtcatcatccgcaccctgctccaggcacgcaactttgagcgcaacaaggccatcaaggtgatcatcgctgtggtcgtggtcttcatagtcttccagctgccctacaatggggtggtcctggcccagacggtggccaacttcaacatcaccagtagcacctgtgagctcagtaagcaactcaacatcgcctacgacgtcacctacagcctggcctgcgtccgctgctgcgtcaaccctttcttgtacgccttcatcggcgtcaagttccgcaacgatctcttcaagctcttcaaggacctgggctgcctcagccaggagcagctccggcagtggtcttcctgtcggcacatccggcgctcctccatgagtgtggaggccgagaccaccaccaccttctccccataggcgactcttctgcctggactagagggacctctcccagggtccctggggtggggatagggagcagatgcaatgactcaggacatccccccgccaaaagctgctcagggaaaagcagctctcccctcagagtgcaagcccctgctccagaagatagcttcaccccaatcccagctacctcaaccaatgccaaaaaaagacagggctgataagctaacaccagacagacaacactgggaaacagaggctattgtcccctaaaccaaaaactgaaagtgaaagtccagaaactgttcccacctgctggagtgaaggggccaaggagggtgagtgcaaggggcgtgggagtggcctgaagagtcctctgaatgaaccttctggcctcccacagactcaaatgctcagaccagctcttccgaaaaccaggccttatctccaagaccagagatagtggggagacttcttggcttggtgaggaaaagcggacatcagctggtcaaacaaactctctgaacccctccctccatcgttttcttcactgtcctccaagccagcgggaatggcagctgccacgccgccctaaaagcacactcatcccctcacttgccgcgtcgccctcccaggctctcaacaggggagagtgtggtgtttcctgcaggccaggccagctgcctccgcgtgatcaaagccacactctgggctccagagtggggatgacatgcactcagctcttggctccactgggatgggaggagaggacaagggaaatgtcaggggcggggagggtgacagtggccgcccaaggcccacgagcttgttctttgttctttgtcacagggactgaaaacctctcctcatgttctgctttcgattcgttaagagagcaacattttacccacacacagataaagttttcccttgaggaaacaacagctttaaaagaaaaagaaaaaaaaagtctttggtaaatggcaaaaaaaaaaaaaaaaaaaaaaaaa

SEQ ID NO: 1559 - DNA, 2082 bp, Homo Sapiens
  NM_001839
aatcctcgaaggcccaggcggaggcgggggcggcctgtggggaaccgaggtgcgggcggcgagcgaggcagccgggtgcttcgcagcggagctcgaggctctgtagcacccagttggacccagtcgcccaggcaccgcccgcgccccgcggccgtctcctgcgcctcccagaggagggagttcgagcatcccccgcggcggccactcctcggggccaggagcggggaagcgaagtgcgagagaccccggaccccagcgctgtctcttcccgccgcccgaaccaccatgacccacttcaacaagggcccttcctatgggctctcggccgaagtcaagaacaagattgcttccaagtatgatcatcaggcagaagaagatcttcgcaattggatagaagaggtgacaggcatgagcattggccccaacttccagctgggcttaaaggatggcatcatcctctgcgaacttataaacaagctacagccaggctcagtgaagaaggtcaacgagtcctcactgaactggcctcagttggagaatattggcaactttattaaagctattcaggcttatggtatgaagccacatgacatattcgaagcaaatgatctttttgagaatggaaacatgacccaggttcagactactctggtggctctagcaggtctggctaaaacaaaaggattccatacaaccattgacattggagttaagtatgcagaaaaacaaacaagacgttttgatgaaggaaaattaaaagctggccaaagtgtaattggtctgcagatgggaaccaacaaatgtgccagccaggcaggtatgacagcttacgggactaggaggcatctttatgatcccaaaatgcaaactgacaaaccttttgaccagaccacaattagtctgcagatgggcactaataaaggagccagccaggcagggatgttagcaccaggtaccagaagagacatctatgatcagaagctaacattacagccggtggacaactcgacaatttccctacagatgggtaccaacaaagttgcttcccagaaaggaatgagtgtgtatgggcttgggcggcaagtatatgatcccaaatactgtgctgctcctacagaacctgtcattcacaacggaagccaaggaacaggaacaaatggttcggaaatcagtgatagtgattatcaggcagaataccctgatgagtatcatggcgagtaccaggatgactaccccagagattaccaatatagcgaccaaggcattgattattagatccacacagaaggagctcagtatttagtcctttgtttttattcagtgagaaccaagctagccttgagtaatttttatcttgtcttcctaaaacactattaagcttattgtacttttaagaaaaattgccttacgtacattcctttttcctttttctgcctcttccctcaatagttgccttttagtgctgtaatagttaaatcctacagcataatcaataactcgcatatgaagtaaaaaggaatactgtgaaaggggagtactcttgtacagccagttcttttatgcaaaaatctatgcatttttacaatcttatattaaactggtattttcaaacaataggaaactttttttttttttttttttttttacagtttagtgtatctggtttctacatggaagactaaactcatgcttattgctaaatgtggtctttgccaactaaatttaagatgcagcattttagaaatttacatatcaatgtttctacagtattgtttgctaatttttaaataaagtcatgatcagtgtgcatttgtgattatatgtgtactcattctcttacctagcgaacaagatcttttcagagtggtgtttctaaaagagcatgtacaaaagtggcctgtggacatttaggcctgggtgatgcatttgctcttcctgtttgtgccaatgtatcaatgtagagttgctctgttttcttcaactgtatttattgctgcatttctcagcataaacttatcccattgtattttttataaataaatattttttttgaactttcatatgaaaaaaaaaaaaaaaaaa

SEQ ID NO: 1560 - DNA, 3455 bp, Homo Sapiens
  NM_001849
gcttactcggcgcccgcgcctcgggccgtcgggagcggagcctcctcgggaccaggacttcagggccacaggtgctgccaagatgctccagggcacctgctccgtgctcctgctctggggaatcctgggggccatccaggcccagcagcaggaggtcatctcgccggacactaccgagagaaacaacaactgcccagagaagaccgactgccccatccacgtgtacttcgtgctggacacctcggagagcgtcaccatgcagtcccccacggacatcctgctcttccacatgaagcagttcgtgccgcagttcatcagccagctgcagaacgagttctacctggaccaggtggcgctgagctggcgctacggcggcctgcacttctctgaccaggtggaggtgttcagcccaccgggcagcgaccgggcctccttcatcaagaacctgcagggcatcagctccttccgccgcggcaccttcaccgactgcgcgctggccaacatgacggagcagatccggcaggaccgcagcaagggcaccgtccacttcgccgtggtcatcaccgacggccacgtcaccggcagcccctgcgggggcatcaagctgcaggccgagcgggcccgcgaggagggcatccggctcttcgccgtggcccccaaccagaacctgaaggagcagggcctgcgggacatcgccagcacgccgcacgagctctaccgcaacgactacgccaccatgctgcccgactccaccgagatcgaccaggacaccatcaaccgcatcatcaaggtcatgaaacacgaagcctacggagagtgctacaaggtgagctgcctggaaatccctgggccctctggccccaagggctaccgtggacagaagggtgccaagggcaacatgggtgagccgggagagcctggccagaagggaagacagggagacccgggcatcgaaggccccattggattcccaggacccaagggcgttcctggcttcaaaggagagaagggtgaatttggagccgacggtcgcaagggggcccctggcctggctggcaagaacgggaccgatggacagaagggcaagctggggcgcatcggacctcctggctgcaagggagaccctggaaaccggggccccgacggttacccgggggaagcagggagtccaggggagcgaggagaccaaggcggcaagggggaccctggccgcccaggacgcagagggcccccgggagaaatcggggccaagggaagcaaggggtatcaaggcaacagtggagccccaggaagtcctggtgtgaaaggagccaagggcgggcctgggccccgcggacccaaaggcgagccggggcgcaggggagaccccggcaccaagggcagcccaggcagcgatggccccaagggggagaagggggaccctggccctgaggggccccgcggcctggctggagaggttggcaacaaaggagccaagggagaccgaggcttgcctggacccagaggcccccagggagctcttggggagcccggaaagcagggatctcggggagaccccggtgatgcaggaccccgtggagactcaggacagccaggccccaagggagaccccggcaggcctggattcagctacccaggaccccgaggagcacccggagaaaaaggcgagcccggcccacgcggccccgagggaggccgaggcgactttggcttgaaaggagaacctgggaggaaaggagagaaaggagagcctgcggatcctggtccccctggtgagccaggccctcgggggccaagaggagtcccaggacccgagggtgagcccggcccccctggagaccccggtctcacggagtgtgacgtcatgacctacgtgagggagacctgcgggtgctgcgactgtgagaagcgctgtggcgccctggacgtggtcttcgtcatcgacagctccgagagcattgggtacaccaacttcacactggagaagaacttcgtcatcaacgtggtcaacaggctgggtgccatcgctaaggaccccaagtccgagacagggacgcgtgtgggcgtggtgcagtacagccacgagggcacctttgaggccatccagctggacgacgaacgtatcgactccctgtcgagcttcaaggaggctgtcaagaacctcgagtggattgcgggcggcacctggacaccctcagccctcaagtttgcctacgaccgcctcatcaaggagagccggcgccagaagacacgtgtgtttgcggtggtcatcacggacgggcgccacgaccctcgggacgatgacctcaacttgcgggcgctgtgcgaccgcgacgtcacagtgacggccatcggcatcggggacatgttccacgagaagcacgagagtgaaaacctctactccatcgcctgcgacaagccacagcaggtgcgcaacatgacgctgttctccgacctggtcgctgagaagttcatcgatgacatggaggacgtcctctgcccggaccctcagatcgtgtgcccagaccttccctgccaaacagagctgtccgtggcacagtgcacgcagcggcccgtggacatcgtcttcctgctggacggctccgagcggctgggtgagcagaacttccacaaggcccggcgcttcgtggagcaggtggcgcggcggctgacgctggcccggagggacgacgaccctctcaacgcacgcgtggcgctgctgcagtttggtggccccggcgagcagcaggtggccttcccgctgagccacaacctcacggccatccacgaggcgctggagaccacacaatacctgaactccttctcgcacgtgggcgcaggcgtggtgcacgccatcaatgccatcgtgcgcagcccgcgtggcggggcccggaggcacgcagagctgtccttcgtgttcctcacggacggcgtcacgggcaacgacagtctgcacgagtcggcgcactccatgcgcaagcagaacgtggtacccaccgtgctggccttgggcagcgacgtggacatggacgtgctcaccacgctcagcctgggtgaccgcgccgccgtgttccacgagaaggactatgacagcctggcgcaacccggcttcttcgaccgcttcatccgctggatctgctagcgccgccgcccgggccccgcagtcgagggtcgtgagcccaccccgtccatggtgctaagcgggcccgggtcccacacggccagcaccgctgctcactcggacgacgccctgggcctgcacctctccagctcctcccacggggtccccgtagccccggcccccgcccagccccaggtctccccaggccctccgcaggctgcccggcctccctccccctgcagccatcccaaggctcctgacctacctggcccctgagctctggagcaagccctgacccaataaaggctttgaacccataaaaaaaaaaaaaaaa

SEQ ID NO: 1561 - DNA, 2485 bp, Homo Sapiens
  NM_001853
gccatggccgggccgcgcgcgtgcgccccgctcctgctcctgctcctgctcggggagcttctggcggccgccggggcgcagagagtgggactccccggcccccccggccccccagggccgcccgggaagcccggccaggacggcattgacggagaagctggtcctccaggtctgcctgggcccccgggaccaaagggggccccaggaaagccggggaaaccaggagaggctgggctgccgggactgccgggtgtggatggtctgactggacgagatggaccccctggacccaagggtgcccctggggaacggggaagtctgggacccccggggccgcccgggctggggggcaaaggcctccctggaccccccggagaggcaggagtgagcggccccccaggtgggatcggcctccgcggccccccgggaccttctggactccccggcctccctggtcccccaggacctcccggaccccctggacacccaggagtcctccctgaaggcgctactgaccttcagtgcccaagtatctgcccgccaggtcccccagggccccctggaatgccagggttcaagggacccactggctacaaaggcgagcagggggaagtcggcaaggacggcgagaagggtgaccctggcccccctgggcccgccggcctcccgggcagcgtggggctgcagggcccccggggattacgaggactgccagggccactcgggccccctggggaccggggtcccattgggttccgagggccgcctgggatcccaggagcgcctgggaaagcgggtgaccgaggcgagaggggcccagaagggttccgcggccccaagggtgacctcggcagacctggtcccaagggaacccccggagtggccgggccaagcggagagccgggcatgccgggcaaggacggccagaatggcgtgccaggactcgatggccagaagggagaggctggtcgcaacggtgctccgggagagaagggccccaacgggctgccgggcctccctggacgagcggggtccaaaggcgagaagggagaacggggcagagctggggagctgggtgaggccggcccctctggagagccaggcgtccctggagatgctggcatgcctggggagcgcggtgaggctggccaccggggctcagcgggggccctcggcccacaaggccctcccggagcccctggtgtccgaggcttccagggccagaagggcagcatgggagaccccggccttccaggcccccagggcctccgaggtgacgtgggcgaccggggtccgggaggtgccgcaggccctaagggagaccagggtattgcaggttccgacggtcttcctggggataaaggagaactgggtcccagcggcctggtcggacccaaaggagagtctggcagtcgaggggagctgggccccaaaggcacccagggtcccaacggcaccagcggtgttcagggtgtccccgggccccccggtcctctgggcctgcagggcgtcccgggtgttcctggcatcacggggaagccgggagttccggggaaggaggccagcgagcagcgcatcagggagctgtgtggggggatgatcagcgaacaaattgcacagttagccgcgcacctaaggaagcctttggcacccgggtccattggtcggcccggtccagctggcccccctgggcccccaggacccccaggctccattggtcaccctggcgctcgaggaccccctggataccgcggtcccactggggagctgggagaccccgggcccagaggaaaccagggtgacagaggagacaaaggcgcggcaggagcagggctggacgggcctgaaggagaccaggggccccaaggaccccaaggcgtgcccggcaccagcaaggacggccaggacggtgctcccggcgagcctgggcctcccggagatcctgggcttccaggtgccattggggcccaggggacaccggggatctgcgacacctcagcctgccaaggagccgtgttaggaggggtcggggagaaatcaggctctcgaagctcataaaattcaacgtgaggaagcaagtgacaaggacgcccgaagcacagtggacggtcatgaaggagcgggggtgtggcaggcgggtgacgtccaggagagggagcgcccctggctgcccctcggccgccgactggacgcgcgggccttgccagcgagcaccctcatcgggctgtcgcctgacagcatacctcaaaaggccctagctaataaacctgtaagcccagcatttgagagaaggtagggtgtgtatatataaaaggttgtgtacaactccacgaggtgaaaaatattcagtaacttgtttacatagcatttgtgtaaagactatgatctcatcccaataaaatgatatattaaaccttcagattaatgactggctacagagtaacaaaaaataaagaatttaatgtacagtaaattctctcccata

SEQ ID NO: 1562 - DNA, 708 bp, Homo Sapiens
  NM_001865
agagcggatagagccgtactgccgctctagtttttcttttgctctctatggttaggagcgcaagcctctcttcggcccggaaagatttaagttcgtgaatgcatacgcaagactcggaggtagttccggttccggcgtggccattttcgttggtggtgttcagttgtggcggttgctggtcagtaacagccaagatgctgcggaatctgctggctcttcgtcagattgggcagaggacgataagcactgcttcccgcaggcattttaaaaataaagttccggagaagcaaaaactgttccaggaggatgatgaaattccactgtatctaaagggtggggtagctgatgccctcctgtatagagccaccatgattcttacagttggtggaacagcatatgccatatatgagctggctgtggcttcatttcccaagaagcaggagtgacttcagtcatcccagcaatcgcttggttcagtttcattcagctctctatggaccagtaatctgataaataaccgagctcttctttggggatcaatatttattgacttgtagtaactgccaccaataaagcagtctttaccatgctttgtctgattttatcactttatgccaataatttcaacttttggtcagccttgtaaatcttaggtaaggatcaaagaaatgattcttttgccactaaacttgtgaaagcaaaaaaaaa

SEQ ID NO: 1563 - DNA, 456 bp, Homo Sapiens
  NM_001866
ttttgtttttcagctcacttcaagggtacctgaagcgaattggcaccaaagcagcagctgtattgccgcagttctagcttcaccttcacgatgtttcccttggtcaaaagcgcactaaatcgtctccaagttcgaagcattcagcaaacaatggcaaggcagagccaccagaaacgtacacctgattttcatgacaaatacggtaatgctgtattagctagtggagccactttctgtattgttacatggacatatgtagcaacacaagtcggaatagaatggaacctgtcccctgttggcagagttaccccaaaggaatggaggaatcagtaatcatcccagctggtgtaataatgaattgtttaaaaaacagctcataattgatgccaaattaaagcactgtgtacccattaagatatggcattattgaagaaataaagtacatttgaaaccttc

SEQ ID NO: 1564 - DNA, 448 bp, Homo Sapiens
  NM_001867
caaggtcgtgaaaaaaaaggtcttggtgaggtgccgccatttcatctgtcctcattctctgcgcctttcgcagagcttccagcagcggtatgttgggccagagcatccggaggttcacaacctctgtggtccgtaggagccactatgaggagggccctgggaagaatttgccattttcagtggaaaacaagtggtcgttactagctaagatgtgtttgtactttggatctgcatttgctacacccttccttgtagtaagacaccaactgcttaaaacataaggatgtttcagttcctccatttaacagatatgaagagcattttaagaggtgcagcctctggaagtggatcaaactagaactcatatgccatactagatatgtttgtcaataaacttatgacgtgaaaaaaaaaaaaaaaaaaaaaaaaaaaaaaaaaaaaaaaaaaa

SEQ ID NO: 1565 - DNA, 1699 bp, Homo Sapiens
  NM_001870
agggctgaggcataaaactgccagagggtctcaaggcaggcaaagaagaaccatgaggctcatcctgcctgtgggtttgattgctaccactcttgcaattgctcctgtccgctttgacagggagaaggtgttccgcgtgaagccccaggatgaaaaacaagcagacatcataaaggacttggccaaaaccaatgagcttgacttctggtatccaggtgccacccaccacgtagctgctaatatgatggtggatttccgagttagtgagaaggaatcccaagccatccagtctgccttggatcaaaataaaatgcactatgaaatcttgattcatgatctacaagaagagattgagaaacagtttgatgttaaagaagatatcccaggcaggcacagctacgcaaaatacaataattgggaaaagattgtggcttggactgaaaagatgatggataagtatcctgaaatggtctctcgtattaaaattggatctactgttgaagataatccactatatgttctgaagattggggaaaagaatgaaagaagaaaggctatttttacggattgtggcattcacgcacgagaatgggtctccccagcattctgccagtggtttgtctatcaggcaaccaaaacttatgggagaaacaaaattatgaccaaactcttggaccgaatgaatttttacattcttcctgtgttcaatgttgatggatatatttggtcatggacaaagaaccgcatgtggagaaaaaatcgttccaagaaccaaaactccaaatgcatcggcactgacctcaacaggaattttaatgcttcatggaactccattcctaacaccaatgacccatgtgcagataactatcggggctctgcaccagagtccgagaaagagacgaaagctgtcactaatttcattagaagccacctgaatgaaatcaaggtttacatcaccttccattcctactcccagatgctattgtttccctatggatatacatcaaaactgccacctaaccatgaggacttggccaaagttgcaaagattggcactgatgttctatcaactcgatatgaaacccgctacatctatggcccaatagaatcaacaatttacccgatatcaggttcttctttagactgggcttatgacctgggcatcaaacacacatttgcctttgagctccgagataaaggcaaatttggttttctccttccagaatcccggataaagccaacgtgcagagagaccatgctagctgtcaaatttattgccaagtatatcctcaagcatacttcctaaagaactgccctctgtttggaataagccaattaatccttttttgtgcctttcatcagaaagtcaatcttcagttatccccaaatgcagcttctatttcacctgaatccttctcttgctcatttaagtcccatgttactgctgtttgcttttacttactttcagtagcaccataacgaagtagctttaagtgaaaccttttaactacctttctttgctccaagtgaagtttggacccagcagaaagcattattttgaaaggtgatatacagtggggcacagaaaacaaatgaaaaccttcagtttctcacagattttcaccatgtggcttcatcaatttatgtgctaatacaataaaataaaatgcacttaatgctttaaaaaaaaaaaaaaaaa

SEQ ID NO: 1566 - DNA, 4007 bp, Homo Sapiens
  NM_001877
atttaagggcccgcctctcctggctcacagctgcttgctgctccagccttgccctcccagagctgccggacgctcgcgggtctcggaacgcatcccgccgcgggggcttcggccgtggcatgggcgccgcgggcctgctcggggttttcttggctctcgtcgcaccgggggtcctcgggatttcttgtggctctcctccgcctatcctaaatggccggattagttattattctacccccattgctgttggtaccgtgataaggtacagttgttcaggtaccttccgcctcattggagaaaaaagtctattatgcataactaaagacaaagtggatggaacctgggataaacctgctcctaaatgtgaatatttcaataaatattcttcttgccctgagcccatagtaccaggaggatacaaaattagaggctctacaccctacagacatggtgattctgtgacatttgcctgtaaaaccaacttctccatgaacggaaacaagtctgtttggtgtcaagcaaataatatgtgggggccgacacgactaccaacctgtgtaagtgttttccctctcgagtgtccagcacttcctatgatccacaatggacatcacacaagtgagaatgttggctccattgctccaggattgtctgtgacttacagctgtgaatctggttacttgcttgttggagaaaagatcattaactgtttgtcttcgggaaaatggagtgctgtcccccccacatgtgaagaggcacgctgtaaatctctaggacgatttcccaatgggaaggtaaaggagcctccaattctccgggttggtgtaactgcaaactttttctgtgatgaagggtatcgactgcaaggcccaccttctagtcggtgtgtaattgctggacagggagttgcttggaccaaaatgccagtatgtgaagaaattttttgcccatcacctccccctattctcaatggaagacatataggcaactcactagcaaatgtctcatatggaagcatagtcacttacacttgtgacccggacccagaggaaggagtgaacttcatccttattggagagagcactctccgttgtacagttgatagtcagaagactgggacctggagtggccctgccccacgctgtgaactttctacttctgcggttcagtgtccacatccccagatcctaagaggccgaatggtatctgggcagaaagatcgatatacctataacgacactgtgatatttgcttgcatgtttggcttcaccttgaagggcagcaagcaaatccgatgcaatgcccaaggcacatgggagccatctgcaccagtctgtgaaaaggaatgccaggcccctcctaacatcctcaatgggcaaaaggaagatagacacatggtccgctttgaccctggaacatctataaaatatagctgtaaccctggctatgtgctggtgggagaagaatccatacagtgtacctctgagggggtgtggacaccccctgtaccccaatgcaaagtggcagcgtgtgaagctacaggaaggcaactcttgacaaaaccccagcaccaatttgttagaccagatgtcaactcttcttgtggtgaagggtacaagttaagtgggagtgtttatcaggagtgtcaaggcacaattccttggtttatggagattcgtctttgtaaagaaatcacctgcccaccaccccctgttatctacaatggggcacacaccgggagttccttagaagattttccatatggaaccacggtcacttacacatgtaaccctgggccagaaagaggagtggaattcagcctcattggagagagcaccatccgttgtacaagcaatgatcaagaaagaggcacctggagtggccctgctcccctgtgtaaactttccctccttgctgtccagtgctcacatgtccatattgcaaatggatacaagatatctggcaaggaagccccatatttctacaatgacactgtgacattcaagtgttatagtggatttactttgaagggcagtagtcagattcgttgcaaagctgataacacctgggatcctgaaataccagtttgtgaaaaagaaacatgccagcatgtgagacagagtcttcaagaacttccagctggttcacgtgtggagctagttaatacgtcctgccaagatgggtaccagttgactggacatgcttatcagatgtgtcaagatgctgaaaatggaatttggttcaaaaagattccactttgtaaagttattcactgtcaccctccaccagtgattgtcaatgggaagcacacaggcatgatggcagaaaactttctatatggaaatgaagtctcttatgaatgtgaccaaggattctatctcctgggagagaaaaaattgcagtgcagaagtgattctaaaggacatggatcttggagcgggccttccccacagtgcttacgatctcctcctgtgactcgctgccctaatccagaagtcaaacatgggtacaagctcaataaaacacattctgcatattcccacaatgacatagtgtatgttgactgcaatcctggcttcatcatgaatggtagtcgcgtgattaggtgtcatactgataacacatgggtgccaggtgtgccaacttgtatcaaaaaagccttcatagggtgtccacctccgcctaagacccctaacgggaaccatactggtggaaacatagctcgattttctcctggaatgtcaatcctgtacagctgtgaccaaggctacctgctggtgggagaggcactccttctttgcacacatgagggaacctggagccaacctgcccctcattgtaaagaggtaaactgtagctcaccagcagatatggatggaatccagaaagggctggaaccaaggaaaatgtatcagtatggagctgttgtaactctggagtgtgaagatgggtatatgctggaaggcagtccccagagccagtgccaatcggatcaccaatggaaccctcccctggcggtttgcagatcccgttcacttgctcctgtcctttgtggtattgctgcaggtttgatacttcttaccttcttgattgtcattaccttatacgtgatatcaaaacacagagcacgcaattattatacagatacaagccagaaagaagcttttcatttagaagcacgagaagtatattctgttgatccatacaacccagccagctgatcagaagacaaactggtgtgtgcctcattgcttggaattcagcggaatattgattagaaagaaactgctctaatatcagcaagtctctttatatggcctcaagatcaatgaaatgatgtcataagcgatcacttcctatatgcacttattctcaagaagaacatctttatggtaaagatgggagcccagtttcactgccatatactcttcaaggactttctgaagcctcacttatgagatgcctgaagccaggccatggctataaacaattacatggctctaaaaagttttgccctttttaaggaaggcactaaaaagagctgtcctggtatctagacccatcttctttttgaaatcagcatactcaatgttactatctgcttttggttataatgtgtttttaattatctaaagtatgaagcattttctggggttatgatggctttacctttattaggaagtatggttttattttgatagtagcttcctcctctggtggtgttaatcatttcatttttacccttacttggtttgagtttctctcacattactgtatatactttgcctttccataatcactcagtgattgcaatttgcacaagtttttttaaattatgggaatcaagatttaatcctagagatttggtgtacaattcaggctttggatgtttctttagcagttttgtgataagttctagttgcttgtaaaatttcacttaataatgtgtacattagtcattcaataaattgtaattgtaaagaaaacatacaaaaaaaaaaaaaaaa

SEQ ID NO: 1567 - DNA, 1506 bp, Homo Sapiens
  NM_001888
tttcaaatggggagtttccctgcacaagctttcttgtctgccactatgtgagatatacctttcaccttctgccgtgattgtgaggcctcctcagccacgtggaactgtaaaaactcctggaagaaaagatcctgcaatttggctttttgtgagatggaaaagattacaccttgccctgcaaacttcccccctttaaaggcgaaggtttgttagagcagcgggcgcgctcataaagggcacagccgagggtacgtggatcgcggtgcggagactgaggttagaaggcacaggtggcgagatgagccgggtaccagcgttcctgagcgcggccgaggtggaggaacacctccgcagctccagcctcctcatcccgcctctagagacggccctggccaacttctccagcggtcccgaaggaggggtcatgcagcccgtgcgcaccgtggtgccggtgaccaagcacaggggctacctgggggtcatgcccgcctacagtgctgcagaggatgcactgaccaccaagttggtcaccttctacgaggaccgcggcatcacctcggtcgtcccttcccaccaggctactgtgctactctttgagcccagcaatggcaccctgctggcggtcatggatggaaatgtcataactgcaaagagaacagctgcagtttctgccattgccaccaagtttctgaaacctcccagcagtgaagtgctgtgcatccttggggctggggtccaggcctacagccattatgagatcttcacagagcagttctcctttaaggaggtgaggatatggaaccgcaccaaagaaaatgcagagaagtttgcagacacagtgcaaggagaggtacgggtctgttcttcggtccaggaggctgtggcaggtgcagatgtgatcatcacagtcaccctggcaacagagcccattttgtttggtgaatgggtgaagccaggggctcacatcaatgctgttggagccagcagacctgactggagagaactggatgatgagctcatgaaagaagctgtgctgtacgtggattcccaggaggctgccctgaaggagtctggagatgtcctgctgtcaggggccgagatctttgctgagctgggagaagtgattaagggagtgaaaccagcccactgtgagaagaccaccgtgttcaagtctttgggaatggcagtggaagacacagttgcagccaaactcatctatgattcctggtcatctggtaaataaaacaaaggaacttgatgttgagatggatgcttgaggaatattgctgctggttctcataatttctagagtaaatgagggagtccagtccccagtgaactctccttttgtgcttatcatgttttaccttaaatgctgagatcctcatttatgtttgtagttggaaagcaaagctaggtagccatttcttctgttctaccaagttataatagcattcatttccctttatatttccctgaaataaagcacattccaattgtgcagtg

SEQ ID NO: 1568 - DNA, 2278 bp, Homo Sapiens
  NM_001889
agtaggatgcggccagcgcaggagctggtggtgaaaaactgatctcgcatgttcagaaactgcacaagctctaccacatcctcgtcaacactgcccttccggctgaggtccgctttgctcaaacattgcgccttccatttcctgaactccgcgctgcgatccatgggtgacggactcagggtctgcgctcggctccttcatggtagcctcgtctctccctgggggcagccatattgaagcgagcggtggccgaaaaggtccaaacttcctcttcgttcttaatttgggaaattctagtgccttcgcctaggggtggagagaggcgcacatcctgggtggagcgaggcgcacatcctgggtggagcctgcaaaagttggagaaggtgtggcagtcctcatttctgtggaatctgaagaagcccacgcagattttaattcccactctagattctgtatctagatcaccatggcgactggacagaagttgatgagagctgttagagtttttgaatttggtgggccagaagtcctgaaattgcgatcagatattgcagtaccgattccaaaagaccatcaggttctaatcaaggtccatgcatgtggtgtcaaccccgtggagacatacattcgctctggtacttatagtagaaaaccactcttaccctatactcctggctcagatgtggctggggtgatagaagctgttggagataatgcatctgctttcaagaaaggtgacagagttttcactagcagcacgatctctgggggttatgcagagtatgctcttgcagcagaccacactgtttacaaactacctgaaaaactggactttaaacaaggagctgccatcggcattccatattttactgcttatcgagctctgatccacagtgcctgtgtgaaagctggagagagtgttctggttcatggggcaagtggaggagttggattagcagcatgccaaattgctagagcttatggcttaaagattttgggcactgctggtactgaggaaggacaaaagattgttttgcaaaatggagcccatgaagtgttcaatcacagagaagtgaattacattgataaaattaagaagtatgttggtgagaaaggaattgatataattattgaaatgttagctaatgtaaatcttagtaaagacttgagtcttctgtcacatggaggacgagtgatagttgttggcagcagaggtactattgaaataaacccacgagacaccatggcaaaggagtcgagtataattggagttactctcttttcctcaaccaaggaggaatttcagcaatatgcagcagcccttcaagctggaatggaaattggctggttgaaacctgtgataggttctcaatatccattggagaaggtggccgaggctcatgaaaatatcattcatggtagtggggctactggaaaaatgattcttctcttatgatgattaattctttcatggatttcctatgtaattagaggtactgtctttcccccagttgtacttaccctatcttttctttaattaacattcgattccatgagcttcttatgtgaaaaaataagatttttctttagagagcagaagcagaagagtaaaatttattgtatagctagcaatatttttttatgccatctgtctcaaatcaaagagtcatcatagtaggaaataacatgttagttgtcatttggcatgagtgtgcattccagtaattcttaattgatatttgattaattccatacctttgattaaaacatgctagttcaaaataagactgctcagtttccaagggttttcaagcctacttacctttataaaggttctctagtctctgattagccatgactgtattggactttgaacattttctgaactaaaaacctctattctaaactaatctcatttggatgtgtaagtcttttgtaaaggcaagaataaataatatccaggacaatttattagttttctcagtattttcccaaatattagaatatttacttcattattggttggctgccaatgaccccatatgttctgtgagaatagtagctttatctttgatataatacatagtctccaaataggtaatacttcgcaattgattagattttcagagtagatttagagttatctgtttttctggtgagggtcaaatatttttgttaattaagctcacaaatttgataaattaagaattatctgcatttgtctcgtaacataataatgtgtaataaagtctatagaaaattaaaaaaaaaaaaaaaa

SEQ ID NO: 1569 - DNA, 3714 bp, Homo Sapiens
  NM_001893
gctaggggaagtgacgtcacagcgcgatggcggcggctcctttaggcagctgaaaggggatttaggcccggaagatccgagtccatccgcggcggggagagggcaagcgggaccggtaggggccggagcagcggcggcggcgctcggactgtcccatccgccccgtattgaggcgctgggagcggcggggcgacaggaaagcgatggtgaaagcggggccgtgaggggggcggagccgggagccggacccgcagtagcggcagcagcggcgccgcctcccagagttcagacccaggaagcggccgggagggcaggagcgaatcgggccgccgccgccatggagctgagagtcgggaacaggtaccggctgggccggaagatcggcagcggctccttcggagacatctatctcggtacggacattgctgcaggagaagaggttgccatcaagcttgaatgtgtcaaaaccaaacaccctcagctccacattgagagcaaaatctacaagatgatgcagggaggagtgggcatccccaccatcagatggtgcggggcagagggggactacaacgtcatggtgatggagctgctggggccaagcctggaggacctcttcaacttctgctccaggaaattcagcctcaaaaccgtcctgctgcttgctgaccaaatgatcagtcgcatcgaatacattcattcaaagaacttcatccaccgggatgtgaagccagacaacttcctcatgggcctggggaagaagggcaacctggtgtacatcatcgacttcgggctggccaagaagtaccgggatgcacgcacccaccagcacatcccctatcgtgagaacaagaacctcacggggacggcgcggtacgcctccatcaacacgcaccttggaattgaacaatcccgaagagatgacttggagtctctgggctacgtgctaatgtacttcaacctgggctctctcccctggcaggggctgaaggctgccaccaagagacagaaatacgaaaggattagcgagaagaaaatgtccacccccatcgaagtgttgtgtaaaggctacccttccgaatttgccacatacctgaatttctgccgttccttgcgttttgacgacaagcctgactactcgtacctgcggcagcttttccggaatctgttccatcgccagggcttctcctatgactacgtgttcgactggaacatgctcaaatttggtgccagccgggccgccgatgacgccgagcgggagcgcagggaccgagaggagcggctgagacactcgcggaacccggctacccgcggcctcccttccacagcctccggccgcctgcgggggacgcaggaagtggctccccccacacccctcacccctacctcacacacggctaacacctccccccggcccgtctccggcatggagagagagcggaaagtgagtatgcggctgcaccgcggggcccccgtcaacatctcctcgtccgacctcacaggccgacaagatacctctcgcatgtccacctcacagattcctggtcgggtggcttccagtggtcttcagtctgtcgtgcaccgatgagaactctccttattgctgtgaagggcagacaatgcatggctgatctactctgttaccaatggctttactagtgacacgtcccccggtctaggatcgaaatgttaacaccgggagctctccaggccactcacccagcgacgctcgtgggggaaacatactaaacggacagactccaagagctgccaccgctggggctgcactgcggccccccacgtgaactcggttgtaacggggctgggaagaaaagcagagagagaattgcagagaatcagactccttttccagggcctcagctccctccagtggtggccgccctgtactccctgacgattccactgtaactaccaatcttctacttggttaagacagttttgtatcattttgctaaaaattattggcttaaatctgtgtaaagaaaatctgtctttttattgtttcttgtctgtttttgcagtcttacaaaaaaaatgttgactaaggaattctgagacaggctggcttggagttagtgtatgaggtggagtcgggcagggagaaggtgcaggtggatctcaagggtgtgtgctgtgtttgttttgcagtgttttattgtccgctttggagaggagatttctcatcaaaagtccgtggtgtgtgtgtgtgcccgtgtgtggtgggacctcttcaacctgattttggcgtctcaccctccctcctcccgtaattgacatgcctgctgtcaggaactcttgaggccctcggagagcagttagggaccgcaggctgccgcggggcaggggtgcagtgggtgttaccaggcaaagcactgcgcgcttcttccccaggaggtgggcaggcagctgagagcttggaagcagaggctttgagaccctagcaggacaattgggagtcccaggattcaaggtggaagatgcgtttctggtcccttgggagaggactgtgaaccgagaggtggttactgtagtgtttgttgccttgctgcctttgcactcagtccattttctcagcactcaatgctcctgtgcggattggcactccgtctgtatgaatgcctgtgcttaaaaccaggagcggggctgtccttgccacgtgccaagactagctcagaaaagccggcaggccagaaggacccaccctgaggtgccaaggagcaggtgactctcccaaccggacccagaaccttcacggccagaaagtagagtctgcgctgtgaccttctgttgggcgcgtgtctgttggtcagaagtgaagcagcgtgcgtggggccgagtcccaccagaaggcaggtggcctccgtgagctggtgctgccccaggctccatgctgctgtgccctgaggttcccaggatgccttctcgcctctcactccgcagcacttgggcggtagccagtggccatgtgctcccaaccccaatgcgcagggcagtctgtgttcgtgggcacttcggctggaccccatcacgatggacgatgttccctttggactctagggcttcgaaggtgtgcaccttggttctcccttctcctccccagagttccccggatgccataactggctggcgtcccagaacacagttgttcacccccccaccagctggctggccgtctgcctgagcccatggatgctttctcaatcctaggctggttactgtgtaagcgttttggagtacggggccttgagcgggtgggagctgtgtgttgaagtacagagggaggttggggtgggtcagagccgagttaagagattttctttgttgctggaccccttcttgaaggtagacgtcccccacccggagagacgtcgcgctgtggcctgaagtggcgcaagcttgctttgtaaatatctgtggtcccgatgtagtgcccagaacgtttgtgcgaggcagctctgcgcccgggttccagcccgagcctcgccgggtcgcgtcttcggagtgcttgtgacagtccttgcccagtatctagtccccgtcgccccgtgcaggagacgtaggtaggacgtcgtgtcagctgtgcactgacggccagtctccgagctgtgcgtttgtatcgccactgtatttgtgtactttaacaatcgtgtaaataataaattcataatgacttctacctttcttcccaaaaaaaaa

SEQ ID NO: 1570 - DNA, 1674 bp, Homo Sapiens
  NM_001896
gcggccgcccgccgccgcgctcctcctcctcctcctccagcgcccggcggcccgctgcctcctccgcccgacgccccgcgtcccccgccgcgccgccgccgccaccctctgcgccccgcgccgccccccggtcccgcccgccatgcccggcccggccgcgggcagcagggcccgggtctacgccgaggtgaacagtctgaggagccgcgagtactgggactacgaggctcacgtcccgagctggggtaatcaagatgattaccaactggttcgaaaacttggtcggggaaaatatagtgaagtatttgaggccattaatatcaccaacaatgagagagtggttgtaaaaatcctgaagccagtgaagaaaaagaagataaaacgagaggttaagattctggagaaccttcgtggtggaacaaatatcattaagctgattgacactgtaaaggaccccgtgtcaaagacaccagctttggtatttgaatatatcaataatacagattttaagcaactctaccagatcctgacagactttgatatccggttttatatgtatgaactacttaaagctctggattactgccacagcaagggaatcatgcacagggatgtgaaacctcacaatgtcatgatagatcaccaacagaaaaagctgcgactgatagattggggtctggcagaattctatcatcctgctcaggagtacaatgttcgtgtagcctcaaggtacttcaagggaccagagctcctcgtggactatcagatgtatgattatagcttggacatgtggagtttgggctgtatgttagcaagcatgatctttcgaagggaaccattcttccatggacaggacaactatgaccagcttgttcgcattgccaaggttctgggtacagaagaactgtatgggtatctgaagaagtatcacatagacctagatccacacttcaacgatatcctgggacaacattcacggaaacgctgggaaaactttatccatagtgagaacagacaccttgtcagccctgaggccctagatcttctggacaaacttctgcgatacgaccatcaacagagactgactgccaaagaggccatggagcacccatacttctaccctgtggtgaaggagcagtcccagccttgtgcagacaatgctgtgctttccagtggtctcacggcagcacgatgaagactggaaagcgacgggtctgttgcggttctcccacttttccataagcagaacaagaaccaaatcaaacgtcttaacgcgtatagagagatcacgttccgtgagcagacacaaaacggtggcaggtttggcgagcacgaactagaccaagcgaagggcagcccaccaccgtatatcaaacctcacttccgaatgtaaaaggctcacttgcctttggcttcctgttgacttcttcccgacccagaaagcatggggaatgtgaagggtatgcagaatgttgttggttactgttgctccccgagcccctcaactcgtcccgtggccgcctgtttttccagcaaaccacgctaactagctgaccacagactccacagtggggggacgggcgcagtatgtggcatggcggcagttacatattattattttaaaagtatatattattgaataaaaggttttaaaagaaaaaaaaaaaaaaaaaa

SEQ ID NO: 1571 - DNA, 3778 bp, Homo Sapiens
  NM_001903
ccatttcctcctcctagccggactggagggagacaaagcagcgcccgtctgcttcgggcctctggaatttagcgctcgcccagctagccgcagaaatgactgctgtccatgcaggcaacataaacttcaagtgggatcctaaaagtctagagatcaggactctggcagttgagagactgttggagcctcttgttacacaggttacaacccttgtaaacaccaatagtaaagggccctctaataagaagagaggtcgttctaagaaggcccatgttttggctgcatctgttgaacaagcaactgagaatttcttggagaagggggataaaattgcgaaggagagccagtttctcaaggaggagcttgtggctgctgtagaagatgttcgaaaacaaggtgatttgatgaaggctgctgcaggagagttcgcagatgatccctgctcttctgtgaagcgaggcaacatggttcgggcagctcgagctttgctctctgctgttacccggttgctgattttggctgacatggcagatgtctacaaattacttgttcagctgaaagttgtggaagatggtatcttgaagttgaggaatgctggcaatgaacaagacttaggaatccagtataaagccctaaaacctgaagtggataagctgaacattatggcagccaaaagacaacaggaattgaaagatgttggccatcgtgatcagatggctgcagctagaggaatcctgcagaagaacgttccgatcctctatactgcatcccaggcatgcctacagcaccctgatgtcgcagcctataaggccaacagggacctgatatacaagcagctgcagcaggcggtcacaggcatttccaatgcagcccaggccactgcctcagacgatgcctcacagcaccagggtggaggaggaggagaactggcatatgcactcaataactttgacaaacaaatcattgtggaccccttgagcttcagcgaggagcgctttaggccttccctggaggagcgtctggaaagcatcattagtggggctgccttgatggccgactcgtcctgcacgcgtgatgaccgtcgtgagcgaattgtggcagagtgtaatgctgtccgccaggccctgcaggacctgctttcggagtacatgggcaatgctggacgtaaagaaagaagtgatgcactcaattctgcaatagataaaatgaccaagaagaccagggacttgcgtagacagctccgcaaagctgtcatggaccacgtttcagattctttcctggaaaccaatgttccacttttggtattgattgaagctgcaaagaatggaaatgagaaagaagttaaggagtatgcccaagttttccgtgaacatgccaacaaattgattgaggttgccaacttggcctgttccatctcaaataatgaagaaggtgtaaagcttgttcgaatgtctgcaagccagttagaagccctctgtcctcaggttattaatgctgcactggctttagcagcaaaaccacagagtaaactggcccaagagaacatggatctttttaaagaacaatgggaaaaacaagtccgtgttctcacagatgctgtcgatgacattacttccattgatgacttcttggctgtctcagagaatcacattttggaagatgtgaacaaatgtgtcattgctctccaagagaaggatgtggatggcctggaccgcacagctggtgcaattcgaggccgggcagcccgggtcattcacgtagtcacctcagagatggacaactatgagccaggagtctacacagagaaggttctggaagccactaagctgctctccaacacagtcatgccacgttttactgagcaagtagaagcagccgtggaagccctcagctcggaccctgcccagcccatggatgagaatgagtttatcgatgcttcccgcctggtatatgatggcatccgggacatcaggaaagcagtgctgatgataaggacccctgaggagttggatgactctgactttgagacagaagattttgatgtcagaagcaggacgagcgtccagacagaagacgatcagctgatagctggccagagtgcccgggcgatcatggctcagcttccccaggagcaaaaagcgaagattgcggaacaggtggccagcttccaggaagaaaagagcaagctggatgctgaagtgtccaaatgggacgacagtggcaatgacatcattgtgctggccaagcagatgtgcatgattatgatggagatgacagactttacccgaggtaaaggaccactcaaaaatacatcggatgtcatcagtgctgccaagaaaattgctgaggcaggatccaggatggacaagcttggccgcaccattgcagaccattgccccgactcggcttgcaagcaggacctgctggcctacctgcaacgcatcgccctctactgccaccagctgaacatctgcagcaaggtcaaggccgaggtgcagaatctcggcggggagcttgttgtctctggggtggacagcgccatgtccctgatccaggcagccaagaacttgatgaatgctgtggtgcagacagtgaaggcatcctacgtcgcctctaccaaataccaaaagtcacagggtatggcttccctcaaccttcctgctgtgtcatggaagatgaaggcaccagagaaaaagccattggtgaagagagagaaacaggatgagacacagaccaagattaaacgggcatctcagaagaagcacgtgaacccggtgcaggccctcagcgagttcaaagctatggacagcatctaagtctgcccaggccggccgcccccacccctcggggctcctgaatatcagtcactgttcgtcactcaaatgaatttgctaaatacaacactgatactagattccacagggaaatgggcagactgaaccagtccaggtggtgaattttccaagaacatagtttaagttgattaaaaatgcttttagaatgcaggagcctacttctagctgtattttttgtatgcttaaataaaaataaaaattcataaccaaagagaatcccacattagcttgttagtaatgctctgaccaagccgagatgcccattctcttagtgatggcggcgttagggtttgagagaagggaatttggctcaacttcagttgagagggtgcagtccagacagcttgactgcttttaaatgaccaaagatgacctgtggtaagcaacctgggcatcttaggaagcagtccctggagaaggcatgttcccagaaaggtctctggagggacaaactcactcagtaaaacataatgtatcatgaagaaaactgattctctatgacatgaaatgaaaattttaatgcattgttataattactaatgtacgctgctgcaggacattaataaagttgcttttttaggctacagtgtctcgatgccataatcagaacacactttttttcctctttctcccagcttcaaatgcaaattcatcattgggctcacttctaataactgcagtgtttcccgccttgggcttgcagcagaaaaacctgacaacatagtgtttgctaaggcagtaatttagactttaccttatttgtgattactgtagtgattgattgattgattactattaactacaaggtataatttactatcaccttatttaaattttatgaattaatttgaatgttttttacactaactaacttttcccaataaagtccactatgaaaccacgacaaaaaaaaaaaaaaaaaa

SEQ ID NO: 1572 - DNA, 3217 bp, Homo Sapiens
  NM_001905
tccctcgcccggaggcagagatgcgctggcgcatcaccgccaggagcccacagtgaaagaccatcggatggaaggcgacgcccagaactccaggagaccgctgtgggaggacgcgaggccaggtgacgaataggccaggcgtgagttcccaaacagcctcctccccttcaagagagtaagcttgggccacaggctgggacggaagcagaggggcagacacgccaccacccgcccggcctcgaacctacggcggcacagttcagcggaggcggcccagcggtcctgtcccgcgcctgcgcactccaggccccgccccgccccgcgccctccaggcccggcccgccctccaacctctgcgtgcgcacagcctagagcccgcctccgtgaaagactgccgggcgcatgcggtcggggttgttcactggctgtccggggctccgcgcgcgtcgccggcccagctctgtcgctgacgggaggatctgaagccggccgcaggtcaaagagtaaaatgaagtacattctggttactggtggtgttatatcaggaattggaaaaggaatcattgccagcagtgtgggcacaatactcaagtcatgtggtttacatgtaacttcaatcaaaattgacccctacattaacattgatgcaggaacattctctccttatgagcatggtgaggtttttgtgctggatgatggtggggaagtagaccttgacctgggtaactatgagcggttccttgacatccgcctcaccaaggacaataatctgaccactggaaagatataccagtatgtcattaacaaggaacggaaaggagattacttggggaaaactgtccaagttgtccctcatatcacagatgcaatccaggagtgggtgatgagacaggcgttaatacctgtagatgaagatggcctggaacctcaagtgtgtgttattgagcttggtggaaccgtgggggacatagaaagcatgccctttattgaggccttccgtcagttccaattcaaggtcaaaagagagaacttttgtaacatccacgtcagtctagttccccagccaagttcaacaggggaacagaagactaaacctacccagaatagtgttcgggaacttagaggacttgggctttccccagatctggttgtatgcaggtgctcaaatccacttgacacatcagtgaaggagaaaatatcaatgttctgccatgttgagcctgaacaagtgatctgtgtccacgatgtctcatccatctaccgagtccccttgttgttagaggagcaaggggttgtagattattttcttcgaagacttgaccttcctattgagaggcagccaagaaaaatgctgatgaaatggaaagagatggctgacagatatgatcgcttgctggagacctgctctattgcccttgtgggcaaatacacgaagttctcagactcctatgcctctgtcattaaggctctggagcattctgcactggccatcaaccacaaattggaaatcaagtacatagattctgcggacttggagcccatcacctcgcaagaagagcccgtgcgctaccacgaagcttggcagaagctctgtagtgctcatggagtgctggttccaggaggatttggtgttcgaggaacagaaggaaaaatccaagcaattgcctgggctcggaatcagaaaaagccttttttgggcgtgtgcttagggatgcagttggcagtggttgaattctcaagaaacgtgctgggatggcaagatgccaattctacagagtttgaccctacgaccagtcatcccgtggtcgtagacatgccagaacacaacccagggcagatgggcggaaccatgaggctgggcaagaggagaaccctgttccagaccaagaactcagtcatgaggaaactctatggagacgcagactacttggaagagaggcaccgccaccgatttgaggtgaatccagtctggaaaaagtgtttggaagaacaaggcttgaagtttgttggccaagatgttgaaggagagagaatggaaattgtggagttagaagatcatcccttttttgttggggttcagtaccaccctgagttcctgtccaggcctatcaagccctccccaccatactttggcctcctcctggcctctgtggggcggctctcacattacctccagaaaggctgcaggctctcacccagggacacctatagtgacaggagtggaagcagctcccctgactctgaaatcaccgaactgaagtttccatcaataaatcatgactgatcttgtagcggatgattcttcaagagacccttcaaacttgggtagagtttacagctctgactttacactcggctttggagactttctttaaattatgtttttattaagattattttattatgcggaaaggtatttgggaaacttgtcacttgcatgtcccatcacgtgtactggctcctctgtggtgtctgcctgttgcgtgacactctccttgcagttcttgagttgcggcagaacatcgcgatgggaaccgatggtgggtggggctgcagagtgccccatcggtcaccttgtttctcaactacctcgcatcattgcagatgctagcgcgttgcctgtcgctttcccttggatacctagaccgttataaagtgtgccacatggacttaccgagcatggagagaggattttagctaggatttgaacacttggtgctgggaacctcagggtattgcttgccactaagccatgaaaccagagacaaaatctctatactgccctgagttggggggaattctcagtgccaactgtggctggtcctcattcaaagggacggtcagtttggtgtcaacatgaaacaccaagatgtctgtctctgaagcgtgattttaaaatccccatgcctgtggctgcgcttcctatttctagggctgggaaacactccttgcatcaaggggtcacttacagaacaaagaatcttttgggggaaacttcctctaaaaccctctcatatatagacagctttgactggagggtccatttttcttccaggatggtgttactgcagttgaaagggcaatatgaagttactttcttaatgtgacctagcaataggcatagctacgtggcactatattctggccagactcgatgtgtactctaacttaagaaataaatcagtaaggcagaacaagaaaaaaaaaaaaaaaaaaa

SEQ ID NO: 1573 - DNA, 1197 bp, Homo Sapiens
  NM_001907
ctcccaacctcacatctgccacgatgttgctgctcagcctgaccctaagcctggttctcctcggctcctcctggggctgcggcattcctgccatcaaaccggcactgagcttcagccagaggattgtcaacggggagaatgcagtgttgggctcctggccctggcaggtgtccctgcaggacagcagcggcttccacttctgcggtggttctctcatcagccagtcctgggtggtcactgctgcccactgcaatgtcagccctggccgccattttgttgtcctgggcgagtatgaccgatcatcaaacgcagagcccttgcaggttctgtccgtctctcgggccattacacaccctagctggaactctaccaccatgaacaatgacgtgacgctgctgaagctcgcctcgccagcccagtacacaacacgcatctcgccagtttgcctggcatcctcaaacgaggctctgactgaaggcctcacgtgtgtcaccaccggctggggtcgcctcagtggcgtgggcaatgtgacaccagcacatctgcagcaggtggctttgcccctggtcactgtgaatcagtgccggcagtactggggctcaagtatcactgactccatgatctgtgcaggtggcgcaggtgcctcctcgtgccagggtgactccggaggccctcttgtctgccagaagggaaacacatgggtgcttattggtattgtctcctggggcaccaaaaactgcaatgtgcgcgcacctgctgtgtatactcgagttagcaagttcagcacctggatcaaccaggtcatagcctacaactgagctcaccacaggccctccccagctcaacccattaaagacccaggccctgtcccatcatgcattcatgtctgtcttcctggctcaggagaaagaagaggctgttgagggtccgactccctacttggacttctggcacagaaggggctgagtgactccttgagtagcagtggctcttcctagagtagccatgccgaggccggggcccccacccctcctccagggcaaccccttggtcctacagcaagaagccagaactgttggaatgaatggcagccctccctggagaggcagcctgtttactgaatacagaggatacgtttacaaactgaatacgcataataaataactgcacattctccatccaaaaaaaaaaaaaaaa

SEQ ID NO: 1574 - DNA, 3783 bp, Homo Sapiens
  NM_001908
ggggcggggccgggagggtacttagggccggggctggcccaggctacggcggctgcagggctccggcaaccgctccggcaacgccaaccgctccgctgcgcgcaggctgggctgcaggctctcggctgcagcgctgggtggatctaggatccggcttccaacatgtggcagctctgggcctccctctgctgcctgctggtgttggccaatgcccggagcaggccctctttccatcccctgtcggatgagctggtcaactatgtcaacaaacggaataccacgtggcaggccgggcacaacttctacaacgtggacatgagctacttgaagaggctatgtggtaccttcctgggtgggcccaagccaccccagagagttatgtttaccgaggacctgaagctgcctgcaagcttcgatgcacgggaacaatggccacagtgtcccaccatcaaagagatcagagaccagggctcctgtggctcctgctgggccttcggggctgtggaagccatctctgaccggatctgcatccacaccaatgcgcacgtcagcgtggaggtgtcggcggaggacctgctcacatgctgtggcagcatgtgtggggacggctgtaatggtggctatcctgctgaagcttggaacttctggacaagaaaaggcctggtttctggtggcctctatgaatcccatgtagggtgcagaccgtactccatccctccctgtgagcaccacgtcaacggctcccggcccccatgcacgggggagggagatacccccaagtgtagcaagatctgtgagcctggctacagcccgacctacaaacaggacaagcactacggatacaattcctacagcgtctccaatagcgagaaggacatcatggccgagatctacaaaaacggccccgtggagggagctttctctgtgtattcggacttcctgctctacaagtcaggagtgtaccaacacgtcaccggagagatgatgggtggccatgccatccgcatcctgggctggggagtggagaatggcacaccctactggctggttgccaactcctggaacactgactggggtgacaatggcttctttaaaatactcagaggacaggatcactgtggaatcgaatcagaagtggtggctggaattccacgcaccgatcagtactgggaaaagatctaatctgccgtgggcctgtcgtgccagtcctgggggcgagatcggggtagaaatgcattttattctttaagttcacgtaagatacaagtttcagacagggtctgaaggactggattggccaaacatcagacctgtcttccaaggagaccaagtcctggctacatcccagcctgtggttacagtgcagacaggccatgtgagccaccgctgccagcacagagcgtccttccccctgtagactagtgccgtagggagtacctgctgccccagctgactgtggccccctccgtgatccatccatctccagggagcaagacagagacgcaggaatggaaagcggagttcctaacaggatgaaagttcccccatcagttcccccagtacctccaagcaagtagctttccacatttgtcacagaaatcagaggagagacggtgttgggagccctttggagaacgccagtctcccaggccccctgcatctatcgagtttgcaatgtcacaacctctctgatcttgtgctcagcatgattctttaatagaagttttattttttcgtgcactctgctaatcatgtgggtgagccagtggaacagcgggagacctgtgctagttttacagattgcctccttatgacgcggctcaaaaggaaaccaagtggtcaggagttgtttctgacccactgatctctactaccacaaggaaaatagtttaggagaaaccagcttttactgtttttgaaaaattacagcttcaccctgtcaagttaacaaggaatgcctgtgccaataaaagttttctccaacttgaagtctactctgatgggatctcagatcctttgtcactgcctatagacttgtagctgctgtctctctttgtccctgcagagaatcacgtcctggaactgcatgttcttgcgactcttgggacttcatcttaacttctcgctgccccagccatgttttcaaccatggcatccctcccccaattagttccctgtcatcctcgtcaaccttctctgtaagtgcctggtaagcttgcccttgcttaagaactcaaaacatagctgtgctctatttttttgttgttgttgtgactgacagagtgagattccgtctcccaggctggagtgcagtggcgccttctcagctcactgcaacctgcagcctcctagattcaagcgattctcctgcttcagccttccgagtagctgggatgacaggcactcaccaatatgcctgggtaatttttgtatttttaagtacatacaggatttcaccatgttggccaggctagtttcaaactcccggcctcaggtggtctgcctgcctcagcctcccaaagtgttgggattacaggcgtgagccactgggccctgcctgtattttttatcagccacaaatccagcaacaagctgaggattcagctcataaaacaggcttggtgtcttggtgatctcacataaccaagatgctaccccgtggggaaccacatccccctggatgccctccagccttggtttgggctggagtcagggcctgtatacagtattttgaatttgtatgccactggtttgcattgctggtcaggaactctagtgctttgcatagccctggtttagaaacatgttatagcagttcttggtatagagcaaactagaagaaccagcaatcattccactgtcctgccaaggtacacctcagtactccccttcccaactgaagtggtatgaggctagctctttccaaaagcattcaagtttggcttctgatgtgactcagaatttaggaaccagatgctagatcaaataagctctgaaaatctgaggaacattgtaggaaaggtttgttaagcatctcttaagtgccatgatgagcataacagccggccgtcgtggctcacgcctgtaatcccagcactttgggaggccaaggtgggaggatgacaaggtcaggagttcaagaccagcctggccaacatgctgaaacctcacctctactaaaaatacaaaaattagctgggcatggtggcacatgcctgtaatcccagctacttgggaggctgaggcaggagaatcgcttgaacccgggaggcggaggttgcagtgagccaagacagtgccagtgcactccagcctcggtgacagcgcaaggctccgtctcaataattaaaaaaaaaaaaaaaaaaaaaaaggccgggcgcagtggctcaagcctgtaatcccagcactttgggaggctgaggcgggcagatcacctgaggtcaggagttttgagatcagccttggcaacacggtgaaaccccatctctactaaaaatacaaaattagccaagcatgctggcacatgcctgtaatcccagctactcgggaggctgaggtacgagaatcgcttgaacctgggaggcagaggatgcagtgagccgagatcacgccattgcactccagcctgggggacaagagtgaatctgtgtctcaccaaaaaaaaaaagaaaaagaaagatgcttaacaaaggttaccataagccacaaattcataaccacttatccttccagtttcaagtagaatatattcataacctcaataaagttctccctgctcccaaa

SEQ ID NO: 1575 - DNA, 2205 bp, Homo Sapiens
  NM_001909
gcgcacgccggccgcgcccacgtgaccggtccgggtgcaaacacgcgggtcagctgatccggcccaactgcggcgtcatcccggctataagcgcacggcctcggcgaccctctccgacccggccgccgccgccatgcagccctccagccttctgccgctcgccctctgcctgctggctgcacccgcctccgcgctcgtcaggatcccgctgcacaagttcacgtccatccgccggaccatgtcggaggttgggggctctgtggaggacctgattgccaaaggccccgtctcaaagtactcccaggcggtgccagccgtgaccgaggggcccattcccgaggtgctcaagaactacatggacgcccagtactacggggagattggcatcgggacgcccccccagtgcttcacagtcgtcttcgacacgggctcctccaacctgtgggtcccctccatccactgcaaactgctggacatcgcttgctggatccaccacaagtacaacagcgacaagtccagcacctacgtgaagaatggtacctcgtttgacatccactatggctcgggcagcctctccgggtacctgagccaggacactgtgtcggtgccctgccagtcagcgtcgtcagcctctgccctgggcggtgtcaaagtggagaggcaggtctttggggaggccaccaagcagccaggcatcaccttcatcgcagccaagttcgatggcatcctgggcatggcctacccccgcatctccgtcaacaacgtgctgcccgtcttcgacaacctgatgcagcagaagctggtggaccagaacatcttctccttctacctgagcagggacccagatgcgcagcctgggggtgagctgatgctgggtggcacagactccaagtattacaagggttctctgtcctacctgaatgtcacccgcaaggcctactggcaggtccacctggaccaggtggaggtggccagcgggctgaccctgtgcaaggagggctgtgaggccattgtggacacaggcacttccctcatggtgggcccggtggatgaggtgcgcgagctgcagaaggccatcggggccgtgccgctgattcagggcgagtacatgatcccctgtgagaaggtgtccaccctgcccgcgatcacactgaagctgggaggcaaaggctacaagctgtccccagaggactacacgctcaaggtgtcgcaggccgggaagaccctctgcctgagcggcttcatgggcatggacatcccgccacccagcgggccactctggatcctgggcgacgtcttcatcggccgctactacactgtgtttgaccgtgacaacaacagggtgggcttcgccgaggctgcccgcctctagttcccaaggcgtccgcgcgccagcacagaaacagaggagagtcccagagcaggaggcccctggcccagcggcccctcccacacacacccacacactcgcccgcccactgtcctgggcgccctggaagccggcggcccaagcccgacttgctgttttgttctgtggttttcccctccctgggttcagaaatgctgcctgcctgtctgtctctccatctgtttggtgggggtagagctgatccagagcacagatctgtttcgtgcattggaagaccccacccaagcttggcagccgagctcgtgtatcctggggctcccttcatctccagggagtcccctccccggccctaccagcgcccgctgggctgagcccctaccccacaccaggccgtcctcccgggccctcccttggaaacctgccctgcctgagggcccctctgcccagcttgggcccagctgggctctgccaccctacctgttcagtgtcccgggcccgttgaggatgaggccgctagaggcctgaggatgagctggaaggagtgagaggggacaaaacccaccttgttggagcctgcagggtggtgctgggactgagccagtcccaggggcatgtattggcctggaggtggggttgggattgggggctggtgccagccttcctctgcagctgacctctgttgtcctccccttgggcggctgagagccccagctgacatggaaatacagttgttggcctccggcctcccctcaaaaaaaaaaaaaaaaaaaaaaaaaaaaaaaaaaaaaaaaaaaaaaaaaaaaaaaaaaaaaaaaaaaaaaaaaaaaaaaaaaaaa

SEQ ID NO: 1576 - DNA, 924 bp, Homo Sapiens
  NM_001911
gcacagcagcaactgactgggcagcctttcaggaaagatgcagccactcctgcttctgctggcctttctcctacccactggggctgaggcaggggagatcatcggaggccgggagagcaggccccactcccgcccctacatggcgtatcttcagatccagagtccagcaggtcagagcagatgtggagggttcctggtgcgagaagactttgtgctgacagcagctcattgctggggaagcaatataaatgtcaccctgggcgcccacaatatccagagacgggaaaacacccagcaacacatcactgcgcgcagagccatccgccaccctcaatataatcagcggaccatccagaatgacatcatgttattgcagctgagcagaagagtcagacggaatcgaaacgtgaacccagtggctctgcctagagcccaggagggactgagacccgggacgctgtgcactgtggccggctggggcagggtcagcatgaggaggggaacagatacactccgagaggtgcagctgagagtgcagagggataggcagtgcctccgcatcttcggttcctacgacccccgaaggcagatttgtgtgggggaccggcgggaacggaaggctgccttcaagggggattccggaggccccctgctgtgtaacaatgtggcccacggcatcgtctcctatggaaagtcgtcaggggttcctccagaagtcttcaccagggtctcaagtttcctgccctggataaggacaacaatgagaagcttcaaactgctggatcagatggagacccccctgtgactgactcttcttctcggggacacaggccagctccacagtgttgccagagccttaataaacgtccacagagtataaataaccaattcctcatttgttcattaaacgtcattcagtactta

SEQ ID NO: 1577 - DNA, 3003 bp, Homo Sapiens
  NM_001915
caccgcccagcccgccgcccggttgccatggcgacgccgtcgcgccacggcccgcagaaccggccaagcgacccgggcgcggcgcggggaggctgaagggacgctcgggtaggcaagcgtttgcctcagcatggagggcggggccgcggcagccacccccacagcactgccttactacgtggccttctcccagctgctgggcctgaccttggtggccatgaccggcgcgtggctcgggctgtaccgaggcggcattgcctgggagagcgacctgcagttcaacgcgcaccccctctgcatggtcataggcctgatcttcctgcagggaaatgccctgctggtttaccgtgtcttcaggaacgaagctaaacgcaccaccaaggtcctgcacgggctgctgcacatctttgcgctcgtcatcgccctggttggcttggtggcggtgttcgactaccacaggaagaagggctacgctgacctgtacagcctacacagctggtgcgggatccttgtctttgtcctgtactttgtgcagtggctggtgggcttcagcttcttcctgttccccggagcttcattctccctgcggagccgctaccgcccacagcacatcttctttggtgctaccatcttcctcctttccgtgggcaccgccctgctgggcctgaaggaggcactgctgttcaacctcgggggcaagtatagcgcatttgagcccgagggtgtcctggccaacgtgctgggcctgctgctggcctgcttcggtggggcggtgctctacatcttgacccgggccgactggaagcggccttcccaggcggaagagcaggccctctccatggacttcaagacgctgacggagggagatagccccggctcccagtgatgcgcccggccggccctgggggttcgcggggtgtcttcttgcctgcccctgctgaggcgtcttcaggactgcaggctccggagagtggctctggcagcaggcgggcgcgtgggtgcagctgcatctgtttgagtgctgctttctggggtcaggtctccgcctcctctgcttctcctttctccgctgctatagaccagttcattgtgtgtggctcccgtgtctctgttgcccccttcagtgcagaaggctttgggtaggacttcgggtgttcggtcctggtcgcagagcacagatctttaaagaagcgagagaggaggccccaccctcctggcagcagatgcctggggcaaggccaggggaaactgggggggcctcagggacaggcctggaaaggccacgatggctgctgaattcaaacaaggagtccctccagcctgaataacacgtggcacaaatgggcccggcctttggcagaggagcaagtgatatgatgtgtaaagtatgttggtggtgaaagcaaggttccccaggagaggggagggactggcccctgggaagctctgagatgaggctgtggcccagctgtagtcctgaccttcctcttctttaaccctttagccctaggatggctttggtgggagaggggatagaagcccatgacttcagacagactttctcttggcagatgcaggcgggcctcctcccaggctgctccagacatgggggttggggatggggggcaccttgcagccccttcctgctggggctccctccttgtagcaccccccttgcggctcagctctggtttcctctcccaggctcacccaggctctgctcaggctgggaggcagagggcacaaaccttataattttttaaatgaaaaaccgctgctgctggctgtggctagagccccctggggctgctggagctgctgcctctgttctggaggacgagccttctccttatctgctgcccatctttccaggaagtcaggatggagtcagaacaactacagtcatcccccgtggtgtctgcacatcactccagccccataaagagtgtcatgttagctgagtcaccatttggcttcggcctggaaatagtgtgattagaacactgatcgtgtgcgaggccaggagatcaagaccatcctgactaacaaacacagtgaaaccccgtctctactaaaaatacaaaaaaattagccaggcgtggtggtgggcgcctgtagtcccagctacttgggaggctgaggcaggagaatggtgtgaacccgggagatggcgcttgcagtgagctgagattgcactccagcctgggcgacaggctcaaaaaagaaaaaaaaaagaacaccgatcatgtgcttcttggatctggtgactgttctctccctgttttcctttctttttgggtgtttgaggagcatggcttagcttgagacacacacagacactgtgtacttcagtgaagggcttaatatacagtttccaaacctgacgactcttcttcttgtaatggctgcccttttcctacctgaggccgtcttagagaaaggggccagtctcctctaatgctcagatttcccatagttggcttttgctgtgtctcctgcctcaggcagtgtcatttctgggagcaggtggttgtagtccaggcccctccccagcagggtctgcccaggctccttcgagcccctttccccgcctcctctcagcctgtccggatgacagtgttcgcctcctgtttagactgtacactcttcaggggtaggggtgccgtcagttcttcaatcagctggcacacacttgtatagtgaaatgtttacatgtgggaaaactccgccttagacaaactaccaaagtacaatcgtgtctctctctagccggaatgctacagagagaaatggaaccttagatttgcaacaaaagtctgtaaactggtctgtttgccaaagtgaacactggatgactaaggagctgaagaaggcccccagaagcggatttgtggtgggttattttattttgcctgtggccaatcttctgtgaaatacaatgtgctgttggtgcaacagatgattcaataaatgtctacagcagaaaaaaaaaaaaaaaaaaaa

SEQ ID NO: 1578 - DNA, 10831 bp, Homo Sapiens
  NM_001918
agtttgcggcactgttgtcatttccggggtaagatggctgcagtccgtatgctgagaacctggagcaggaatgcggggaagctgatttgtgttcgctattttcaaacatgtggtaatgttcatgttttgaagccaaattatgtgtgtttctttggttatccttcattcaagtatagtcatccacatcacttcctgaaaacaactgctgctctccgtggacaggttgttcagttcaagctctcagacattggagaagggattagagaagtaactgttaaagaatggtatgtaaaagaaggagatacagtgtctcagtttgatagcatctgtgaagttcaaagtgataaagcttctgttaccatcactagtcgttatgatggagtcattaaaaaactctattataatctagacgatattgcctatgtggggaagccattagtagacatagaaacggaagctttaaaagattcagaagaagatgttgttgaaactcctgcagtgtctcatgatgaacatacacaccaagagataaagggccgaaaaacactggcaactcctgcagttcgccgtctggcaatggaaaacaatattaagctgagtgaagttgttggctcaggaaaagatggcagaatacttaaagaagatatcctcaactatttggaaaagcagacaggagctatattgcctccttcacccaaagttgaaattatgccacctccaccaaagccaaaagacatgactgttcctatactagtatcaaaacctccggtattcacaggcaaagacaaaacagaacccataaaaggctttcaaaaagcaatggtcaagactatgtctgcagccctgaagatacctcattttggttattgtgatgagattgaccttactgaactggttaagctccgagaagaattaaaacccattgcatttgctcgtggaattaaactctcctttatgcctttcttcttaaaggctgcttccttgggattactacagtttcctatccttaacgcttctgtggatgaaaactgccagaatataacatataaggcttctcataacattgggatagcaatggatactgagcagggtttgattgtccctaatgtgaaaaatgttcagatctgctctatatttgacatcgccactgaactgaaccgcctccagaaattgggctctgtgagtcagctcagcaccactgatcttacaggaggaacatttactctttccaacattggatcaattggtggtacctttgccaaaccagtgataatgccacctgaagtagccattggggcccttggatcaattaaggccattccccgatttaaccagaaaggagaagtatataaggcacagataatgaatgtgagctggtcagctgatcacagagttattgatggtgctacaatgtcacgcttctccaatttgtggaaatcctatttagaaaacccagcttttatgctactagatctgaaatgaagactgataagacattcttgaactttttgagcttccaaagagtatgtaaaccctagctgtgccagcacatgttcatctttacaatttatattgtaaatgatttgtatcgtatgattaaggatctaaggcacaatatttgtcactgttctattagactttttactgaaaatgaataatggtgtaatggttctcctggggctgtcacattttataggtcagagtgtgacttcttaatatggtgctgatgtttttgtgtcaatggcttgaaactggcaagattaacaaaattaggccgggcatggtggctcacgcctgtaatcccagcactttgggaggcccaggtgggcggatcacctgaggttagaagtttgagaccagcctggccaacatggtgaaacctggcctctactaaaaatacaaaaattagccgggtgtggtggtgggtacctataatcccagctacttgggaggctgaggcaggagaatcgcttgaacctgggaggtggaggttgcagtgagctgagatcgtgctattgcactccagcctgggcgacagagcaagacgccatctcaaaaacaaaaaaacaaaattcatgttactaaaagacaggtagccatatacagacagtatatgccctattttttttaactgactcttaatgaaactttaattttacttaattaagaaatggaatttatatacaaaaatattttccatttccgttattatgctaattgttgtatgaaataagtgcaattatacttctcttttgagatatccaagagtatattcttgctctgtatagagaatatcatctgatagtgtcttatttatattaattaatgtctttgaaaagggaaaagtataaactggccttaaaattgtccaattatagttttataaccagtctattaaaggtgtttgtttaaaatggatatagttttagatttgtggtaatgctttggtattttcttggggaagaccttcacctttgcaaacttccctcatgtaaggaaggtactttaaatgtagcagccactgacatttctttttttaaaaaaaatttgagaagtctacttccttttaacttttttggtcttcagctaaaaaataggataagaaattaaggtctattccattctccatatcctgggtaagaatgtaaataagaggagaaggaagagtctaatagtaattatggatataaaaaataagaaattttgtatagaaatgaaggtttcataatgatcattttgttaaaggtctactttaatcagaaatagcaacgagatgaatgtatccaacatttcaatttgcattcggaaatccatgttgtttctaatattgtccagttgaaaactgtatgccaaaattagttgtttaagtgaagttttgtgacagaaaaaaggttgttttaatatctacttggtttttctcaaaatggaaataattttaaaatcaggaaagaataaatcagccaggtgtgatgacttgtaactgtaatcccagttataggggaggctgaagcaggaggatcacttgaggccaggagtttgagaccagcctgggcaacatagtgagatcccatctcaaaaaacattatttttaaaattagcctggtggctcacgcctgtaatcccagcactttgggaggccgaggtggccagatcacctgaggtcaggagttcgagaccaccctggccaacatggtgaaaccccatctctacagttttgtaaaaatacaaaaaattacctgggcctggtggcacacgcctgtagtcccagctacttgggaggctgaggcaggagaattgcttgagcccaagaggtggaggttacagtgagcagagatcacaccactgcactccagcctgggtggcagagcaacactttgtctcagaaaaaaaaaaaaaaaccaaaaagccaagtgtggtggtgtgcacctatagtcccagctactcaggaagctgagacaagaggatcaattgagcccaggagttcaaagctgtagtgagctgtcattgtgccactatcctccagtatgggtgacagagtgagacctggtctctaaaaaataaaataaaataaaaaaaacaggtcaaataaatgctgttgttgtaaaatttcagataatacaaagagttaaccaataaaagaaaaagtcattcataatcttaccactattaacattttgatgtatctatctgtatgtatggctattcttttttgttaaaacatgatcatagcatatctactattttattatttgatttttaaaatttaacattatattatgggtaaccttacatgtcaataaacaattccacattgtcatgctttaaatggctgcataggctgggtgtggtggctcacgcctgtaatcctaccactttgggaggccaaggcaggtagatcacaaggtcaggagttcgagaccagcctggccaatatggtgaaacctcatctctattgaaaatacaaaaatcagccaggcacggtggcaggcgcctgtagtccacctactcgggaggctgaggcaggagaactgcttgaacccagcggcagaggttgcagtgagccaagattgagccactgcactccagcctggtgatagagcgagactctgtctctaaataaataaataaataaataaatgtctgcatagtattccattgtatgcatttattatacattcaaacattaaacatctaccataccaatcatggttctaagcatacagtagccaccttcatgcttccttgattgggcttacagtctagtaaggagacagatattaaataactgcataaaacactgttcttggtaggtaataacccagatgctatgagccatccagtaaaggttaccgatcttatctggaaggatcagaagatggatgtcccataatttaaccaattatctattgataggcatttattgagttttaaatgaataatgacatgatcaataaaaatgtcctcctcacttaaagaatagaaaaaccaggagaagggagttctgaaataagtaagtatgtaggtccagcatcaatggctcaagatactctattcccaaataacccttaagttatctggttctattccaacccttgggtattactatcttctctttggtctcatgcattgagaattcagcaaaggatttgttccctacagtgtgcacggcccttaggatagcaggattccctgaagagggccaaaggggcaggagcgcagccttagtggcagtgctggtccatgaggctctacaaagcaagggatgggtgtttgggaggaggaaaaggctcttgctgtactcctagaggttggaattaaagtggaaaagccagaaaattcaagtcctttactaacatgtctggagattagaaggtatatgtacatgggggagaagccaaaattattgctgcgagtggtcagcaagaaaatcaaggctcttttcattattttgagcattcctctgatatttgaaaaggaagtacaacaggaaaggaagtctgaggatggaagctaaaattggtatgaatttatattttagagatcaaaatgtaccttatgttgaaacctatgtaagaagtgattatgtagaaagagtgaaagtgatagctcttagtctggaaagcccactggcttgtttgggcatttctcatggcttcccactcaaagtggatccccaaaatcacttgatggatttccttgctgatttctaagtaaactatggtttaagaaagaaatgacagggctcagcactgccctacagtaccaagaatacaaatgtttccatgaagtcttcaaaggcatttgtaaaattcaggctgtaagtgattagttagttcattctgcacttatttattaactgtatattcagttccaggctctagggtagagattatggataaaggtgaattagatagatgaagtttttgccctcacagcaaaagctttagccaataattaaagctatcactggaagtgggtctgtgccaataacctagagaagagcagtgcttttagagttgagctatattcccaatcagttcttaatggtggttttacccccttccctctacactgtcttttcttgagattggatcatgtgtgtgaacccacatcatttccagtcaaaatcaccaagagaggccggacacagtggctcatgcctataatcccagcactttgggaggcctaaatgggtgggcctcttgagtccagagtttgagaccagcctgggcgaccccagctctaccaaaaaaaccaaaaaacaaaaaataccaaaaaaaaaaaaaattaggccgatgaagtgacatgcacctgtgtgccacctactcaggaggctgaggtggcaggatcacttgcatctgggggcaaaggctgccgtgagctgagattgtgccattgcgctccagcctgggcgacagagcaagactctgtgtgtgtgtgtgtgtgtgtgtgtgtgtgtgtgtgtgtgtgtgtgtgtgtgtgtgtgtatacacacacacatatatatacacacacccccaggagaccttttgtctttcttggttcatgtgcccatcagtgtgggcaggagaatagaatactctgtccacacttgagtcttagtcacctttggagcctaggagtcagccatcctcattcaactacatggatcgagaatgggaatctgggagaatttttttatgggcagattaaaaaggaagttaactatgtaaagtaaggcattgccttcccaccccatcccacctcagttcgtgttaaattatgaatttttctaagagagttctttaatgacatggatagagaggaagctgaggtggcagtagagtagggagtggaaggcaaatacataagatactattaaactgtgaagctgtttgttacaattccaagattttataatttctccaacaaaaaacatttgtattttcttcccagtttaagttcaatgttaatttgagaaataattctactctcaaacttcatgttatgctgacagttcaactgatgctgtcaaaatgtgaattactaacttcagtattctctattcatctgatttttcttaaaatgtttgcgtgttaatatactcactagctttaatgctctactcttatactggcaccttaattatggtaaaaggtaaaaggttaagttaaaattcccaatcctagttatttggtcaaacagaagattaacagaactccatggcttaccacaggaatatttatcaagagaaaaagaagatacctatttgaatttacatgacactttctgtgaaatatctggattaccagattagtctgaaacaaatgccttccaaattctacagcgcatgcccaaggcactctttacagtacctgttcgggtcttttcttctaattttaagcacctacccaaacgtcttcccaggcttgtcataataagcaaataacctcagagcagacaaagtgattcaatctaagaaccttgaatttctctccttttcacctcaaaatttctattctcacactttctttttgtttctctttccgagaagtggttctccatcagcaaataccaactgttttctgtcctctattatttattccatctcttcctcctgatccctgccccatgttgaacccccattgccccactttgatccttcagtctcttcctcacatccagaactgtaccagatttactcccttagcacactgattaaaatttatttccatttccttatggaggaggtattagagactgatcccagacctctacaaatttcattgtggcagggtaatgttatgtgtccataaaccttgttccttttctttcagcctgcagttaggtagagccatgtcatttatttgtaactattagaatatgggtatatgggttgaagtaatgtaggccatttccagacatggcccataacacttctcaagagattcttcatattctatctcttcccctccaacatgcacccttcaaggttgaagatggcaccacacaagatagaaggagccagtgttccaaatgactaggcagagcagaatgctcccctccctacaccctagcaccaattggtttggatgtgatagttgaataatacacttttattgttttaagacattaatattttgagattaatctgcaagtctagttagtaaaactcgaactctgagctgtctaatgcagtagcctctagccacatgtagctatttaaatttaaattttaattttaattaatcaaaattcaactcagatatactagccacatttcaattgctcagtagccacactaattaaatttaaatttaaatagctacatgtggcttatagcaccataccagatagcacagatgtagactgtttccatcatcacagaaaattctattggatagtgctgccttaactaataagacacaaatgttcttattttttaaatagtccctaaaacaaacgaaaaacaaagaactcccttctctaatggcaaatttcagtttgcctaaaagaagactcagaatgcttttcttatattgttacctctgactgccactaaatgaataaatttcctgtcttgctccttctgccaaacttcttgaatgggtgatctttaactccttgcaatcctggcttttttccccagtgctcacctgtaatcagtgttggccacaactcccacccagatgtctcctaaatagttctctgaacccacctctgtcctgatctacagacattcattccaatgctttagcatttcaaggtcatcaaatgactcagtgacatctcagacagtcagacagaccaggtcaactatgaactatttatgccaaaccttacatggttcatgttatccttgctatcccatcaaaataaccacaggctttttttttttttttttttaatttttgagatggagtctcactctgtcaccccgactagagtgcagtggtgcgatctcggctctgctcactgcaacctccgtctcctgggttcaaacagtgctcattcctcaactcccaagtagctgagattacaggcatgcaccatcacgcctggctaatttttctatttttagcagagatggggtttcgccatgttggccaggctggtctcgaactcctgacctcaagtgatctgcccgcctccacctcacaaagctttgggattacaggcatgagccacggtgcctggcctgcagcctcctttattttacaaaaggcattaccacttaaacactgaagatagcacgaatctctgatgtttgcaagttcagaataaaatggaaatgaaaattcattatgtggcagtctcagtactgagcacaaaggcttttaaccacaagcaaattactgtgctagccagaccgtgtgagagaactccaggccagcttgctaaaactgagcaggagaatttggagagagtccagaggagagccacagaaacaactgaagcatgacaagaataattgcagttctgttatagagaggtcatctatatcaggcttttatggagtaccatgtggaatgttaccacgcagagcatggggaacagctgttgtgactcaacaagagacaggacagaagaaatgagaacaggtggaagatcaataatttaggtttgatatggggaaagatggaacagtcaaagggattcacactgatttttggctgagcagaaggcagagtctcctccaacgggcaatgtaagtgcccccactcatctacaccccgagaagagccatcaaactgtattaaacttggaaaaagctatttaacttcaagtgtgctgcgagaaaacttcataatagttcctaagatgtgctaaaaagtaaagtccaaaaagatcataaagtctgtagagaagttctaagagtgcagtcagctataaaaacctagcaatttaatttcttagaaaaatgtagctggagttcaaactgtagtaacaaaggcaagtaaattaagttgtgggcaggtgtaattaagttaataggaatggcagggatgaatataaatcagaacaggactaacagtttgaaacattagatattcaaatgctcagagctgatgagccgagccactacgctaacaactctgcaaaccaaaggtttcacaaattgcacaagaacctggcctcgatcccattgtgttgctggcataagattagaagggcctgttggttcaattgttgctttggacagaggaggacaaacttgccacagtgaagaaatcatttttaaaaaccaccactgtcctttagtgcactaatttctctaataactaggtgtatattagaaataatgatatataagtgcagtatactccagtttcaacagaatggtgtcacttctgtaaaatgttgattttcagattgtcatactttctaaatacaaaaatttgtcacagcttccacatttacaagatattaaacattccataaaatatttgtagaaatatgaaaaaccaatttttgtagttgccttttgaaatgtatacaaaatatcccacatgggcaacatggtaaaacctcgtctctacaaaaaaaaaaaaaaaaatacaaaaagttagccaggcctggtggtgcacgcctgtggtcccagctactcgggaagctgaagtgagatcacctgtgcccaggaggtcgaagctgcagtgagctgtgattgcaccactgcactccagcctgggtgacagagtgagactttgtctcaaataaacaaaaagagacatatacaaaatatattagaaagttgggttaatatcctacaaacaaagtattacatagtttgcacaggattatgtgtgtaaaaagttttaaattcagtatagcttttatttctgcagaactaaaagtagtgcataaaaataaaagtgggatgagcatatctttttaatttgctatgcagtaaaaagtatctcagtcaacatataggaaaccagtgccatttctgtatcatttgacaccgaaggggtattgttttttgttttgttttgtttttcttttgaagaaagacttttatgtcttttattctattcttccgatttggggtttaaattacccccaataagtttgcagaatattctgattactactgcttaggtgatatatttcatatgagaactatctttacacaatgggaaaaaatatggtaaccacttcattcatcagagaagttgtgttttgtttacttgtattttgtttgctaaatgaaattggttatttagactcatggcatgctttttctcaaatggagatttaaaagtcatttccaatgtccttctaacttctggccaattcccagtaggctatagaataaacagttttcatataataaaaaaaaaaaaaaaaa

SEQ ID NO: 1579 - DNA, 1069 bp, Homo Sapiens
  NM_001919
agcccgcgacctttatcccgcgcgttgcggtcaagatggcgctggtggcttctgtgcgagtcccggcgcgcgttctgctccgcgcgggggcccggctcccgggcgcggccctcgggcggacggagcgggcggccggcggcggagacggcgcgcggcgcttcgggagccagcgggtgctggtggagccggacgcgggcgcaggggtcgctgtgatgaaattcaagaaccccccagtgaacagcctgagcctggagtttctgacggagctggtcatcagcctggagaagctggagaatgacaagagcttccgcggtgtcattctgacctcggaccgcccgggtgtcttctcggccggcctggacctgacggagatgtgtgggaggagccccgcccactacgctgggtactggaaggccgttcaggagctgtggctgcggttgtaccagtccaacctggtgctggtctccgccatcaacggagcctgccccgctggaggctgcctggtggccctgacctgtgactaccgcatcctggcggacaaccccaggtactgcataggactcaatgagacccagctgggcatcatcgcccctttctggttgaaagacaccctggagaacaccatcgggcaccgggcggcggagcgtgccctgcagctggggctgctcttcccgccggcggaggccctgcaggtgggcatagtggaccaggtggtcccggaggagcaggtgcagagcactgcgctgtcagcgatagcccagtggatggccattccagaccatgctcgacagctgaccaaggccatgatgcgaaaggccacggccagccgcctggtcacgcagcgcgatgcggacgtgcagaacttcgtcagcttcatctccaaagactccatccagaagtccctgcagatgtacttagagaggctcaaagaagaaaaaggctaacgattgggctgccacaggcttacggccacacgtgcccctgtgggtcccagggaggtcttaaacaaggtatttttcaacttaaaagtactgccagcgtttcattttgcaaaaaaaaaaaaaaaaaa

SEQ ID NO: 1580 - DNA, 2019 bp, Homo Sapiens
  NM_001921
agggcttcgggcccccggggccagccgccgtcctgcgaacgcgcggcgcccgggccgctgcccccttccggccccgcggcggccccgcctcctcccccgacttccttccctgagcacggcggcggcggggacgagcaccggcctgcgcgcggagccggcaccggatgacccaacatgagtgaagtttcctgcaagaaacgggacgactatttggaatggccagagtattttatggctgtggccttcttatcagcacagagaagcaaagatccaaattcccaggtcggcgcctgcatcgtgaattcagaaaacaagattgtcgggattgggtacaatgggatgccaaatgggtgcagtgatgacgtgttgccttggagaaggacagcagagaataagctggacaccaaatacccgtacgtgtgccatgcggagctgaatgccatcatgaacaaaaattcgaccgatgtgaaaggctgtagtatgtatgttgccttgttcccttgtaatgaatgcgctaagctcatcatccaggcaggtataaaagaagtgattttcatgtctgataaataccatgatagtgacgaggcaactgctgcgaggctcctgtttaatatggccggggtgacattccggaaattcataccgaagtgcagcaagattgtcattgactttgattcaattaacagcagaccgagtcaaaagcttcagtgagttacatctcattcaatctccagaagattgggattatcgtcttctaagaggttgctaatgcctttcatcttgaagttacacataacttcttactagccagtatggcaaaagtaggcatctaaagaatataaagcctcaaatcttccttactgtctctcttgtcacatggaatctacatgtgtttgaactattgctttagggtttaaaataggggagcctgtggtggcctggtgcacagggctagaacgagagtgcctccccttcttgtgtcctggctggctgggatgctggtggctcttcagaggagcatcagctgtctgtcatctgctgcgatccggcagcctctcttcactgctacatgtgctggaaggacaaataaataattgtggttgtgttcttaatggggacgagcagacacactgatctgaacatctggcccaagtgaagcatggcatatagtgcccttggaagaaaattaggcctcaaatgacagtagcattgaagtgtttgctgcagagttgagggaaacccccagccaccctcccggaatccgagatagggtggcacatctgtcctgacagacgaggagtgtaactgaaccaggaatatttcctccattcctgctctcccactgcacacagggtggtggcacattatccctctggggggtggggacgcctgttgttttggctcaatttgggtttgttggtcacatggagctcttccatttcgtttagctgaataatgagttgttcctagaggagacagcctgtctctccttgttgcccccaaagcccatgccctgccgtggtggcagctggggctgtggatgggaggggtccccaacatggatgtgttgcccctcctccgcatgccaacgcagttcatgtacaaggcccctctgcaactggagagaaaattaattcctatcccgtgagtggattgtgagaaattccacccacgtggagacagcttactgcagcactgttggtgttcggagctcttctgtgccctggctccatgctttcacctacacaagcatcaccttcctaatcaccgcggggcggggagcgtgtggctgtgccccttctctttaatctcatttaatttttattaaacatgctcagtacctgtgttgagaaaaggctttctttatcctaaagattattacctttttaaagtgctcttatattttcatgagtttttattttgtctctgagattttgtattccacattctagggtattctgtaatttggctccttaccaatattattaaaatcttattaaaatctaccctaccaaagca

SEQ ID NO: 1581 - DNA, 4355 bp, Homo Sapiens
  NM_001923
gcctccttcggttggcggcctcgggcttcgggagtcctccaagaggccaggtgaggccgtcccgtgatgccccgcgccccggccgctctggcctgcaacgtgtctctggggcggaggcagcggcagtggagttcgctgcgcgctgttgggggccacctgtcttttcgcttgtgtccctctttctagtgtcgcgctcgagtcccgacgggccgctccaagcctcgacatgtcgtacaactacgtggtaacggcccagaagcccaccgccgtgaacggctgcgtgaccggacactttacttcggccgaagacttaaacctgttgattgccaaaaacacgagattagagatctatgtggtcaccgccgaggggcttcggcccgtcaaagaggtgggcatgtatgggaagattgcggtcatggagcttttcaggcccaagggggagagcaaggacctgctgtttatcttgacagcgaagtacaatgcctgcatcctggagtataaacagagtggcgagagcattgacatcattacgcgagcccatggcaatgtccaggaccgcattggccgcccctcagagaccggcattattggcatcattgaccctgagtgccggatgattggcctgcgtctctatgatggccttttcaaggttattccactagatcgcgataataaagaactcaaggccttcaacatccgcctggaggagctgcatgtcattgatgtcaagttcctatatggttgccaagcacctactatttgctttgtctaccaggaccctcaggggcggcacgtaaaaacctatgaggtgtctctccgagaaaaggaattcaataagggcccttggaaacaggaaaatgtcgaagctgaagcttccatggtgatcgcagtcccagagccctttgggggggccatcatcattggacaggagtcaatcacctatcacaatggtgacaaatacctggctattgcccctcctatcatcaagcaaagcacgattgtgtgccacaatcgagtggaccctaatggctcaagatacctgctgggagacatggaaggccggctcttcatgctgcttttggagaaggaggaacagatggatggcaccgtcactctcaaggatctccgtgtagaactccttggagagacctctattgctgagtgcttgacataccttgataatggtgttgtgtttgtcgggtctcgcctgggtgactcccagcttgtgaagctcaacgttgacagtaatgaacaaggctcctatgtagtggccatggaaacctttaccaacttaggacccattgtcgatatgtgcgtggtggacctggagaggcaggggcaggggcagctggtcacttgctctggggctttcaaggaaggttctttgcggatcatccggaatggaattggaatccacgagcatgccagcattgacttaccaggcatcaaaggattatggccactgcggtctgaccctaatcgtgagactgatgacactttggtgctctcttttgtgggccagacaagagttctcatgttaaatggagaggaggtagaagaaaccgaactgatgggtttcgtggatgatcagcagactttcttctgtggcaacgtggctcatcagcagcttatccagatcacttcagcatcggtgaggttggtctctcaagaacccaaagctctggtcagtgaatggaaggagcctcaggccaagaacatcagtgtggcctcctgcaatagcagccaggtggtggtggctgtaggcagggccctctactatctgcagatccatcctcaggagctccggcagatcagccacacagagatggaacatgaagtggcttgcttggacatcaccccattaggagacagcaatggactgtcccctctttgtgccattggcctctggacggacatctcggctcgtatcttgaagttgccctcttttgaactactgcacaaggagatgctgggtggagagatcattcctcgctccatcctgatgaccacctttgagagtagccattacctcctttgtgccttgggagatggagcgcttttctactttgggctcaacattgagacaggtctgttgagcgaccgtaagaaggtgactttgggcacccagcccaccgtattgaggacttttcgttctctttctaccaccaacgtctttgcttgttctgaccgccccactgtcatctatagcagcaaccacaaattggtcttctcaaatgtcaacctcaaggaagtgaactacatgtgtcccctcaattcagatggctatcctgacagcctggcgctggccaacaatagcaccctcaccattggcaccatcgatgagatccagaagctgcacattcgcacagttcccctctatgagtctccaaggaagatctgctaccaggaagtgtcccagtgtttcggggtcctctccagccgcattgaagtccaagacacgagtgggggcacgacagccttgaggcccagcgctagcacccaggctctgtccagcagtgtaagctccagcaagctgttctccagcagcactgctcctcatgagacctcctttggagaagaggtggaggtgcacaacctacttatcattgaccaacacacctttgaagtgcttcatgcccaccagtttctgcagaatgaatatgccctcagtctggtttcctgcaagctgggcaaagaccccaacacttacttcattgtgggcacagcaatggtgtatcctgaagaggcagagcccaagcagggtcgcattgtggtctttcagtattcggatggaaaactacagactgtggctgaaaaggaagtgaaaggggccgtgtactctatggtggaatttaacgggaagctgttagccagcatcaatagcacggtgcggctctatgagtggacaacagagaaggagctgcgcactgagtgcaaccactacaacaacatcatggccctctacctgaagaccaagggcgacttcatcctggtgggcgaccttatgcgctcagtgctgctgcttgcctacaagcccatggaaggaaactttgaagagattgctcgagactttaatcccaactggatgagtgctgtggaaatcttggatgatgacaattttctgggggctgaaaatgcctttaacttgtttgtgtgtcaaaaggatagcgctgccaccactgacgaggagcggcagcacctccaggaggttggtcttttccacctgggcgagtttgtcaatgtcttttgccacggctctctggtaatgcagaatctgggtgagacttccacccccacacaaggctcggtgctcttcggcacggtcaacggcatgatagggctggtgacctcactgtcagagagctggtacaacctcctgctggacatgcagaatcgactcaataaagtcatcaaaagtgtggggaagatcgagcactccttctggagatcctttcacaccgagcggaagacagaaccagccacaggtttcatcgacggtgacttgattgagagtttcctggatattagccgccccaagatgcaggaggtggtggcaaacctacagtatgacgatggcagcggtatgaagcgagaggccactgcagacgacctcatcaaggttgtggaggagctaactcggatccattagccaagggcagggggcccctttgctgaccctccccaaaggctttgccctgctgccctccccctcctctccaccatcgtcttcttggccatgggaggcctttccctaagccagctgcccccagagccacagttcccctatgtggaagtggggcgggcttcatagagacttgggaatgagctgaaggtgaaacattttctccctggatttttaccagtctcacatgattccagccatcaccttagaccaccaagccttgattggtgttgccagttgtcctccttccggggaaggattttgcagttctttggctgaaaggaagctgtgcgtgtgtgtgtgtgtatgtgtgtgtgtgtatgtgtatctcacactcatgcattgtcctctttttatttagattggcagtgtagggagttgtgggtagtggggaagagggttaggagggtttcattgtctgtgaagtgagaccttccttttacttttcttctattgcctctgagagcatcaggcctagaggcctgactgccaagccatgggtagcctgggtgtaaaacctggagatggtggatgatccccacgccacagcccttttgtctctgcaaactgccttcttcggaaagaagaaggtgggaggatgtgaattgttagtttctgagttttaccaaataaagtagaatataagaagaaaggtaaaaaaaaaaaaaaaaaa

SEQ ID NO: 1582 - DNA, 1398 bp, Homo Sapiens
  NM_001924
ggagagcggggccctttgtcctccagtggctggtaggcagtggctgggaggcagcggcccaattagtgtcgtgcggcccgtggcgaggcgaggtccggggagcgagcgagcaagcaaggcgggaggggtggccggagctgcggcggctggcacaggaggaggagcccgggcgggcgaggggcggccggagagcgccagggcctgagctgccggagcggcgcctgtgagtgagtgcagaaagcaggcgcccgcgcgctagccgtggcaggagcagcccgcacgccgcgctctctccctgggcgacctgcagtttgcaatatgactttggaggaattctcggctggagagcagaagaccgaaaggatggataaggtgggggatgccctggaggaagtgctcagcaaagccctgagtcagcgcacgatcactgtcggggtgtacgaagcggccaagctgctcaacgtcgaccccgataacgtggtgttgtgcctgctggcggcggacgaggacgacgacagagatgtggctctgcagatccacttcaccctgatccaggcgttttgctgcgagaacgacatcaacatcctgcgcgtcagcaacccgggccggctggcggagctcctgctcttggagaccgacgctggccccgcggcgagcgagggcgccgagcagcccccggacctgcactgcgtgctggtgacgaatccacattcatctcaatggaaggatcctgccttaagtcaacttatttgtttttgccgggaaagtcgctacatggatcaatgggttccagtgattaatctccctgaacggtgatggcatctgaatgaaaataactgaaccaaattgcactgaagtttttgaaatacctttgtagttactcaagcagttactccctacactgatgcaaggattacagaaactgatgccaaggggctgagtgagttcaactacatgttctgggggcccggagatagatgactttgcagatggaaagaggtgaaaatgaagaaggaagctgtgttgaaacagaaaaataagtcaaaaggaacaaaaattacaaagaaccatgcaggaaggaaaactatgtattaatttagaatggttgagttacattaaaataaaccaaatatgttaaagtttaagtgtgcagccatagtttgggtatttttggtttatatgccctcaagtaaaagaaaagccgaaagggttaatcatatttgaaaaccatattttattgtattttgatgagatattaaattctcaaagttttattataaattctactaagttattttatgacatgaaaagttatttatgctataaattttttgaaacacaatacctacaataaactggtatgaataattgcatcatttcaaaaaaaaaaaaaaaaaa

SEQ ID NO: 1583 - DNA, 542 bp, Homo Sapiens
  NM_001925
gtctgccctctctgctcgccctgcctagcttgaggatctgtcaccccagccatgaggattatcgccctcctcgctgctattctcttggtagccctccaggtccgggcaggcccactccaggcaagaggtgatgaggctccaggccaggagcagcgtgggccagaagaccaggacatatctatttcctttgcatgggataaaagctctgctcttcaggtttcaggctcaacaaggggcatggtctgctcttgcagattagtattctgccggcgaacagaacttcgtgttgggaactgcctcattggtggtgtgagtttcacatactgctgcacgcgtgtcgattaacgttctgctgtccaagagaatgtcatgctgggaacgccatcatcggtggtgttagcttcacatgcttctgcagctgagcttgcagaatagagaaaaatgagctcataatttgctttgagagctacaggaaatggttgtttctcctatactttgtccttaacatctttcttgatcctaaatatatatctcgtaacaag

SEQ ID NO: 1584 - DNA, 1173 bp, Homo Sapiens
  NM_001928
gtgtctcagccacagcggcttcaccatgcacagctgggagcgcctggcagttctggtcctcctaggagcggccgcctgcgcggcgccgccccgtggtcggatcctgggcggcagagaggccgaggcgcacgcgcggccctacatggcgtcggtgcagctgaacggcgcgcacctgtgcggcggcgtcctggtggcggagcagtgggtgctgagcgcggcgcactgcctggaggacgcggccgacgggaaggtgcaggttctcctgggcgcgcactccctgtcgcagccggagccctccaagcgcctgtacgacgtgctccgcgcagtgccccacccggacagccagcccgacaccatcgaccacgacctcctgctgctacagctgtcggagaaggccacactgggccctgctgtgcgccccctgccctggcagcgcgtggaccgcgacgtggcaccgggaactctctgcgacgtggccggctggggcatagtcaaccacgcgggccgccgcccggacagcctgcagcacgtgctcttgccagtgctggaccgcgccacctgcaaccggcgcacgcaccacgacggcgccatcaccgagcgcttgatgtgcgcggagagcaatcgccgggacagctgcaagggtgactccgggggcccgctggtgtgcgggggcgtgctcgagggcgtggtcacctcgggctcgcgcgtttgcggcaaccgcaagaagcccgggatctacacccgcgtggcgagctatgcggcctggatcgacagcgtcctggcctagggtgccggggcctgaaggtcagggtcacccaagcaacaaagtcccgagcaatgaagtcatccactcctgcatctggttggtctttattgagcacctactatatgcagaaggggaggccgaggtgggaggatcattggatctcaggagttcgagatcagcatgggccacgtagcgcgactccatctctacaaataaataaaaaattagctgggcaattggcgggcatggaggtgggtgcttgtagttccagctactcaggaggctgaggtgggaggatgacttgaacgcaggaggctgaggctgcagtgagttgtgattgcaccactgccctccagcctgggcaacagagtgaaaccttgtctctctctacaaaaaaaaaaaaaaaa

SEQ ID NO: 1585 - DNA, 4352 bp, Homo Sapiens
  NM_001931
acaaacctgaaacgaaatctttgcaaccagtacagcctgcgcggggcgcggcccagtccatcccccttcggatgcgcagaagcagaggtcaccacgccggacccctcgattccctcgcgggcgattcctggctccttcaccaccccagcactccaagacccccgccctttggcctgaggctcccactgccctagccagttcccgggctcacttccagcttttccagaaagcttggccacgcccctcggcccagactctcaggccactcggccgcaattaacccgcgtctctgcgcctttttaggcccctccccctcggtcgtgcccttgtcatctcttaggccccgtctcaccctttcggatgcctcccctagaaccctaccactttccacccctttccgtctgttatttctcccaaacttgcgcccgcacaggcccctctggaacactcctgccccgtagtgcccctcgtccccgctccgtagagaaagagcgtgcgtgccgcgcatttctggcctggggagcgggtggagtaaacctgcgggaaccattttacgacaacgtgcggctgtgcggtgtggctgacggcaacgccgctgctcttggagaggtcactccggagacggcgttggttttggggtgtggggggttggtggcactatgtggcgcgtctgtgcgcgacgggctcagaatgtagccccatgggcgggactcgaggctcggtggacggccttgcaggaggtacccggaactccacgagtgacctcgcgatctggcccggctcccgctcgtcgcaacagcgtgactacagggtatggcggggtccgggcactgtgcggctggacccccagttctggggccacgccgcggaaccgcttactgctgcagcttttggggtcgcccggccgccgctattacagtcttcccccgcatcagaaggttccattgccttctctttcccccacaatgcaggcaggcaccatagcccgttgggaaaaaaaagagggggacaaaatcaatgaaggtgacctaattgcagaggttgaaactgataaagccactgttggatttgagagcctggaggagtgttatatggcaaagatacttgttgctgaaggtaccagggatgttcccatcggagcgatcatctgtatcacagttggcaagcctgaggatattgaggcctttaaaaattatacactggattcctcagcagcacctaccccacaagcggccccagcaccaacccctgctgccactgcttcgccacctacaccttctgctcaggctcctggtagctcatatccccctcacatgcaggtacttcttcctgccctctctcccaccatgaccatgggcacagttcagagatgggaaaaaaaagtgggtgagaagctaagtgaaggagacttactggcagagatagaaactgacaaagccactataggttttgaagtacaggaagaaggttatctggcaaaaatcctggtccctgaaggcacaagagatgtccctctaggaaccccactctgtatcattgtagaaaaagaggcagatatatcagcatttgctgactataggccaaccgaagtaacagatttaaaaccacaagtgccaccacctaccccacccccggtggccgctgttcctccaactccccagcctttagctcctacaccttcagcaccctgcccagctactcctgctggaccaaagggaagggtgtttgttagccctcttgcaaagaagttggcagtagagaaagggattgatcttacacaagtaaaagggacaggaccagatggtagaatcaccaagaaggatatcgactcttttgtgcctagtaaagttgctcctgctccggcagctgttgtgcctcccacaggtcctggaatggcaccagttcctacaggtgtcttcacagatatcccaatcagcaacattcgtcgggttattgcacagcgattaatgcaatcaaagcaaaccatacctcattattacctttctatcgatgtaaatatgggagaagttttgttggtacggaaagaacttaataagatattagaagggagaagcaaaatttctgtcaatgacttcatcataaaagcttcagctttggcatgtttaaaagttcccgaagcaaattcttcttggatggacacagttataagacaaaatcatgttgttgatgtcagtgttgcggtcagtactcctgcaggactcatcacacctattgtgtttaatgcacatataaaaggagtggaaaccattgctaatgatgttgtttctttagcaaccaaagcaagagagggtaaactacagccacatgaattccagggtggcacttttacgatctccaatttaggaatgtttggaattaagaatttctctgctattattaacccacctcaagcatgtattttggcaattggtgcttcagaggataaactggtccctgcagataatgaaaaagggtttgatgtggctagcatgatgtctgttacactcagttgtgatcaccgggtggtggatggagcagttggagcccagtggcttgctgagtttagaaagtaccttgaaaaacctatcactatgttgttgtaactaactcaagaatttctaaactctcccaggtcacactgattcattcttaacaagatatttatatgttattaaacaggtggttctttttattttaaccagttatttttattattgagtctgtccagataagttatttataatgggcattactgaatttttaaaatgccgattacacccaaatattgtgcacatttaataatcagacaccagatttttagctctgtactcctaattaagggacatgtatgtggccttgcctagccctttggtgataagtacttcctctaggaaatgtacgataggtagaattgtggttccctaaagacaagtacataaaggtgaccctgatgaaaccttgaagttctgaaatttaactgcctaaaatgttctccttagatgtgagagaaagagaaatcagaaaaattaattctcttgggggaagggcttgaattgaagctttactttagaatttagccctggtttgaaattttccattacatgatcttggtttatcatcgatgggaagggtagaaaacttcaaggaaaataagtgaaattttaaaagtcagcattttcttagacctcttcagctgattgtttatttttctatgaattcctacacatggttattcccccctacttgagataatctaaatataaaccagctacttgatgtaactgagaatttgtgtggatatttatttaaacaaatgtgtaattttgagtacagaattcaacagttacctccaaaaaagaaacattgttaatataatttaacagaagttgtgaaactaaaattttctaagattaactggtagttcattgtaaatgaacataatgaacagaatttatgactccactgtggaaaatgctatcaaataactaaggaatatatatggaataagtgtacatatgtaaaatattgttactagagttagatatgtgccaaagtccatttatcccaaatcctgtctgaaaaggaggggtacattggtaaacattttggagtgcttaaaaatgccaaaaacaaaatggtaatttctactttgataaagtaaaaaagttaaatgtgtgtaaaaaagtgttctgtgtccttctactccagcatcgtctcatgtaaaataagaaagccctaaaatactattggagagaaaaaattaactaggttgctactttatttgcctaaatacttttttctattttgttagattttgcctttcttttggaaggaaggaggcgatattctggattataaaaatgaattgggaacattatcacaattccagactttctattaatatttatgtgttttaataaacgtttgaaattatttatgactacttaaaatgaatctgaccagtgcttcctggtatatgtaatatgtggagttagcccctgaaatttgctttaagtgtttcagtgttgaatctgtttctaaatattcattattacatggtacacaagtgacactccatatattccacacagacttttaccttgctgtattattatgaaaacaatacattaatttgatttttcagtaattagtaattttaggttgaagattatccaaaagaaacaagcttatcacaagggaccatcatcaatatgatccaaatctggttcaaacattcaaaacttcaaagataattcatctttcgctaatgcttgtggttctgttgttcccttgaaaaaaaataaaaacagttgccttctaataaacattgttgagttaaaaattaaaaaaaa

SEQ ID NO: 1586 - DNA, 2857 bp, Homo Sapiens
  NM_001933
ccacttccggttgttgtccggccctatatccggtgtccgcccgccctcggctcctccgccgtgatgctgtcccgatcccgctgtgtgtctcgggcgttcagccgctcgctctccgccttccagaaggggaactgccctctagggagacgttccctgcctggggtctccttatgccagggaccaggttaccctaacagcaggaaggttgtcattaacaacagtgtcttcagtgttcgctttttcagaactacagctgtatgcaaggatgacttggttacagtcaaaaccccagcgtttgcagaatctgtcacagagggagatgtcaggtgggagaaagctgttggagacacagttgcagaagatgaagtggtttgtgagattgaaactgacaagacatctgtgcaggttccatcaccagcaaatggcgtgattgaagctcttttggtacctgatgggggaaaagtcgaaggaggcactccacttttcacactcaggaaaactggtgctgctcctgctaaggccaagccggctgaagctcctgctgctgcagccccaaaagcagaacctacagcagcggcagttcctccccctgcagcacccatacccactcagatgccaccggtgccctcgccctcacagcctccttctggcaaacctgtgtctgcagtaaaacccactgttgccccaccactagctgagccaggagctggcaaaggtctgcgttcagaacatcgggagaaaatgaacaggatgcggcagcgcattgctcagcgtctgaaggaggcccagaatacatgtgcaatgctgacaacttttaatgagattgacatgagtaacatccaggagatgagggctcggcacaaagaggcttttttgaagaaacataacctcaaactaggcttcatgtcggcatttgtgaaggcctcagcctttgccttgcaggaacagcctgttgtaaatgcagtgattgacgacacaaccaaagaggtggtgtatagggattatattgacatcagtgttgcagtggccaccccacggggtctggtggttccagtcatcaggaatgtggaagctatgaattttgcagatattgaacggaccatcactgaactgggagagaaggcccgaaagaatgaacttgccattgaagatatggatggcggtaccttcaccattagcaatggaggcgtttttggctcgctctttggaacacccattatcaacccccctcagtctgccatcctggggatgcatggcatctttgacaggccagtggctataggaggcaaggtagaggtgcggcccatgatgtacgtggcactgacctatgatcaccggctgattgatggcagagaggctgtgactttcctccgcaaaatcaaggcagcggtagaggatcccagagtcctcctcctggatctttaggaggaacccacacaccctacaagttgatcatgcaggaactgaaaaccagtcttctccctgtcccctcatgggtcccgggttagcctggtgacaggcagacacatgctgttggcctcaagcaaggaagcagagcactgtgtaaccagcagtcacaggtcttttcttggcgttcctgccaggctctccctctctgcacctgtctcatagcctcgaatatcttaattccttaggcttaagagagagagccttaatggatgctcattcatattcctgcctttcttccatcagctctctgcaaagatgattttgcttttccctagtgctggtatactatagagaaacccctggggaccatgtgattaagttcctatcttttgaaagtttgttctgcagagacttctaggaggatgctgtgcctcccaagctcagagcagcctctgtcctggctgtgcacattctcccttgattccacttgtgtggagggattgaacacaggcaaagaggtgctgctttgcttcttcaatggcaccttcattctccgttgtcattgacttcaagatgcctcttctacctcttccaggaagcacaggccaggggatctgggtgtgtgagtgggaggagagggcagaggtcccctgaggtcatgcattgtaatcatcatagaaggagagcccaggcctgccctcacgctctccatcataggctgacaccaagaagactcgtcttggcacaatctcacacagctggggctgtagcaaccctttccaacccctttgctggttgctgggcctcattctagcaccttgttcttagagcagattctagcacatcatggcagtgggaccaagcgtggtcccgaggaagggccagagcctggtagagactagggaagggaggtctcctctagactgactcacattgccttgagcttttcagttaagttgctgtaagcacctgggctgaggaggcagtttttgttccttcctgcgttatagcggggccttgtctcttcctctgcaggacacagatctggaggacgtggactggggtaggaaaccaccctgagggtgttagtacctagtggtgaaacggatgaggtcatttctaaggtgtgttgcccgtggatctgggcacaatcattggaattccttggagccactgggattcatggctttgtatccaactgcatccaggcctgaggctgctgacgtttgacaccagggccagtagagagtgcccttttgtatcttaagccaagaagtgaggcctgggggtgggggaggggggaaggggtgggagccaatactgagtgcctgcagcatctactactctgtcttcactattcagaacttgtaactaaagtatttaaagaaactgattttaaatgcaaattaaagggcagatattctcaaacaggaaaaaaaaaaaaaaa

SEQ ID NO: 1587 - DNA, 3913 bp, Homo Sapiens
  NM_001935
ctttcactggcaagagacggagtcctgggtttcagttccagttgcctgcggtgggctgtgtgagtttgccaaagtcccctgccctctctgggtctcggttccctcgcctgtccacgtgaggttggaggagctgaacgccgacgtcatttttagctaagagggagcagggtccccgagtcgccggcccagggtctgcgcatccgaggccgcgcgccctttcccctcccccacggctcctccgggccccgcactctgcgccccggctgccgcccagcgccctacaccgccctcagggggccctcgcgggctccccccggccgggatgccagtgccccgcgccacgcgcgcctgctcccgcgccgcctgccctgcagcctgcccgcggcgcctttatacccagcgggctcggcgctcactaatgtttaactcggggccgaaacttgccagcggcgagtgactccaccgcccggagcagcggtgcaggacgcgcgtctccgccgcccgcggtgacttctgcctgcgctccttctctgaacgctcacttccgaggagacgccgacgatgaagacaccgtggaaggttcttctgggactgctgggtgctgctgcgcttgtcaccatcatcaccgtgcccgtggttctgctgaacaaaggcacagatgatgctacagctgacagtcgcaaaacttacactctaactgattacttaaaaaatacttatagactgaagttatactccttaagatggatttcagatcatgaatatctctacaaacaagaaaataatatcttggtattcaatgctgaatatggaaacagctcagttttcttggagaacagtacatttgatgagtttggacattctatcaatgattattcaatatctcctgatgggcagtttattctcttagaatacaactacgtgaagcaatggaggcattcctacacagcttcatatgacatttatgatttaaataaaaggcagctgattacagaagagaggattccaaacaacacacagtgggtcacatggtcaccagtgggtcataaattggcatatgtttggaacaatgacatttatgttaaaattgaaccaaatttaccaagttacagaatcacatggacggggaaagaagatataatatataatggaataactgactgggtttatgaagaggaagtcttcagtgcctactctgctctgtggtggtctccaaacggcacttttttagcatatgcccaatttaacgacacagaagtcccacttattgaatactccttctactctgatgagtcactgcagtacccaaagactgtacgggttccatatccaaaggcaggagctgtgaatccaactgtaaagttctttgttgtaaatacagactctctcagctcagtcaccaatgcaacttccatacaaatcactgctcctgcttctatgttgataggggatcactacttgtgtgatgtgacatgggcaacacaagaaagaatttctttgcagtggctcaggaggattcagaactattcggtcatggatatttgtgactatgatgaatccagtggaagatggaactgcttagtggcacggcaacacattgaaatgagtactactggctgggttggaagatttaggccttcagaacctcattttacccttgatggtaatagcttctacaagatcatcagcaatgaagaaggttacagacacatttgctatttccaaatagataaaaaagactgcacatttattacaaaaggcacctgggaagtcatcgggatagaagctctaaccagtgattatctatactacattagtaatgaatataaaggaatgccaggaggaaggaatctttataaaatccaacttagtgactatacaaaagtgacatgcctcagttgtgagctgaatccggaaaggtgtcagtactattctgtgtcattcagtaaagaggcgaagtattatcagctgagatgttccggtcctggtctgcccctctatactctacacagcagcgtgaatgataaagggctgagagtcctggaagacaattcagctttggataaaatgctgcagaatgtccagatgccctccaaaaaactggacttcattattttgaatgaaacaaaattttggtatcagatgatcttgcctcctcattttgataaatccaagaaatatcctctactattagatgtgtatgcaggcccatgtagtcaaaaagcagacactgtcttcagactgaactgggccacttaccttgcaagcacagaaaacattatagtagctagctttgatggcagaggaagtggttaccaaggagataagatcatgcatgcaatcaacagaagactgggaacatttgaagttgaagatcaaattgaagcagccagacaattttcaaaaatgggatttgtggacaacaaacgaattgcaatttggggctggtcatatggagggtacgtaacctcaatggtcctgggatcgggaagtggcgtgttcaagtgtggaatagccgtggcgcctgtatcccggtgggagtactatgactcagtgtacacagaacgttacatgggtctcccaactccagaagacaaccttgaccattacagaaattcaacagtcatgagcagagctgaaaattttaaacaagttgagtacctccttattcatggaacagcagatgataacgttcactttcagcagtcagctcagatctccaaagccctggtcgatgttggagtggatttccaggcaatgtggtatactgatgaagaccatggaatagctagcagcacagcacaccaacatatatatacccacatgagccacttcataaaacaatgtttctctttaccttagcacctcaaaataccatgccatttaaagcttattaaaactcatttttgttttcattatctcaaaactgcactgtcaagatgatgatgatctttaaaatacacactcaaatcaagaaacttaaggttacctttgttcccaaatttcatacctatcatcttaagtagggacttctgtcttcacaacagattattaccttacagaagtttgaattatccggtcgggttttattgtttaaaatcatttctgcatcagctgctgaaacaacaaataggaattgtttttatggaggctttgcatagattccctgagcaggattttaatctttttctaactggactggttcaaatgttgttctcttctttaaagggatggcaagatgtgggcagtgatgtcactagggcagggacaggataagagggattagggagagaagatagcagggcatggctgggaacccaagtccaagcataccaacacgagcaggctactgtcagctcccctcggagaagagctgttcacagccagactggcacagttttctgagaaagactattcaaacagtctcaggaaatcaaatatgcaaagcactgacttctaagtaaaaccacagcagttgaaaagactccaaagaaatgtaagggaaactgccagcaacgcaggcccccaggtgccagttatggctataggtgctacaaaaacacagcaagggtgatgggaaagcattgtaaatgtgcttttaaaaaaaaatactgatgttcctagtgaaagaggcagcttgaaactgagatgtgaacacatcagcttgccctgttaaaagatgaaaatatttgtatcacaaatcttaacttgaaggagtccttgcatcaatttttcttatttcatttctttgagtgtcttaattaaaagaatattttaacttccttggactcattttaaaaaatggaacataaaatacaatgttatgtattattattcccattctacatactatggaatttctcccagtcatttaataaatgtgccttcattttttcagaaaaaaaaaaaaaaa

SEQ ID NO: 1588 - DNA, 2842 bp, Homo Sapiens
  NM_001946
gagacgctcgctgtttgtatccattgaggagctgcctcgcgcagggggtgtgcgaggctgagtccaagagatagcaaatcgagtcttaaataatccggggagaaagacgcccgggtagatttgaggtgcagccttggagggagggattagaagccgctagactttttttcctcccctctcagtagcacggagtccgaattaattggatttcattcactggggaggaacaaaaactatctgggcagcttcattgagagagattcattgacactaagagccagcggctgcagctgggtgcagagagaacctccggctttacttctgtctcgtctgccccaaccgctagcctcggcttgggtaaggcgaggcggaattaaaccccgctccgagagcggcagcttcgcgcgcggtgcgctcggcctatgcctgccccgaggggcgtctggtaggcaccccgccctctcccgcagctcgacccccatgatagatacgctcagacccgtgcccttcgcgtcggaaatggcgatcagcaagacggtggcgtggctcaacgagcagctggagctgggcaacgagcggctgctgctgatggactgccggccgcaggagctatacgagtcgtcgcacatcgagtcggccatcaacgtggccatcccgggcatcatgctgcggcgcctgcagaagggtaacctgccggtgcgcgcgctcttcacgcgcggcgaggaccgggaccgcttcacccggcgctgtggcaccgacacagtggtgctctacgacgagagcagcagcgactggaacgagaatacgggcggcgagtcggtgctcgggctgctgctcaagaagctcaaggacgagggctgccgggcgttctacctggaaggtggcttcagtaagttccaagccgagttctccctgcattgcgagaccaatctagacggctcgtgtagcagcagctcgccgccgttgccagtgctggggctcgggggcctgcggatcagctctgactcttcctcggacatcgagtctgaccttgaccgagaccccaatagtgcaacagactcggatggtagtccgctgtccaacagccagccttccttcccagtggagatcttgcccttcctctacttgggctgtgccaaagactccaccaacttggacgtgttggaggaattcggcatcaagtacatcttgaacgtcacccccaatttgccgaatctctttgagaacgcaggagagtttaaatacaagcaaatccccatctcggatcactggagccaaaacctgtcccagtttttccctgaggccatttctttcatagatgaagcccggggcaagaactgtggtgtcttggtacattgcttggctggcattagccgctcagtcactgtgactgtggcttaccttatgcagaagctcaatctgtcgatgaacgatgcctatgacattgtcaaaatgaaaaaatccaacatatcccctaacttcaacttcatgggtcagctgctggacttcgagaggacgctgggactcagcagcccatgtgacaacagggttccagcacagcagctgtattttaccaccccttccaaccagaatgtataccaggtggactctctgcaatctacgtgaaagaccccacacccctccttgctggaatgtgtctggcccttcagcagtttctcttggcagcatcagctgggctgctttctttgtgtgtggccccaggtgtcaaaatgacaccagctgtctgtactagacaaggttaccaagtgcggaattggttaatactaacagagagatttgctccattctctttggaataacaggacatgctgtatagatacaggcagtaggtttgctctgtacccatgtgtacagcctacccatgcagggactgggattcgaggacttccaggcgcatagggtagaaccaaatgatagggtaggagcatgtgttctttagggccttgtaaggctgtttccttttgcatctggaactgactatataattgtcttcaatgaagactaattcaattttgcatatagaggagccaaagagagatttcagctctgtatttgtggtatcagtttggaaaaaaaaatctgatactccatttgattattgtaaatatttgatcttgaatcacttgacagtgtttgtttgaattgtgtttgttttttcctttgatgggcttaaaagaaattatccaaagggagaaagagcagtatgccacttcttaaaacagaacaaaacaaaaaaagaaaattgtgctcttttctaatccaaagggtatatttgcagcatgcttgactttaccaattctgatgacatctttacggacactattatcactaagaccttgttatggcgaagtctttagtctttttcatgtattttcctcatgattttttctctttatgtagtttgactatgccttacctttgtaaatatttttgcttgtgttgtcgcaaaggggataatctgggaaagacaccaaatcatgggctcactttaaaaaaagaaagaataaaaaaaccttcagctgtgctaaacagtatattacctctgtataaaattcttcagggagtgtcacctcaaatgcaatactttgggttggtttctttcctttaaaaaaatttgtataaaactggaagtgtgtgtgtgtgagcatgggtacccatttgataagagaaatgcatttgattgtgaagaagggagagttaaattctccattatgttcgtggtgtaaagtttagagctggaatttattataagaatgtaaaaccttaaattattaataaataactattttggctattgaaaaaaaaaaaaaaaaaaaaaaaa

SEQ ID NO: 1589 - DNA, 1743 bp, Homo Sapiens
  NM_001951
gtgcgcgggggcccgaccaccgcggggccgggacgcgatggcggcggcagagcccgcgagctcgggccagcaggcgccggcagggcaggggcagggccagcggccgccgccgcagcctccgcaggcgcaagccccgcagccgcccccgccgccgcagctcgggggcgccgggggcggcagcagcaggcacgagaagagcctggggctgctcactaccaagttcgtgtcgctgctgcaggaggccaaggacggcgttctggatctcaaagcggctgctgatactttggctgtgaggcaaaaaaggagaatttatgatatcaccaatgtcttagagggaattgacttgattgaaaaaaagtcaaaaaacagtatccagtggaaaggtgtaggtgctggctgtaatactaaagaagtcatagatagattaagatatcttaaagctgaaattgaagatctagaactgaaggaaagagaacttgatcagcagaagttgtggctacagcaaagcatcaaaaatgtgatggacgattccattaataatagattttcctatgtaactcatgaagacatctgtaattgctttaatggtgatacacttttggccattcaggcaccttctggtacacaactggaggtacccattccagaaatgggtcagaatggacaaaagaaataccagatcaatctaaagagtcattcaggacctatccatgtgctgcttataaataaagagtcgagttcatctaagcccgtggtttttcctgttcccccacctgatgacctcacacagccttcctcccagtccttgactccagtgactccacagaaatccagcatggcaactcaaaatctgcctgagcaacatgtctctgaaagaagccaggctctgcagcagacatcagctacagatatatcttcagcaggatctattagtggagatatcattgatgagttaatgtcttctgacgtgtttcctctcttaaggctttctcctaccccggcagatgactacaactttaatttagatgataacgaaggagtttgtgatctgtttgatgtccagatactaaattattagattccatggaaacttgggactgttatctacctctaactgtgtaacattttagacttcttaataacctaaatatttaaaataatgaatgtaacaccttttttagttcactgattctgaagtgttcttccctaatactttctttacttcacaaaacttcaaccataaaaacaaagggctctgattgctttaggggataagtgatttaatatccacaaacgtccccactcccaaaagtaactatattctggatttcaacttttcttctaattgtgaatccttctgttttttcttcttaaggaggaaagttaaaggacactacaggtcatcaaaaacaagttggccaaggactcattacttgtcttatatttttactgccactaaactgcctgtatttctgtatgtccttctatccaaacagacgttcactgccacttgtaaagtgaaggatgtaaacgaggatatataactgtttcagtgaacagattttgtgaagtgccttctgttttagcactttaagtttatcacattttgttgacttctgacattccactttcctaggttataggaaagatctgtttatgtagtttgtttttaaaatgtgccaatgcctgtacattaacaagatttttaaaaataaaattgtataaaacattcaaaaaaaaaaa

SEQ ID NO: 1590 - DNA, 3163 bp, Homo Sapiens
  NM_001961
ctcttccgccgtcgtcgccgccatcctcggcgcgactcgcttctttcggttctacctgggagaatccaccgccatccgccaccatggtgaacttcacggtagaccagatccgcgccatcatggacaagaaggccaacatccgcaacatgtctgtcatcgcccacgtggaccatggcaagtccacgctgacagactccctggtgtgcaaggcgggcatcatcgcctcggcccgggccggggagacacgcttcactgatacccggaaggacgagcaggagcgttgcatcaccatcaagtcaactgccatctccctcttctacgagctctcggagaatgacttgaacttcatcaagcagagcaaggacggtgccggcttcctcatcaacctcattgactcccccgggcatgtcgacttctcctcggaggtgactgctgccctccgagtcaccgatggcgcattggtggtggtggactgcgtgtcaggcgtgtgcgtgcagacggagacagtgctgcggcaggccattgccgagcgcatcaagcctgtgctgatgatgaacaagatggaccgcgccctgctggagctgcagctggagcccgaggagctctaccagactttccagcgcatcgtggagaacgtgaacgtcatcatctccacctacggcgagggcgagagcggccccatgggcaacatcatgatcgatcctgtcctcggtaccgtgggctttgggtctggcctccacgggtgggccttcaccctgaagcagtttgccgagatgtatgtggccaagttcgccgccaagggggagggccagttggggcctgccgagcgggccaagaaagtagaggacatgatgaagaagctgtggggtgacaggtactttgacccagccaacggcaagttcagcaagtcagccaccagccccgaagggaagaagctgccacgcaccttctgccagctgatcctggaccccatcttcaaggtgtttgatgcgatcatgaatttcaagaaagaggagacagcaaaactgatagagaaactggacatcaaactggacagcgaggacaaggacaaagaaggcaaacccctgctgaaggctgtgatgcgccgctggctgcctgccggagacgccttgttgcagatgatcaccatccacctgccctcccctgtgacggcccagaagtaccgctgcgagctcctgtacgaggggcccccggacgacgaggctgccatgggcattaaaagctgtgaccccaaaggccctcttatgatgtatatttccaaaatggtgccaacctccgacaaaggtcggttctacgcctttggacgagtcttctcggggctggtctccactggcctgaaggtcaggatcatggggcccaactatacccctgggaagaaggaggacctctacctgaagccaatccagagaacaatcttgatgatgggccgctacgtggagcccatcgaggatgtgccttgtgggaacattgtgggcctcgtgggcgtggaccagttcctggtgaagacgggcaccatcaccaccttcgagcacgcgcacaacatgcgggtgatgaagttcagcgtcagccctgttgtcagagtggccgtggaggccaagaacccggctgacctgcccaagctggtggaggggctgaagcggctggccaagtccgaccccatggtgcagtgcatcatcgaggagtcgggagagcatatcatcgcgggcgccggcgagctgcacctggagatctgcctgaaggacctggaggaggaccacgcctgcatccccatcaagaaatctgacccggtcgtctcgtaccgcgagacggtcagtgaagagtcgaacgtgctctgcctctccaagtcccccaacaagcacaaccggctgtacatgaaggcgcggcccttccccgacggcctggccgaggacatcgataaaggcgaggtgtccgcccgtcaggagctcaagcagcgggcgcgctacctggccgagaagtacgagtgggacgtggctgaggcccgcaagatctggtgctttgggcccgacggcaccggccccaacatcctcaccgacatcaccaagggtgtgcagtacctcaacgagatcaaggacagtgtggtggccggcttccagtgggccaccaaggagggcgcactgtgtgaggagaacatgcggggtgtgcgcttcgacgtccacgacgtcaccctgcacgccgacgccatccaccgcggagggggccagatcatccccacagcacggcgctgcctctatgccagtgtgctgaccgcccagccacgcctcatggagcccatctaccttgtggagatccagtgtccagagcaggtggtcggtggcatctacggggttttgaacaggaagcggggccacgtgttcgaggagtcccaggtggccggcacccccatgtttgtggtcaaggcctatctgcccgtcaacgagtcctttggcttcaccgctgacctgaggtccaacacgggcggccaggcgttcccccagtgtgtgtttgaccactggcagatcctgcccggagaccccttcgacaacagcagccgccccagccaggtggtggcggagacccgcaagcgcaagggcctgaaagaaggcatccctgccctggacaacttcctggacaaattgtaggcggcccttcctgcagcgcctgccgccccggggactcgcagcacccacagcaccacgtcctcgaattctcagacgacacctggagactgtcccgacacagcgacgctcccctgagaggtttctggggcccgctgcgtgccatcactcaaccataacacttgatgccgtttctttcaatatttatttccagagtccggaggcagcagacacgccctcttagtagggacttaatgggccggtcggggagggggaggcgggatgggacacccaacactttttccatttcttcagagggaaactcagatgtccaaactaattttaacaaacgcattaagaggtttatttgggtacatggcccgcagtggcttttgccccagaaaggggaaaggaacacgcgggtagatgatttctagcaggcaggaagtcctgtgcggtgtcaccatgagcacctccagctgtactagtgccattggaataataaatttgataaggtggtgaaaaaa

SEQ ID NO: 1591 - DNA, 5600 bp, Homo Sapiens
  NM_001963
aaaaagagaaactgttgggagaggaatcgtatctccatatttcttctttcagccccaatccaagggttgtagctggaactttccatcagttcttcctttctttttcctctctaagcctttgccttgctctgtcacagtgaagtcagccagagcagggctgttaaactctgtgaaatttgtcataagggtgtcaggtatttcttactggcttccaaagaaacatagataaagaaatctttcctgtggcttcccttggcaggctgcattcagaaggtctctcagttgaagaaagagcttggaggacaacagcacaacaggagagtaaaagatgccccagggctgaggcctccgctcaggcagccgcatctggggtcaatcatactcaccttgcccgggccatgctccagcaaaatcaagctgttttcttttgaaagttcaaactcatcaagattatgctgctcactcttatcattctgttgccagtagtttcaaaatttagttttgttagtctctcagcaccgcagcactggagctgtcctgaaggtactctcgcaggaaatgggaattctacttgtgtgggtcctgcacccttcttaattttctcccatggaaatagtatctttaggattgacacagaaggaaccaattatgagcaattggtggtggatgctggtgtctcagtgatcatggattttcattataatgagaaaagaatctattgggtggatttagaaagacaacttttgcaaagagtttttctgaatgggtcaaggcaagagagagtatgtaatatagagaaaaatgtttctggaatggcaataaattggataaatgaagaagttatttggtcaaatcaacaggaaggaatcattacagtaacagatatgaaaggaaataattcccacattcttttaagtgctttaaaatatcctgcaaatgtagcagttgatccagtagaaaggtttatattttggtcttcagaggtggctggaagcctttatagagcagatctcgatggtgtgggagtgaaggctctgttggagacatcagagaaaataacagctgtgtcattggatgtgcttgataagcggctgttttggattcagtacaacagagaaggaagcaattctcttatttgctcctgtgattatgatggaggttctgtccacattagtaaacatccaacacagcataatttgtttgcaatgtccctttttggtgaccgtatcttctattcaacatggaaaatgaagacaatttggatagccaacaaacacactggaaaggacatggttagaattaacctccattcatcatttgtaccacttggtgaactgaaagtagtgcatccacttgcacaacccaaggcagaagatgacacttgggagcctgagcagaaactttgcaaattgaggaaaggaaactgcagcagcactgtgtgtgggcaagacctccagtcacacttgtgcatgtgtgcagagggatacgccctaagtcgagaccggaagtactgtgaagatgttaatgaatgtgctttttggaatcatggctgtactcttgggtgtaaaaacacccctggatcctattactgcacgtgccctgtaggatttgttctgcttcctgatgggaaacgatgtcatcaacttgtttcctgtccacgcaatgtgtctgaatgcagccatgactgtgttctgacatcagaaggtcccttatgtttctgtcctgaaggctcagtgcttgagagagatgggaaaacatgtagcggttgttcctcacccgataatggtggatgtagccagctctgcgttcctcttagcccagtatcctgggaatgtgattgctttcctgggtatgacctacaactggatgaaaaaagctgtgcagcttcaggaccacaaccatttttgctgtttgccaattctcaagatattcgacacatgcattttgatggaacagactatggaactctgctcagccagcagatgggaatggtttatgccctagatcatgaccctgtggaaaataagatatactttgcccatacagccctgaagtggatagagagagctaatatggatggttcccagcgagaaaggcttattgaggaaggagtagatgtgccagaaggtcttgctgtggactggattggccgtagattctattggacagacagagggaaatctctgattggaaggagtgatttaaatgggaaacgttccaaaataatcactaaggagaacatctctcaaccacgaggaattgctgttcatccaatggccaagagattattctggactgatacagggattaatccacgaattgaaagttcttccctccaaggccttggccgtctggttatagccagctctgatctaatctggcccagtggaataacgattgacttcttaactgacaagttgtactggtgcgatgccaagcagtctgtgattgaaatggccaatctggatggttcaaaacgccgaagacttacccagaatgatgtaggtcacccatttgctgtagcagtgtttgaggattatgtgtggttctcagattgggctatgccatcagtaatgagagtaaacaagaggactggcaaagatagagtacgtctccaaggcagcatgctgaagccctcatcactggttgtggttcatccattggcaaaaccaggagcagatccctgcttatatcaaaacggaggctgtgaacatatttgcaaaaagaggcttggaactgcttggtgttcgtgtcgtgaaggttttatgaaagcctcagatgggaaaacgtgtctggctctggatggtcatcagctgttggcaggtggtgaagttgatctaaagaaccaagtaacaccattggacatcttgtccaagactagagtgtcagaagataacattacagaatctcaacacatgctagtggctgaaatcatggtgtcagatcaagatgactgtgctcctgtgggatgcagcatgtatgctcggtgtatttcagagggagaggatgccacatgtcagtgtttgaaaggatttgctggggatggaaaactatgttctgatatagatgaatgtgagatgggtgtcccagtgtgcccccctgcctcctccaagtgcatcaacaccgaaggtggttatgtctgccggtgctcagaaggctaccaaggagatgggattcactgtcttgatattgatgagtgccaactgggggagcacagctgtggagagaatgccagctgcacaaatacagagggaggctatacctgcatgtgtgctggacgcctgtctgaaccaggactgatttgccctgactctactccaccccctcacctcagggaagatgaccaccactattccgtaagaaatagtgactctgaatgtcccctgtcccacgatgggtactgcctccatgatggtgtgtgcatgtatattgaagcattggacaagtatgcatgcaactgtgttgttggctacatcggggagcgatgtcagtaccgagacctgaagtggtgggaactgcgccacgctggccacgggcagcagcagaaggtcatcgtggtggctgtctgcgtggtggtgcttgtcatgctgctcctcctgagcctgtggggggcccactactacaggactcagaagctgctatcgaaaaacccaaagaatccttatgaggagtcgagcagagatgtgaggagtcgcaggcctgctgacactgaggatgggatgtcctcttgccctcaaccttggtttgtggttataaaagaacaccaagacctcaagaatgggggtcaaccagtggctggtgaggatggccaggcagcagatgggtcaatgcaaccaacttcatggaggcaggagccccagttatgtggaatgggcacagagcaaggctgctggattccagtatccagtgataagggctcctgtccccaggtaatggagcgaagctttcatatgccctcctatgggacacagacccttgaagggggtgtcgagaagccccattctctcctatcagctaacccattatggcaacaaagggccctggacccaccacaccaaatggagctgactcagtgaaaactggaattaaaaggaaagtcaagaagaatgaactatgtcgatgcacagtatcttttctttcaaaagtagagcaaaactataggttttggttccacaatctctacgactaatcacctactcaatgcctggagacagatacgtagttgtgcttttgtttgctcttttaagcagtctcactgcagtcttatttccaagtaagagtactgggagaatcactaggtaacttattagaaacccaaattgggacaacagtgctttgtaaattgtgttgtcttcagcagtcaatacaaatagatttttgtttttgttgttcctgcagccccagaagaaattaggggttaaagcagacagtcacactggtttggtcagttacaaagtaatttctttgatctggacagaacatttatatcagtttcatgaaatgattggaatattacaataccgttaagatacagtgtaggcatttaactcctcattggcgtggtccatgctgatgattttgcaaaatgagttgtgatgaatcaatgaaaaatgtaatttagaaactgatttcttcagaattagatggcttattttttaaaatatttgaatgaaaacattttatttttaaaatattacacaggaggcttcggagtttcttagtcattactgtccttttcccctacagaattttccctcttggtgtgattgcacagaatttgtatgtattttcagttacaagattgtaagtaaattgcctgatttgttttcattatagacaacgatgaatttcttctaattatttaaataaaatcaccaaaaacataaacattttattgtatgcctgattaagtagttaattatagtctaaggcagtactagagttgaaccaaaatgatttgtcaagcttgctgatgtttctgtttttcgttttttttttttttccggagagaggataggatctcactctgttatccaggctggagtgtgcaatggcacaatcatagctcagtgcagcctcaaactcctgggctcaagcaatcctcctgcctcagcctcccgagtaactaggaccacaggcacaggccaccatgcctggctaaggtttttatttttattttttgtagacatggggatcacacaatgttgcccaggctggtcttgaactcctggcctcaagcaaggtcgtgctggtaattttgcaaaatgaattgtgattgactttcagcctcccaacgtattagattataggcattagccatggtgcccagccttgtaacttttaaaaaaattttttaatctacaactctgtagattaaaatttcacatggtgttctaattaaatatttttcttgcagccaagatattgttactacagataacacaacctgatatggtaactttaaattttgggggctttgaatcattcagtttatgcattaactagtccctttgtttatctttcatttctcaaccccttgtactttggtgataccagacatcagaataaaaagaaattgaagtaaaaaaaaaaaaaaaaaa

SEQ ID NO: 1592 - DNA, 1905 bp, Homo Sapiens
  NM_001967
gctgtcttttcagtcgggcgctgagtggtttttcggatcatgtctggtggctccgcggattataacagagaacatggcggcccagagggaatggaccccgatggtgtcatcgagagcaactggaatgagattgttgataactttgatgatatgaatttaaaggagtctctccttcgtggcatctatgcttacggttttgagaagccttccgctattcagcagagagctattattccctgtattaaagggtatgatgtgattgctcaagctcagtcaggtactggcaagacagccacatttgctatttccatcctgcaacagttggagattgagttcaaggagacccaagcactagtattggcccccaccagagaactggctcaacagatccaaaaggtaattctggcacttggagactatatgggagccacttgtcatgcctgcattggtggaacaaatgttcgaaatgaaatgcaaaaactgcaggctgaagcaccacatattgttgttggtacacccgggagagtgtttgatatgttaaacagaagatacctttctccaaaatggatcaaaatgtttgttttggatgaagcagatgaaatgttgagccgtggttttaaggatcaaatctatgagattttccaaaaactaaacacaagtattcaggttgtgttgctttctgccacaatgccaactgatgtgttggaagtgaccaaaaaattcatgagagatccaattcgaattctggtgaaaaaggaagaattgacccttgaaggaatcaaacagttttatattaatgttgagagagaggaatggaagttggatacactttgtgacttgtacgagacactgaccattacacaggctgttatttttctcaatacgaggcgcaaggtggactggctgactgagaagatgcatgccagagacttcacagtttctgctctgcatggtgacatggaccagaaggagagagatgttatcatgagggaattccggtcagggtcaagtcgtgttctgatcactactgacttgttggctcgcgggattgatgtgcaacaagtgtctttggttataaattatgatctacctaccaatcgtgaaaactatattcacagaattggcagagggggtcgatttgggaggaaaggtgtggctataaactttgttactgaagaagacaagaggattcttcgtgacattgagactttctacaatactacagtggaggagatgcccatgaatgtggctgaccttatttaattcctgggatgagagttttggatgcagtgctcgctgttgctgaataggcgatcacaacgtgcattgtgcttctttctttgggaatatttgaatcttgtctcaatgctcataacggatcagaaatacagattttgatagcaaagcgacgttagtcgtgagctcttgtgaggaaagtcattggctttatcctctttagagttagactgttggggtgggtataaaagatggggtctgtaaaatctttctttcttagaaatttatttcctagttctgtagaaatggttgtattagatgttctctatcatttaataatatacttgtggactaaaagatataagtgctgtataaaatcagccaattatgttaaactagcatatctgcctttattgtgtttgtcattagcctgagtagaaaggcctttaaaatttttttagaaagcatttgaatgcattttgtttggtattgtatttattcaataaagtatttaattagtgctaagtgtgaactggaccctgttgctaagccccagcaagcaatcctaggtagggtttaatccccagtaaaattgccatattgcacatgtcttaatgaagtttgaatgttaaataaattgtatattcactttaaaaaaaaaaaaaaaaa

SEQ ID NO: 1593 - DNA, 938 bp, Homo Sapiens
  NM_001972
gcacggaggggcagagaccccggagccccagccccaccatgaccctcggccgccgactcgcgtgtcttttcctcgcctgtgtcctgccggccttgctgctggggggcaccgcgctggcctcggagattgtggggggccggcgagcgcggccccacgcgtggcccttcatggtgtccctgcagctgcgcggaggccacttctgcggcgccaccctgattgcgcccaacttcgtcatgtcggccgcgcactgcgtggcgaatgtaaacgtccgcgcggtgcgggtggtcctgggagcccataacctctcgcggcgggagcccacccggcaggtgttcgccgtgcagcgcatcttcgaaaacggctacgaccccgtaaacttgctcaacgacatcgtgattctccagctcaacgggtcggccaccatcaacgccaacgtgcaggtggcccagctgccggctcagggacgccgcctgggcaacggggtgcagtgcctggccatgggctggggccttctgggcaggaaccgtgggatcgccagcgtcctgcaggagctcaacgtgacggtggtgacgtccctctgccgtcgcagcaacgtctgcactctcgtgaggggccggcaggccggcgtctgtttcggggactccggcagccccttggtctgcaacgggctaatccacggaattgcctccttcgtccggggaggctgcgcctcagggctctaccccgatgcctttgccccggtggcacagtttgtaaactggatcgactctatcatccaacgctccgaggacaacccctgtccccacccccgggacccggacccggccagcaggacccactgagaagggctgcccgggtcacctcagctgcccacacccacactctccagcatctggcacaataaacattctctgttttgtagaaaaaaaaaaaaaaaa

SEQ ID NO: 1594 - DNA, 3150 bp, Homo Sapiens
  NM_001974
aaaagtttcttttctttgaatgacagaactacagcataatgcgtggcttcaacctgctcctcttctggggatgttgtgttatgcacagctgggaagggcacataagacccacacggaaaccaaacacaaagggtaataactgtagagacagtaccttgtgcccagcttatgccacctgcaccaatacagtggacagttactattgcgcttgcaaacaaggcttcctgtccagcaatgggcaaaatcacttcaaggatccaggagtgcgatgcaaagatattgatgaatgttctcaaagcccccagccctgtggtcctaactcatcctgcaaaaacctgtcagggaggtacaagtgcagctgtttagatggtttctcttctcccactggaaatgactgggtcccaggaaagccgggcaatttctcctgtactgatatcaatgagtgcctcaccagcagcgtctgccctgagcattctgactgtgtcaactccatgggaagctacagttgcagctgtcaagttggattcatctctagaaactccacctgtgaagacgtggatgaatgtgcagatccaagagcttgcccagagcatgcaacttgtaataacactgttggaaactactcttgtttctgcaacccaggatttgaatccagcagtggccacttgagtttccagggtctcaaagcatcgtgtgaagatattgatgaatgcactgaaatgtgccccatcaattcaacatgcaccaacactcctgggagctacttttgcacctgccaccctggctttgcaccaagcaatggacagttgaatttcacagaccaaggagtggaatgtagagatattgatgagtgccgccaagatccatcaacctgtggtcctaattctatctgcaccaatgccctgggctcctacagctgtggctgcattgcaggctttcatcccaatccagaaggctcccagaaagatggcaacttcagctgccaaagggttctcttcaaatgtaaggaagatgtgatacccgataataagcagatccagcaatgccaagagggaaccgcagtgaaacctgcatatgtctccttttgtgcacaaataaataacatcttcagcgttctggacaaagtgtgtgaaaataaaacgaccgtagtttctctgaagaatacaactgagagctttgtccctgtgcttaaacaaatatccacgtggactaaattcaccaaggaagagacgtcctccctggccacagtcttcctggagagtgtggaaagcatgacactggcatctttttggaaaccctcagcaaatatcactccggctgttcggacggaatacttagacattgagagcaaagttatcaacaaagaatgcagtgaagagaatgtgacgttggacttggtagccaagggggataagatgaagatcgggtgttccacaattgaggaatctgaatccacagagaccactggtgtggcttttgtctcctttgtgggcatggaatcggttttaaatgagcgcttcttcaaagaccaccaggctcccttgaccacctctgagatcaagctgaagatgaattctcgagtcgttgggggcataatgactggagagaagaaagacggcttctcagatccaatcatctacactctggagaacattcagccaaagcagaagtttgagaggcccatctgtgtttcctggagcactgatgtgaagggtggaagatggacatcctttggctgtgtgatcctggaagcttctgagacatataccatctgcagctgtaatcagatggcaaatcttgccgttatcatggcgtctggggagctcacgatggacttttccttgtacatcattagccatgtaggcattatcatctccttggtgtgcctcgtcttggccatcgccacctttctgctgtgtcgctccatccgaaatcacaacacctacctccacctgcacctctgcgtgtgtctcctcttggcgaagactctcttcctcgccggtatacacaagactgacaacaagatgggctgcgccatcatcgcgggcttcctgcactaccttttccttgcctgcttcttctggatgctggtggaggctgtgatactgttcttgatggtcagaaacctgaaggtggtgaattacttcagctctcgcaacatcaagatgctgcacatctgtgcctttggttatgggctgccgatgctggtggtggtgatctctgccagtgtgcagccacagggctatggaatgcataatcgctgctggctgaatacagagacagggttcatctggagtttcttggggccagtttgcacagttatagtgatcaactcccttctcctgacctggaccttgtggatcctgaggcagaggctttccagtgttaatgccgaagtctcaacgctaaaagacaccaggttactgaccttcaaggcctttgcccagctcttcatcctgggctgctcctgggtgctgggcatttttcagattggacctgtggcaggtgtcatggcttacctgttcaccatcatcaacagcctgcagggggccttcatcttcctcatccactgtctgctcaacggccaggtacgagaagaatacaagaggtggatcactgggaagacgaagcccagctcccagtcccagacctcaaggatcttgctgtcctccatgccatccgcttccaagacgggttaaagtcctttcttgctttcaaatatgctatggagccacagttgaggacagtagtttcctgcaggagcctaccctgaaatctcttctcagcttaacatggaaatgaggatcccaccagccccagaaccctctggggaagaatgttgggggcggtcttcctgtggttgtatgcactgatgagaaatcaggcgtttctgctccaaacgaccattttatcttcgtgctctgcaacttcttcaattccagagtttctgagaacagacccaaattcaatggcatgaccaagaacacctggctaccattttgttttctcctgcccttgttggtgcatggttctaagcatgcccctccagagcctatcatacgcctgatacagagaacctctcaataaatgatttgtcgcctgtctgactgatttaccctaggaaaaaaaaaaaaaaaaaaaaaaaaaaaa

SEQ ID NO: 1595 - DNA, 2423 bp, Homo Sapiens
  NM_001975
acccgcgctcgtacgtgcgcctccgccggcagctcctgactcatcgggggctccgggtcacatgcgcccgcgcggccctataggcgcctcctccgcccgccgcccgggagccgcagccgccgccgccactgccactcccgctctctcagcgccgccgtcgccaccgccaccgccaccgccactaccaccgtctgagtctgcagtcccgagatcccagccatcatgtccatagagaagatctgggcccgggagatcctggactcccgcgggaaccccacagtggaggtggatctctatactgccaaaggtcttttccgggctgcagtgcccagtggagcctctacgggcatctatgaggccctggagctgagggatggagacaaacagcgttacttaggcaaaggtgtcctgaaggcagtggaccacatcaactccaccatcgcgccagccctcatcagctcaggtctctctgtggtggagcaagagaaactggacaacctgatgctggagttggatgggactgagaacaaatccaagtttggggccaatgccatcctgggtgtgtctctggccgtgtgtaaggcaggggcagctgagcgggaactgcccctgtatcgccacattgctcagctggccgggaactcagacctcatcctgcctgtgccggccttcaacgtgatcaatggtggctctcatgctggcaacaagctggccatgcaggagttcatgatcctcccagtgggagctgagagctttcgggatgccatgcgactaggtgcagaggtctaccatacactcaagggagtcatcaaggacaaatacggcaaggatgccaccaatgtgggggatgaaggtggctttgcccccaatatcctggagaacagtgaagccttggagctggtgaaggaagccatcgacaaggctggctacacggaaaagatcgttattggcatggatgttgctgcctcagagttttatcgtgatggcaaatatgacttggacttcaagtctcccactgatccttcccgatacatcactggggaccagctgggggcactctaccaggactttgtcagggactatcctgtggtctccattgaggacccatttgaccaggatgattgggctgcctggtccaagttcacagccaatgtagggatccagattgtgggtgatgacctgacagtgaccaacccaaaacgtattgagcgggcagtggaagaaaaggcctgcaactgtctgctgctcaaggtcaaccagatcggctcggtcactgaagccatccaagcgtgcaagctggcccaggagaatggctggggggtcatggtgagtcatcgctcaggagagactgaggacacattcattgctgacctggtggtggggctgtgcacaggccagatcaagactggtgccccgtgccgttctgaacgtctggctaaatacaaccagctcatgagaattgaggaagagctgggggatgaagctcgctttgccggacataacttccgtaatcccagtgtgctgtgattcctctgcttgcctggagacgtggaacctctgtctcatcctcctggaaccttgctgtcctgatctgtgatagttcaccccctgagatcccctgagccccagggtgcccagaacttccctgattgacctgctccgctgctccttggcttacctgacctcttgctgtctctgctcgccctcctttctgtgccctactcattggggttccgcactttccacttcttcctttctctttctctcttccctcagaaactagaaatgtgaatgaggattattataaaagggggtccgtggaagaatgatcagcatctgtgatgggagcgtcagggttggtgtgctgaggtgttagagagggaccatgtgtcacttgtgctttgctcttgtcccacgtgtcttccactttgcatatgagccgtgaactgtgcatagtgctgggatggaggggagtgttgggcatgtgatcacgcctggctaataaggctttagtgtatttatttatttatttattttatttgtttttcattcatcccattaatcatttccccataactcaatggcctaaaactggcctgacttgggggaacgatgtgtctgtatttcatgtggctgtagatcccaagatgactggggtgggaggtcttgctagaatgggaagggtcatagaaagggccttgacatcagttcctttgtgtgtactcactgaagcctgcgttggtccagagcggaggctgtgtgcctgggggagttttcctctatacatctctccccaaccctaggttccctgttcttcctccagctgcaccagagcaacctctcactccccatgccacgttccacagttgccaccacctctgtggcattgaaatgagcacctccattaaagtctgaatcagtgc

SEQ ID NO: 1596 - DNA, 1536 bp, Homo Sapiens
  NM_001976
ataaatgcgcagcctgagagggggtgagctgacactgtcccagctgccacctagactcggagctccatccaaacctccagcgaagacatcccaggtcgggtgaatcttccagccctgggggtggaggtagtaaaggccatggccatgcagaaaatctttgcccgggaaatcttggactccaggggcaaccccacggtggaggtggacctgcacacggccaagggccgattccgagcagctgtgcccagtggggcttccacgggtatctatgaggctctggaactaagagacggagacaaaggccgctacctggggaaaggagtcctgaaggctgtggagaacatcaacaatactctgggccctgctctgctgcaaaagaaactaagcgttgtggatcaagaaaaagttgacaaatttatgattgagctagatgggaccgagaataagtccaagtttggggccaatgccatcctgggcgtgtccttggccgtgtgtaaggcgggagcagctgagaagggggtccccctgtaccgccacatcgcagatctcgctgggaaccctgacctcatactcccagtgccagccttcaatgtgatcaacgggggctcccatgctggaaacaagctggccatgcaggagttcatgattctgcctgtgggagccagctccttcaaggaagccatgcgcattggcgccgaggtctaccaccacctcaagggggtcatcaaggccaagtatgggaaggatgccaccaatgtgggtgatgaaggtggcttcgcacccaacatcctggagaacaatgaggccctggagctgctgaagacggccatccaggcggctggttacccagacaaggtggtgatcggcatggatgtggcagcatctgagttctatcgcaatgggaagtacgatcttgacttcaagtcgcctgatgatcccgcacggcacatcactggggagaagctcggagagctgtataagagctttatcaagaactatcctgtggtctccatcgaagacccctttgaccaggatgactgggccacttggacctccttcctctcgggggtgaacatccagattgtgggggatgacttgacagtcaccaaccccaagaggattgcccaggccgttgagaagaaggcctgcaactgtctgctgctgaaggtcaaccagatcggctcggtgaccgaatcgatccaggcgtgcaaactggctcagtctaatggctggggggtgatggtgagccaccgctctggggagactgaggacacattcattgctgaccttgtggtggggctctgcacaggacagatcaagactggcgccccctgccgctcggagcgtctggccaaatacaaccaactcatgaggatcgaggaggctcttggggacaaggcaatctttgctggacgcaagttccgtaacccgaaggccaagtgagaagctggaggctccaggactccactggacagacccaggtcttccagacctgcttcctgaaataaacactggtgccaaccaagaaaaaaaaaa

SEQ ID NO: 1597 - DNA, 2196 bp, Homo Sapiens
  NM_001979
ctgggcgggtcatgcgccctggccttcgcgcatctcccaggttagctgcgtgtccgggtgctaggctgcagacccgccgccatgacgctgcgcgcggccgtcttcgaccttgacggggtgctggcgctgccagcggtgttcggcgtcctcggccgcacggaggaggccctggcgctgcccagaggacttctgaatgatgctttccagaaagggggaccagagggtgccactacccggcttatgaaaggagagatcacactttcccagtggataccactcatggaagaaaactgcaggaagtgctccgagaccgctaaagtctgcctccccaagaatttctccataaaagaaatctttgacaaggcgatttcagccagaaagatcaaccgccccatgctccaggcagctctcatgctcaggaagaaaggattcactactgccatcctcaccaacacctggctggacgaccgtgctgagagagatggcctggcccagctgatgtgtgagctgaagatgcactttgacttcctgatagagtcgtgtcaggtgggaatggtcaaacctgaacctcagatctacaagtttctgctggacaccctgaaggccagccccagtgaggtcgtttttttggatgacatcggggctaatctgaagccagcccgtgacttgggaatggtcaccatcctggtccaggacactgacacggccctgaaagaactggagaaagtgaccggaatccagcttctcaataccccggcccctctgccgacctcttgcaatccaagtgacatgagccatgggtacgtgacagtaaagcccagggtccgtctgcattttgtggagctgggctccggccctgctgtgtgcctctgccatggatttcccgagagttggtattcttggaggtaccagatccctgctctggcccaggcaggttaccgggtcctagctatggacatgaaaggctatggagagtcatctgctcctcccgaaatagaagaatattgcatggaagtgttatgtaaggagatggtaaccttcctggataaactgggcctctctcaagcagtgttcattggccatgactggggtggcatgctggtgtggtacatggctctcttctaccccgagagagtgagggcggtggccagtttgaatactcccttcataccagcaaatcccaacatgtcccctttggagagtatcaaagccaacccagtatttgattaccagctctacttccaagaaccaggagtggctgaggctgaactggaacagaacctgagtcggactttcaaaagcctcttcagagcaagcgatgagagtgttttatccatgcataaagtctgtgaagcgggaggactttttgtaaatagcccagaagagcccagcctcagcaggatggtcactgaggaggaaatccagttctatgtgcagcagttcaagaagtctggtttcagaggtcctctaaactggtaccgaaacatggaaaggaactggaagtgggcttgcaaaagcttgggacggaagatcctgattccggccctgatggtcacggcggagaaggacttcgtgctcgttcctcagatgtcccagcacatggaggactggattccccacctgaaaaggggacacattgaggactgtgggcactggacacagatggacaagccaaccgaggtgaatcagatcctcattaagtggctggattctgatgcccggaacccaccggtggtctcaaagatgtagaacgcagcgtgtgcccacgctcagcaggtgtgccatccttccacctgctggggcaccattcttagtatacagaggtggccttacacacatcttgcatggatggcagcattgttctgaaggggtttgcagaaaaaaaagattttctttacataaagtgaatcaaatttgacattattttagatcccagagaaatcaggtgtgattagttctccaggcatgaatgcatcgtccctttatctgtaagaacccttagtgtcctgtagggggacagaatggggtggccaggtggtgatttctctttgaccaatgcatagtttggcagaaaaatcagccgttcatttagaagaatcttagcagagattgggatgccttactcaataaagctaagatgactatgctgctggctgtctttgttcttggagaggtggagtgactgttcacggagaa

SEQ ID NO: 1598 - DNA, 3400 bp, Homo Sapiens
  NM_001983
ccggaagtgctgcgagccctgggccacgctggccgtgctggcagtgggccgcctcgatccctctgcagtctttcccttgaggctccaagaccagcaggtgaggcctcgcggcgctgaaaccgtgaggcccggaccacaggctccagatggaccctgggaaggacaaagagggggtgccccagccctcagggccgccagcaaggaagaaatttgtgatacccctcgacgaggatgaggtccctcctggagtggccaagcccttattccgatctacacagagccttcccactgtggacacctcggcccaggcggcccctcagacctacgccgaatatgccatctcacagcctctggaaggggctggggccacgtgccccacagggtcagagcccctggcaggagagacgcccaaccaggccctgaaacccggggcaaaatccaacagcatcattgtgagccctcggcagaggggcaatcccgtactgaagttcgtgcgcaatgtgccctgggaatttggcgacgtaattcccgactatgtgctgggccagagcacctgtgccctgttcctcagcctccgctaccacaacctgcacccagactacatccatgggcggctgcagagcctggggaagaacttcgccttgcgggtcctgcttgtccaggtggatgtgaaagatccccagcaggccctcaaggagctggctaagatgtgtatcctggccgactgcacattgatcctcgcctggagccccgaggaagctgggcggtacctggagacctacaaggcctatgagcagaaaccagcggacctcctgatggagaagctagagcaggacttcgtctcccgggtgactgaatgtctgaccaccgtgaagtcagtcaacaaaacggacagtcagaccctcctgaccacatttggatctctggaacagctcatcgccgcatcaagagaagatctggccttatgcccaggcctgggccctcagaaagcccggaggctgtttgatgtcctgcacgagcccttcttgaaagtaccctgatgaccccagctgccaaggaaacccccagtgtaataataaatcgtcctcccaggccaggctcctgctggctgcgctggtgcagtctctggggagggattctgggggtgtcaccttctggtggcccaggtgggcaccttcagctttctttagttcctcagtttcccgggggcagactacacaggctgctgctgctgctgcttccgcttcttgtcccggcctgtgggagcctcctccccagactctgaattcagtggcggccctggcatctcctcttggggcactgtctctggcatccggctttcctgactctgcttcttcctcttcttggtggatcccggagttgccctggcttcaggctgtccctcccctggcagttcaggctctagtggctgaattggctcagtcactgtgtgacctctctctttcttcttcttcttcttcttggtggatgtgggagctgcctgaggctcaaggtcatccggcagctcaggccccaccacctctgtctctggctccactgtggcatcttgctgtttttctttcttcgtcttctttttgggagctgccagagctgcctgggcctgaggcttcgctccttctggctgttgaggcgccatggtcccccctggggactccagaggcttcatctccggctccactggctccatcgcctccgtccctggctccatcattgccatctgtcccttttcttttttcctcttcttcgtagggggcagagggatggcttcctccagtggctccaccttcacctgtggctgagactcaactgtcaccccctcctctggctccatcccttccgtccccttttgcctctttctctttttggtcggggacaggactgtgtcttctagaggctcagtgttaatctgttcctgcttcactgtcttgtcttctggctcgaaggtttctttccctttgggcttcttcctcttcttggtggtggacgggaacagcactcccagaggctccagtgtctccactgtgggctctgtccccacaggccctgctgcctctggttctttcagctgctgattttttttcttcttcttcttccgcacatccatttctggcgaccccaaagccatgtccacctccagggccccgtgcccattcactgcctcctgagtgactggggcctctgtcacctgcatctcctttttcttcttccctgaggtgagcaggttgggggccaaggctgacctaggccctgtgactggtgggttgcccccaaaggcacagaaccgaggcctcaggccaggagggatctgtggtgggggacttgctgggatgggctgcagagggctccctgacagggattgctggggaccctcaaggatccttagggtgccctggggggctgaggcacaggtgagtccacctcctgcctccgttgagggggccagcagggtcgcttctccagcttggggacagctgctgaggactcgatagcggtgccgcttgcctgccaatttgcccttgacgatctgggagccagagagaggcacatgccgcccattgaagctacagagagaaacagggagggcagaggcttaagtggaacaggagagggaaggttttttgattttttttttgtttttttttgagagagtcttgctctgttgcctaggctggagtgcagtggcatgatctcggctcactgcaatgtccacctcctgggttcaagcgattctcctgcctcagcctctcaagtagctgggattacaggcacctgccaccacgcccagccaatttttgtatttttagtagagacaatttcactatgttggccaggctggtcttgaactcctgacctcaagtgatctgctcgcctcggcctcccaaaggatgggattacaggcaccagccactgcgcctggctggcctctggtttttaataaaacatgactagagtgactccatcttaaagtgagtagctaggcacttacaaggttcatgcttatggcctgaaaataaccacatcccaggctgaccaccaattataattacagaatatttatggccatacagaacatgttccaccaagcctgcagaatgtccaaatgtcctaagaatgcagcccccattacttaaatataacataaatgagcaagcttaggttgcaggattaatggtcgtggataacaccaatagcccctacctttagtgagcttatctgcacactccaagtttaactatagttccttatagtttcttataagtagaaatactaacaaagggctgtgggtttctccccctgctttctgaggacactctactctgtaaaggagtagtttccaataaacttgtttctttcactgtgcaaaaaaaaaaaaaaaaaa

SEQ ID NO: 1599 - DNA, 1208 bp, Homo Sapiens
  NM_001984
aaagcgagagtgagtgggaccggaggggcggggcatcatatgggcggggctgaggcgaggccccggcggccatcttgagccccgccttttacttcggcccgcttcttctggtcactccgccaccgtagaatcgcctaccatttggtgcaagcaaaaagcaatcagcaattggacaggaaaagaatggcattgaagcagatttccagcaacaagtgctttgggggattgcagaaagtttttgaacatgacagtgttgaactaaactgcaaaatgaaatttgctgtctacttaccaccaaaggcagaaacaggaaagtgccctgcactgtattggctctcaggtttaacttgcacagagcaaaattttatatcaaaatctggttatcatcagtctgcttcagaacatggtcttgttgtcattgctccagataccagccctcgtggctgcaatattaaaggtgaagatgagagctgggactttggcactggtgctggattttatgttgatgccactgaagatccttggaaaaccaactacagaatgtactcttatgtcacagaggagcttccccaactcataaatgccaattttccagtggatccccaaaggatgtctatttttggccactccatgggaggtcatggagctctgatctgtgctttgaaaaatcctggaaaatacaaatctgtgtcagcatttgctccaatttgcaaccctgtactctgtccctggggcaaaaaagcctttagtggatatttgggaacagatcaaagtaaatggaaggcttatgatgctacccaccttgtgaaatcctatccaggatctcagctggacatactaattgatcaagggaaagatgaccagtttcttttagatggacagttactccctgataacttcatagctgcctgtacagaaaagaaaatccccgttgtttttcgattgcaagagggttatgatcatagctactacttcattgcaacctttattactgaccacatcagacatcatgctaaatacctgaatgcatgaaaaaactccaaataagagaatctcttcaggattataaaagttgtaaaatgcaactgtattgctgagcaaaaaaaaaaaaaattcaaaacattggattttatagtgctaaaagggctttattctatagttgaatcacctctgaataaagatataaaacctaaaaaaaaaaaaaaaaa

SEQ ID NO: 1600 - DNA, 5989 bp, Homo Sapiens
  NM_001987
gcgtcccgggtccccgcgccgcgccgcgacctgcagaccccgccgccgcgctcgggcccgtctcccacgcccccgccgccccgcgcgcccaactccgccggccgccccgccccgccccgcgcgctccagacccccggggcggctgccgggagagatgctggaagaaacttcttaaatgaccgcgtctggctggccgtggagcctttctgggttggggagaggaaaggaaagtggaaaaaacctgagaacttcctgatctctctcgctgtgagacatgtctgagactcctgctcagtgtagcattaagcaggaacgaatttcatatacacctccagagagcccagtgccgagttacgcttcctcgacgccacttcatgttccagtgcctcgagcgctcaggatggaggaagactcgatccgcctgcctgcgcacctgcgcttgcagccaatttactggagcagggatgacgtagcccagtggctcaagtgggctgaaaatgagttttctttaaggccaattgacagcaacacgtttgaaatgaatggcaaagctctcctgctgctgaccaaagaggactttcgctatcgatctcctcattcaggtgatgtgctctatgaactccttcagcatattctgaagcagaggaaacctcggattcttttttcaccattcttccaccctggaaactctatacacacacagccggaggtcatactgcatcagaaccatgaagaagataactgtgtccagaggacccccaggccatccgtggataatgtgcaccataaccctcccaccattgaactgttgcaccgctccaggtcacctatcacgacaaatcaccggccttctcctgaccccgagcagcggcccctccggtcccccctggacaacatgatccgccgcctctccccggctgagagagctcagggacccaggccgcaccaggagaacaaccaccaggagtcctaccctctgtcagtgtctcccatggagaataatcactgcccagcgtcctccgagtcccacccgaagccatccagcccccggcaggagagcacacgcgtgatccagctgatgcccagccccatcatgcaccctctgatcctgaacccccggcactccgtggatttcaaacagtccaggctctccgaggacgggctgcatagggaagggaagcccatcaacctctctcatcgggaagacctggcttacatgaaccacatcatggtctctgtctccccgcctgaagagcacgccatgcccattgggagaatagcagactgtagactgctttgggattacgtctatcagttgctttctgacagccggtacgaaaacttcatccgatgggaggacaaagaatccaaaatattccggatagtggatcccaacggactggctcgactgtggggaaaccataagaacagaacaaacatgacctatgagaaaatgtccagagccctgcgccactactacaaactaaacattatcaggaaggagccaggacaaaggcttttgttcaggtttatgaaaaccccagatgaaatcatgagtggccgaacagaccgtctggagcacctagagtcccaggagctggatgaacaaatataccaagaagatgaatgctgaaggaaccaacagtccacctcagcgggccagcagcccagggaacccctgcccaccaggattgctggaagtgtgacggagcaggcgggctgaggagagtggaaaaggaagcgacccagaaatggcagggacacttctcttgcagaccaagagggaccctggagcaccttagacaaactacccagcacaggcggggctggaattctggcggagggcatgagcctgggactccatgtcacgtttccttctgatttggaatctctccatctgtaattcctcaccctcacccttccaccgttgttagtatcatggtgtttttgtttttgtttttgttttaagaacctgcagtttgactcttcatcgttcatctaggggaagacatctgatgttgttttcctatggaaatatatatctattatatatatattttttgcaaatctcacaaagtgcggcaagcccagctggtcaggaaagagaatacttgcagaggggttcaggttcctctttttcctgccacgtggatcaggtctgttcctgttactgttgggtcttggctgaaaaaaaaaaatgcttttaaaaaagataaaatgaaaaggagagctctctttttctctctcttgctctgttcttcccttggtcccctctgtcctcccgccctgcctgcagttgagattcagatgccttctgacagagttcagcctcttggagagtcttggggattgttggcacctaaacagaatcagtgacccgggtgctttgtggccagcagcacagaatcaaacccgcatcccagcattgggccacccatctgagggaggccaaaatcatcacagatgctgctgtgctgcagacagatacatgctagtccagagagccgcccctgagatggctgtgagaaccatgtgtctaaggcgtaagataaggatggaaggctgtccaagttatttggaaggcctcggcagcttgggattagcttgggagcgcagcgctgcaaagtggaaaatatgaaaagaccacacaggcccagcagtccagaaactgggcaaaaatattctgcagtggggatttatttttccaaagcaggtaacagaggctagtgagaaagaaaagctcctctctgctccattccaaaggccatcttgtggtcagtttcatgccctcacctgatttttttttttttttttttttttcaattcctaaccttttttaaagtttcctggtctccactggacacagagctttggagacggaggatcccagagggcagtctcagttgcaatcagtgtgtgcccagcctgggcagacaggaaattcctcggatacattattttttctttctttcatagctgtgtctcagaaaggacccatttgtggctctttttcacctcaaaataagatcgatggtatcttgtaaaatgagggtagtgccacttcttagtatttttgaaagctgttttagattttttttttttttccttttctagccatctaaattgactcttccaatataggtctcagaaatccaatatttggagtacaatttcttttaatccagattacacctgccttacaaagcaccccctccttgttcccctctgtttcctctactcagttgggggagaaactcacagctcctccgggatacatatgtgccctcagcagcagctcccaggtgaagttaccagacccctgggcttctccccagctttttctgagttgagtcagacatgtagagtttgggtcacacaggcaagaggaattttccctcggccttactgacaaggacaccaacctagggtgcaaacagatggactatggttcaaggacactggaattgaggagctgatcaaggctctcttcagccttgctctgtccctgcctcttatcagagcacaggtagacacacgggcatagccagcccactcctactgtcacaggcgccccaccattcaaccttccgggaggtcagggaccttctatatgaggcgagtgggtctcagtctgcttgaatggtgatgagattctgctggatctcagcacgctgcaggtgtcttttgagagcattcagtaggacatggtgatccctatttcagcctctaagatgactggtattctatctgaaatgcagagattaagccaaatacctgatgtattgtgaaagccactgattttaagaatggagagaaagggattttttactgcatccctctgtatgaatatgaaatcagagaccagggcatgatgttgctaggattagagcctctcagtctggcctcttcacccaagtgcaagaactcagtctcttactgttcaaagaatcttaacagttgaattatggagggaaattcccttttgccccaagcatttctatatttaaagcaatatcccaggagaatatgttagacttaggatgataccttcagccacttgaagaagaaatagaaggcgctcattccaatatagtctttatttcccattcagatacaggttgagcatccctaatctgaacagttaaaacccccaaatgccccaaaatccaaaccttcctgaacgctatgacaccatgagtggaaaattccacacctaacaaacacatttgctttcttatggttcaatgtacacaaactgttttatatagaaaatgatttcaaatatcataaaattaccttcaggctatgtgtataaagtatatatgagccataaatgaattttgtgtttagactttgtgtccatccccaagatctctcattttatatatatatatatatatatatatatatatatatatatatatatatacacacacacacacatacacaaatattccaggatacaaaaaaaaacatttaaaaatccgagacccagaacacttctggtcccaagcatttcagataagggatatcaatctgtactaccaataaggatttcgtaattcccctaactgcaaatgtcctcttcatttgttctttatgagaaaacccgggtagtgccagcacctggatacagtatttacaccctgcagaccctaaagatttcagattcagttagcaaaccttgatgaagcacctgctggacactgagggacccaaagctcaatcagccataatccctgctttcagagtttatattgtacctgcctaatccacccggcgtgactcatttcaacactaagtactaggggtgttgtcaggagacaaatctgaagtcaggagaggaaaatgcaaaggagccctgccgtgtgatggatgtgcattctcacttgggtcttgaagttctcattcctacatctcaagctagccaggcagtctcctctctatcagaagaaagcactggtaattggctagactggctatgttgaaggtaacatgaactctaagatcttgacccagggcgacttggttttgcttaaggtggcatcaccaatgttccaaatcctttagggagatgagggtatccccacagaaaaagaggaataatagaccaatggattttctcctttcaccagtatgtttggaaccctctgatccaatgtcttttgatactgatctcttgtccaaatgagaatgtcgctttagctgaaattcaaatggctgtgacaatttaccgaaatgatgaagtaaccaccattcccacctttcactgcctaggctccaagtctgaatacatttttgaaataggaactcccttttgcaaaaaagaaacctgggtgtcagggaggtgaagtgacttgccctaggagcagacagcatgccaagaatggaattaggctcaggatccagcctgggctcaccctgtgtggctcattcccacccaggaaactgaagataaaagatttgggaaaacacaccaagaaaaaggggcagttttctttgcccaagcatttggtgctagttagaggctgttcactctctcctgctcctcttcggagtagaaataaaggctgtgacacaaggaagccagtggggtgggagggaggcaccataatccctccctaaaacccacagaagactaacctgatactcttttgacccaactgcatcaacactaaacagctgcagaccccctgaatctttcacacatgccaagtgaacattcttgatgatttctctttgtgaccgcaaccacctgcaaaccagaacgactctagaatttccttccccgcccccctttttgtttagtttctaatctcttgtttatgaggtgtggggtttataagggactgaatcaaatgaatgtaacaaaaaagaaaaaaaaaacaaaaaaaaatgccttttctcagggccagtgagttgcaaataatttttaaagaaaagcctataattacatcatctcaataaattttttataaaaaaaaaaaaa

SEQ ID NO: 1601 - DNA, 3822 bp, Homo Sapiens
  NM_001995
tggctcagccgcggcggtggcgggggcgcaaccagcgggccgaggcggcggcgccagcggcgccttaaatagcatccagagccggcgcggggcagggagtgggctgcagtgacagccggcggcggagcggccggtccacggaggagaattcagcttagagaactatcaacacaggacaatgcaagcccatgagctgttccggtattttcgaatgccagagctggttgacttccgacagtacgtgcgtactcttccgaccaacacgcttatgggcttcggagcttttgcagcactcaccaccttctggtacgccacgagacccaaacccctgaagccgccatgcgacctctccatgcagtcagtggaagtggcgggtagtggtggtgcacgaagatccgcactacttgacagcgacgagcccttggtgtatttctatgatgatgtcacaacattatacgaaggtttccagaggggaatacaggtgtcaaataatggcccttgtttaggctctcggaaaccagaccaaccctatgaatggctttcatataaacaggttgcagaattgtcggagtgcataggctcagcactgatccagaagggcttcaagactgccccagatcagttcattggcatctttgctcaaaatagacctgagtgggtgattattgaacaaggatgctttgcttattcgatggtgatcgttccactttatgatacccttggaaatgaagccatcacgtacatagtcaacaaagctgaactctctctggtttttgttgacaagccagagaaggccaaactcttattagagggtgtagaaaataagttaataccaggccttaaaatcatagttgtcatggatgcctacggcagtgaactggtggaacgaggccagaggtgtggggtggaagtcaccagcatgaaggcgatggaggacctgggaagagccaacagacggaagcccaagcctccagcacctgaagatcttgcagtaatttgtttcacaagtggaactacaggcaaccccaaaggagcaatggtcactcaccgaaacatagtgagcgattgttcagcttttgtgaaagcaacagagaatacagtcaatccttgcccagatgatactttgatatctttcttgcctctcgcccatatgtttgagagagttgtagagtgtgtaatgctgtgtcatggagctaaaatcggatttttccaaggagatatcaggctgctcatggatgacctcaaggtgcttcaacccactgtcttccccgtggttccaagactgctgaaccggatgtttgaccgaattttcggacaagcaaacaccacgctgaagcgatggctcttggactttgcctccaagaggaaagaagcagagcttcgcagcggcatcatcagaaacaacagcctgtgggaccggctgatcttccacaaagtacagtcgagcctgggcggaagagtccggctgatggtgacaggagccgccccggtgtctgccactgtgctgacgttcctcagagcagccctgggctgtcagttttatgaaggatacggacagacagagtgcactgccgggtgctgcctgaccatgcctggagactggaccgcaggccatgttggggccccgatgccgtgcaatttgataaaacttgttgatgtggaagaaatgaattacatggctgccgagggcgagggcgaggtgtgtgtgaaagggccaaatgtatttcagggctacttgaaggacccagcgaaaacagcagaagctttggacaaagacggctggttacacacaggggacattggaaaatggttaccaaatggcaccttgaaaattatcgaccggaaaaagcacatatttaagctggcacaaggagaatacatagcccctgaaaagattgaaaatatctacatgcgaagtgagcctgttgctcaggtgtttgtccacggagaaagcctgcaggcatttctcattgcaattgtggtaccagatgttgagacattatgttcctgggcccaaaagagaggatttgaagggtcgtttgaggaactgtgcagaaataaggatgtcaaaaaagctatcctcgaagatatggtgagacttgggaaggattctggtctgaaaccatttgaacaggtcaaaggcatcacattgcaccctgaattattttctatcgacaatggccttctgactccaacaatgaaggcgaaaaggccagagctgcggaactatttcaggtcgcagatagatgacctctattccactatcaaggtttagtgtgaagaagaaagctcagaggaaatggcacagttccacaatctcttctcctgctgatggccttcatgttgttaattttgaatacagcaagtgtagggaaggaagcgttcgtgtttgacttgtccattcggggttcttctcataggaatgctagaggaaacagaacactgccttacagtcacctcatgttgcagaccatgtttatggtaatacacactttccaaaatgagccttaaaaattgtaaaggggatactataaatgtgctaagttatttgagacttcctcagtttaaaaagtgggttttaaatcttctgtctccctgtttttctaatcaaggggttaggactttgctatctctgagatgtctgctacttgctgcaaattctgcagctgtctgctgctctaaagagtacagtgcactagagggaagtgttccctttaaaaataagaacaactgtcctggctggagaatctcacaagcggaccagagatctttttaaatccctgctactgtcccttctcacaggcattcacagaacccttctgattcgtaagggttacgaaactcatgttcttctccagtcccctgtggtttctgttggagcataaggtttccagtaagcgggagggcagatccaactcagaaccatgcagataaggagcctctggcaaatgggtgctcatcagaacgcgtggattctctttcatggcagaatgctcttggactcggttctccaggcctgattccccgactccatcctttttcaggggttatttaaaaatctgccttagattctatagtgaagacaagcatttcaagaaagagttacctggatcagccatgctcagctgtgacgcctgaataactgtctactttatcttcactgaaccactcactctgtgtaaaggccaacagatttttaatgtggttttcatatcaaaagatcatgttgggattaacttgcctttttccccaaaaaataaactctcaggcaagcatttctttaaagctattaagggagtatatacttgagtacttattgaaatggacagtaataagcaaatgttcttataatgctacctgatttctatgaaatgtgtttgacaagccaaaattctaggatgtagaaatctggaaagttcatttcctgggattcacttctccagggattttttaaagttaatttgggaaattaacagcagttcactttattgtgagtctttgccacatttgactgaattgagctgtcatttgtacatttaaagcagctgttttggggtctgtgagagtacatgtattatatacaagcacaacagggcttgcactaaagaattgtcattgtaataacactacttggtagcctaacttcatatatgtattcttaattgcacaaaaagtcaataatttgtcaccttggggttttgaatgtttgctttaagtgttggctatttctatgttttataaaccaaaacaaaatttccaaaaacaatgaaggaaaccaaaataaatatttctgcatttcaggtgaaaaaaaaaaaaaaaaaa

SEQ ID NO: 1602 - DNA, 4193 bp, Homo Sapiens
  NM_001998
gcacacagccaggggccgcccgggctctcgacgcgccgacggccgggcggacggacggacggacgccgagcgcagtgccccgcgggtcttacaggagaggggaccgtcctgggctggcctggaccatggtgctgctctgggagcctgcaggagcctggcttgctctgggcctggccctggccctgggccccagcgtggccgcagctgcccctcggcaggactgcacgggcgtggagtgcccgccgctggagaactgcattgaggaggcgctggagccgggtgcctgctgtgccacgtgtgtgcagcagggctgcgcctgcgagggctaccagtactatgactgcctacagggtggcttcgtgcgcggccgcgtgcccgccggtcagtcctattttgtggacttcgggagcactgagtgctcctgcccaccaggcggcggcaagatcagctgccagttcatgctgtgcccggagctgccgcccaactgcatcgaggctgtagtggtggctgacagctgcccacagtgcggccaggtgggctgcgtccacgcgggccacaagtacgccgctggccacactgttcacctgccgccctgccgggcctgccactgccctgacgccggtggagagctcatctgctaccagctccccggttgccacgggaacttctcagatgccgaggagggtgaccccgagcgacactacgaagacccctacagctatgaccaggaggtggccgaggtggaagcagcaacagccctggggggtgaggtccaggcgggtgcagtccaggcaggcgcagggggccccccagctgctctgggaggtgggagtcagccactgtccaccatccaggcacccccctggccagctgtcctccccaggcccacagcggctgctgccctgggtcccccagccccagtgcaggccaaagctaggagagtgaccgaggacagtgaggaggaagaagaggaggaggaggagagagaggaaatggctgtcactgagcagctggcagcaggtggccacagggggctggatgggctgcccactacagccccagctggacccagtcttcctatccaggaggagagggcagaagctggggcaagggcagaagctggggcaaggcctgaagagaacctcatcctggatgcccaagccacgtcccgcagcactgggccggagggcgtgacgcatgcaccgagcctgggcaaggctgctctcgtcccaactcaggccgtgcctggctctcccagggacccagtcaagcccagcccccacaacatcctgtccacatcactgcctgatgcagcctggatcccacccacccgagaagtgcccaggaagccgcaagttctgccccattcccacgtggaggaggacacagaccccaactctgtccattctatccccagaagtagccctgaaggctccaccaaggacctgatcgagacttgctgcgcagccggacagcagtgggccattgacaatgacgagtgcctggagatccctgagagtggcactgaggacaacgtctgcaggacagcccagaggcactgctgtgtctcctacttgcaggagaagagctgcatggccggcgtcctgggagccaaggagggtgagacctgtggggctgaggacaacgacagctgcggcatctccctgtacaagcaatgctgtgactgctgtggcctgggcctccgcgtgcgggccgagggccagtcgtgtgagtccaatcctaacctgggctatccctgcaatcatgtcatgctctcctgctgtgagggtgaagagcctctcatagtacctgaggttcgccgacctccagagcccgcagctgcaccacggagagtttcagaggcagagatggcgggccgagaggccctgtcactgggcacagaggccgagctgccgaacagcctgccgggcgatgaccaggatgagtgccttctcctcccgggagagctgtgccagcacctttgcatcaatactgtgggttcttaccactgtgcctgctttcctggcttctcactgcaggacgatggccgcacttgccgcccagagggtcaccctccacagccggaagccccacaggagcctgcactgaagtcagaattttcccaggtggcctctaacaccatcccgctgccactgccgcagcccaatacctgcaaagacaatggaccctgcaagcaggtgtgcagcactgttgggggctcagccatatgctcctgttttcccggctatgccatcatggcggatggcgtgtcctgtgaagacatcaacgagtgtgtgacggacctgcacacgtgcagccggggcgagcactgtgtgaacacactgggctccttccactgctacaaggcactcacctgtgagccaggctatgccctcaaggatggcgagtgcgaagacgtggatgagtgtgcgatgggcacgcacacctgccagccgggcttcttgtgccagaacaccaagggctccttctactgccaggccaggcagcgctgcatggatggcttcctgcaggatcctgaaggcaactgtgtggacatcaacgagtgcacgtcactgtccgagccatgtcggccaggcttcagctgcatcaacacggtgggctcctacacatgccagaggaacccgctgatctgcgcgcgcggctaccacgccagcgatgatgggaccaagtgtgtggacgtgaatgagtgtgagacaggtgtgcaccgctgcggtgagggccaagtgtgccacaacctccctggctcctaccgctgtgactgcaaagccggctttcagcgggatgcctttggccggggctgcatcgacgtgaatgagtgctgggcctcgccaggccgcctgtgccagcacacgtgtgagaacacactcggctcctaccgctgttcctgcgcctccgggttcctgctagcagcggacggcaagcgctgtgaagacgtgaatgagtgtgaggcccagcgctgcagccaggagtgtgccaacatctatggctcctaccagtgctactgccgccagggctaccagctggctgaggatgggcacacctgcacagacatcgacgagtgtgctcaaggcgccggcatcctctgcaccttccgctgtctcaacgtgccagggagctaccagtgtgcatgccctgagcagggctacaccatgacggccaacgggaggtcctgcaaggacgtggatgagtgtgcactgggtacccacaactgttccgaggctgagacctgccacaacatccagggtagcttccgctgcctgcgcttcgagtgtcctcccaactatgtccaagtctccaaaacgaagtgcgagcgcaccacgtgccatgacttcctggagtgccagaactcgccagcgcgcatcacgcactaccagctcaacttccagacgggcctcctggtgcctgcgcatatcttccgcattggccccgcgccagccttcacgggggacaccatcgccctgaacatcatcaagggcaatgaggagggctactttggcacgcgcaggctcaatgcctacacgggtgtggtctacctgcagcgggccgtgctggagccccgggactttgccctggacgtggagatgaagctctggaggcagggctccgtcaccaccttcctggccaagatgcacatcttcttcaccacctttgccctgtgaggtgccagcacgggccacctgcgggtgtggcgcagcccagggctcacactgcgtgggagggactgggtcactattgtggtttttactataactttgtaaattaacttaattttgctgacttgactcctgtggcttctggacccctcctctgccccgcaggaggaagttccacggcaggtggtgcgttcccacgcaggcaccaagtggaagcttgcacggtgggccacggccgtggcgggtgccctgtgggtgaggctgggtgatgacctgaggaccagagacacgcgaccatgttggggctcttggactcctctggatgacccgtccccaaagttgacattccatttcatgttccactgtgattaattcttttcttttttaaaaaatcattttaaagttttttgtttaactataaagtagtacatgtacattatataaaaaaaagttcaactagtatgaaagggttataaagtaacagaggaaaacgcctcttggtccctttaaaaaaaaaaa

SEQ ID NO: 1603 - DNA, 10724 bp, Homo Sapiens
  NM_001999
ctttccaatatccgtcttcggagcgcacgggaatccgccgagctctgcgtgcaggcccttttttcttttgaggttcacattttttgaaattttacgccagggcttttgtaatttcctcccccgcccgctgacggtcctggagtcgctcggggctttaggccggttatgcaacgtgtaccgctcggggctgccggctgcacctccgccgcgcctcgccgctcactgcgctagacccggcgccccgcgtctcgcttcgcgggcagtcagggggccggcgctctgtcgaggtctccagctagagcagggagcccgagcccgagggagtccccggagccgacgaagggcttattagaccctgactcttttctgaggcgcgcagattttgtctttgatcactccctctccgcgggtctacggccgcgcgctttcggcgccggcgatggggagaagacggaggctgtgtctccagctctacttcctgtggctgggctgtgtggtgctctgggcgcagggcacggccggccagcctcagcctcctccgcccaagccgccccggccccagccgccgccgcaacaggttcggtccgctacagcaggctctgaaggcgggtttctagcgcccgagtatcgcgaggagggtgccgcagtggccagccgcgtccgccggcgaggacagcaggacgtgctccgagggcccaacgtgtgcggctccagattccactcctactgctgccctggatggaagacgctccctggaggaaaccagtgcattgtcccgatttgtagaaatagttgtggagatggattttgttcccgtcctaacatgtgtacttgttccagtgggcaaatatcatcaacctgtggatcaaaatcaattcagcagtgcagtgtgagatgcatgaatggtgggacctgtgcagatgaccactgccagtgccagaaaggatatattggaacttattgtggacaacctgtctgtgaaaatggatgtcagaatggtggacgttgcatcggacccaaccgctgtgcttgtgtttatgggttcactggtccacagtgtgaaagagattacaggacaggcccgtgtttcactcaggtcaacaaccagatgtgccaagggcagctgacaggcattgtctgcacgaagactctgtgctgtgccaccattggacgggcgtggggccatccctgtgagatgtgtccagcccagcctcagccctgccgacggggtttcatccccaacatccgcactggagcttgccaagatgttgatgaatgccaggctatcccagggatatgccaaggaggaaactgtatcaatacagtgggctcttttgaatgcagatgccctgctggtcacaaacagagtgaaactactcagaaatgtgaagacattgatgagtgcagcatcattcctgggatatgtgaaactggtgaatgttccaacaccgtgggaagctatttttgtgtttgtccacgtggatatgtaacctcaacagatggctctcgatgcatcgatcagagaacaggcatgtgtttctcgggcctggtgaatggccgctgtgcacaagagctcccggggagaatgacgaaaatgcagtgctgctgtgagcctggccgctgctggggcatcggaaccattcctgaagcctgtcctgtcagaggttctgaggaatatcgcagactttgcatggatggacttccaatgggaggaattccagggagtgctggttccagacctggaggcactgggggaaatggctttgccccaagtggcaatggcaatggctatggcccaggagggacaggcttcatccccatccctggaggcaatggcttttctcctggcgttgggggagccggtgtgggggccgggggacagggacctatcatcactggactaacaattctgaaccagacaatagatatctgtaagcatcatgctaacctttgtttaaatggacgctgtataccaactgtctcaagctaccgatgtgaatgcaacatgggttataagcaggatgcaaatggagattgtatagatgttgatgaatgcacatcaaatccctgcactaatggagattgtgttaacacacctggttcctattattgtaaatgtcatgctggattccagaggactcctaccaagcaagcatgcattgatattgatgagtgcatccagaatggggttctttgtaaaaacggtcgatgcgtgaacacagatggaagtttccagtgcatttgcaatgccggctttgaattaactacagatggaaaaaactgtgttgatcatgatgaatgtacaactaccaacatgtgtttgaatggaatgtgcatcaatgaagatggcagcttcaagtgcatctgcaaaccaggatttgtcttggctccaaatgggcgttactgtactgatgttgatgaatgccagaccccaggaatctgcatgaatgggcactgcatcaacagtgaagggtccttccgctgtgactgtcccccaggcctggctgtgggcatggatggacgtgtgtgtgttgatactcacatgcgcagtacctgctatggaggaatcaagaaaggagtgtgtgtgcgtcctttccccggtgcagtgaccaagtccgaatgctgctgtgccaatccagactatggttttggagaaccctgccagccatgccctgcaaaaaattcagctgaattccacggcctttgtagtagtggagtaggtatcactgtggatggaagagatatcaatgaatgtgctttggatcctgatatatgtgccaatgggatttgtgaaaacttacgtggtagttaccgttgtaattgcaacagtggctatgaaccagatgcctctggaagaaactgtattgacattgatgaatgtttagtaaacagactgctttgtgataacggattgtgccgaaacacgccaggaagttacagctgtacgtgcccaccagggtatgtgttcaggactgagacagagacctgtgaagatataaatgaatgtgaaagcaacccatgtgtcaatggggcctgcagaaacaaccttggatctttcaattgtgaatgttcgcccggcagcaaactcagctccacaggattgatctgtattgacagcctgaaggggacctgttggctcaacatccaggacagccgctgtgaggtgaatattaatggagccactctgaaatctgaatgctgtgccaccctcggagccgcctgggggagcccctgtgagcggtgtgaactagatacagcttgcccaagagggcttgccaggattaaaggtgttacgtgtgaagatgttaatgagtgtgaggtgttccctggcgtttgtccaaatggacgctgtgtcaacagtaagggatcttttcattgcgagtgccctgaaggccttacgttggatgggactggccgtgtatgtttggatattcgcatggagcagtgttacttgaagtgggatgaagatgaatgcatccaccccgttcctggaaagttccgcatggatgcctgctgctgtgctgtcggggcggcttggggcaccgagtgtgaggagtgccccaaacctggcaccaaggaatacgagacgctgtgcccccgcggggctggctttgctaaccgaggggatgttcttactgggcggccattttacaaagacatcaatgaatgcaaagcatttcctgggatgtgcacttatgggaagtgcagaaatacaatcggaagcttcaaatgccgttgcaatagtggctttgctctagacatggaggaaagaaactgcacggacatcgacgagtgcaggatttctcctgacctctgtggcagtggaatctgcgtcaatacaccgggcagctttgagtgcgagtgcttcgaaggctatgaaagtggcttcatgatgatgaagaactgcatggacattgacgaatgtgaacgtaaccctctcctttgtaggggtggcacctgtgtgaacactgagggcagctttcagtgtgactgcccactgggacacgagctgtcaccatcccgtgaggactgtgtggatattaatgaatgctccctgagtgacaatctctgcagaaatggaaaatgtgtgaacatgattggaacctatcagtgctcttgcaatcctggatatcaggctacgccagaccgccagggctgtacagatattgatgaatgtatgataatgaacggaggctgtgacacccagtgcacaaattcagagggaagctacgaatgcagctgcagtgagggttatgccctgatgccagatgggagatcgtgtgcagacattgatgaatgtgaaaacaatcctgatatctgtgatggcggccagtgtaccaacattcctggagagtatcgctgcctctgctatgatggcttcatggcttccatggacatgaaaacatgcattgatgtcaatgaatgtgacctaaattcaaatatctgcatgtttggggaatgtgagaacacaaagggatccttcatttgccactgtcagctgggttactcagtgaagaaggggaccacaggatgtacagatgtggatgagtgtgaaattggtgctcataactgcgacatgcatgcctcatgtctgaatatcccaggaagcttcaagtgtagctgcagagaaggctggattggaaacggcatcaagtgtattgatctggacgaatgttctaatggaacccaccagtgtagcatcaatgctcagtgtgtaaataccccgggctcataccgctgtgcctgctccgaaggtttcactggtgatggctttacctgctcagatgttgatgagtgtgcagaaaacataaacctctgtgagaacggacagtgccttaatgtcccgggtgcatatcgctgcgagtgtgagatgggcttcactccagcctcagacagcagatcctgccaagatattgatgaatgctccttccaaaacatttgtgtctttggaacatgtaataacctgcctggaatgtttcattgcatctgcgatgatggttatgaattggacagaacaggagggaactgtacagatattgatgagtgtgcagatcctataaactgtgtcaatggcctatgtgtcaacacgcctggtcgctatgagtgtaactgcccacccgattttcagttgaacccaactggtgtgggttgtgttgacaaccgtgtgggcaactgctacctgaagtttggacctcgaggagatgggagtctgtcttgcaacaccgagatcggggtgggcgtcagtcgctcttcatgctgctgctctctgggaaaggcctggggaaacccctgtgagacatgcccccctgtcaatagcactgaatattacaccctgtgtcccggaggtgaaggcttcagacctaaccccatcacaatcattttagaagacattgacgaatgccaggagttaccaggtctctgccagggtggaaactgcatcaacacttttgggagcttccagtgtgagtgcccacaaggctactacctcagcgaggatacccgcatctgtgaagatattgatgagtgttttgcacatcctggtgtgtgtgggcctgggacctgctataacaccctgggaaattacacctgcatttgcccacctgagtacatgcaggtcaatggaggccacaactgcatggacatgagaaaaagcttttgctaccgaagctataatggaaccacttgtgagaatgagttgcctttcaatgtgacaaaaaggatgtgctgctgcacatataatgtgggcaaagcctggaacaaaccttgtgaaccatgcccaactccaggaacagctgactttaaaaccatatgtggaaatattcctggattcacctttgacattcacacaggaaaagctgttgacattgatgaatgtaaagagattccaggcatttgtgcaaatggtgtgtgcattaaccagattggcagtttccgctgtgaatgccctacaggattcagttacaatgacctgctgttggtttgtgaagatatagatgagtgcagcaatggtgataatctctgccagcggaatgcagactgcatcaatagtcctggtagttaccgctgtgaatgtgccgcgggtttcaaactttcacccaatggggcctgtgtagatcgcaatgaatgtttagaaattcctaacgtttgcagtcatggcttgtgtgttgatctgcaaggaagttaccagtgcatctgccacaatggctttaaggcttctcaggaccagaccatgtgcatggatgttgatgagtgcgagcggcatccatgtggaaatggaacttgtaaaaacaccgttggatcctataactgtctgtgctacccagggtttgaactcactcataataatgattgcctggacatagatgagtgcagttccttttttggtcaggtgtgcagaaatggacgttgttttaatgaaattggttctttcaagtgtctatgtaacgaaggttatgaacttaccccagatggcaaaaactgtatagacactaatgagtgtgtcgcccttcccggctcttgctctcctggtacctgtcagaatttggagggatccttcagatgcatctgtcccccagggtatgaagtaaaaagcgagaactgcattgatataaatgaatgtgatgaagatcccaacatttgtctttttggttcctgtactaatactccagggggcttccagtgcctctgcccccctggctttgtactatctgataatggacggagatgctttgatactcgccagagcttctgcttcacaaattttgaaaatggaaagtgttctgtacccaaagctttcaacaccacaaaagcaaaatgctgctgtagtaagatgccaggagagggctggggggacccctgtgagctgtgccccaaagacgatgaagttgcatttcaggatttgtgtccatatggccatggaactgtccctagtcttcatgatacacgtgaagatgtcaatgagtgtcttgagagcccaggcatttgttcaaatggtcaatgtatcaacaccgacggatcttttcgctgtgaatgtccaatgggctacaaccttgactacactggagtacgctgtgtggatactgatgagtgttcaatcggcaatccgtgtggaaatggtacatgcaccaatgttattgggagttttgaatgcaattgcaatgaaggctttgagccagggcccatgatgaattgtgaagatatcaacgaatgtgcccagaacccactgctgtgtgctttccgctgcatgaacacttttgggtcctatgaatgcacgtgcccgattggctatgccctcagggaagatcaaaagatgtgcaaagatctggatgaatgtgctgaagggttacacgactgtgaatctaggggcatgatgtgtaagaatctaatcggcaccttcatgtgcatctgccctcctggaatggcccgaaggcccgatggagaaggctgtgtagatgaaaatgaatgcaggaccaagccaggaatctgtgaaaatggacgttgtgttaacattattggaagctatagatgtgagtgtaatgaaggattccagtcaagttcttcaggcactgaatgccttgacaatcgacagggtctctgctttgcagaggtactgcagacaatatgtcaaatggcatccagtagtcgcaatctcgtcactaagtcagaatgctgctgtgatggtgggcgaggctggggccaccagtgcgagctttgcccacttcctggaactgcccagtacaaaaagatatgtcctcatggcccaggatatacaactgatggaagagatattgatgaatgtaaggtaatgccaaacctctgcaccaatggtcagtgcatcaataccatgggctcattccgatgcttctgcaaggttggctacaccacagacatcagtggaacctcttgtatagaccttgatgaatgctcccagtccccgaaaccatgcaactacatctgcaagaacactgaggggagttatcagtgttcatgtccgagggggtatgtcctgcaagaggatggaaagacatgcaaagaccttgatgaatgtcaaacaaagcagcataactgccagttcctctgtgtcaacaccctgggggggtttacctgtaaatgtccacctggtttcacacagcatcacactgcttgtatcgacaacaacgaatgtgggtctcaaccttcgctttgtggagcaaagggaatctgtcaaaacactccaggcagtttcagctgtgaatgccaaagagggttctctcttgatgccaccggactgaactgtgaagatgttgatgaatgtgatgggaaccacaggtgccaacacggctgccagaacatcctgggtggctacagatgtggctgcccccaaggctacatccagcactaccagtggaatcagtgtgtcgatgagaatgaatgctccaatcccaatgcctgtggctctgcttcctgctacaacaccctggggagttacaagtgcgcctgcccctcggggttctccttcgaccagttctccagtgcctgccacgacgtgaatgagtgctcgtcctccaagaacccctgcaattacggctgctctaacacggaggggggctacctctgtggctgcccccctgggtattacagagtgggacaaggccactgtgtctcaggaatgggatttaacaaggggcagtacctgtcactggatacagaggtcgatgaggaaaatgctctgtccccagaagcatgctacgagtgcaaaatcaacggctattctaagaaagacagcaggcagaagagaagtattcatgaacctgatcccactgctgttgaacagatcagcctagagagtgtcgacatggacagccccgtcaacatgaagttcaacctctcccacctcggctctaaggagcacatcctggaactaaggcccgccatccagcccctcaacaaccacatccgttatgtcatctctcaagggaacgatgacagcgtcttccgcatccaccaaaggaatgggctcagctacttgcacacggccaagaagaagctcatgcccggcacatacacactggaaatcactagcatccctctctacaagaagaaggagcttaagaaactggaagagagcaatgaggatgactacctcctaggggagcttggggaggctctcagaatgaggctgcagattcagctctattaacccttcacagacttgggcccaggctcaaatcctagcacagccagtctgcagaagcatttgaaaagtcaaggactaattttaaagaggaaaaataataataactcttgtttctttcctccctgtcttagactttgaatgttgaccctcacagggagggataatttagactctggtatggccaaagatttgagcacaaaggcaaccgtggttactgtattttttatataacttcattttaaaatatattaaaagaaacctaaatgttcaagatatcagcatatggcactaaatgcacaaaaataatgtgagctttttttttttttcctgttagcagtctgtaacactttgggtattttgctatagttgctaattaaaaaaatatagatgtttatttatttttaatgcagtaatatatggagaaatgaacaaactatgtaaacaaaaagggaaactcacttgtttttctttagatttataaatttgagctattttttttagaggtgctttttaaaaatccaatagatacaagagatgtttcctttggttttctgccagtcatccagctgatacacacctgatgattttaaagaaagccacacagagctgaatgggcagtgtaatcaataatttaaaaaacatgaatgtcattagatcctttataacgtagatcgaagccaaagcagctcatttgtgacaacatttcatatcaccagacacaccaggcaacagaagttgaagcacaaccactgtagcaaaataccttgactgcttgtgagaccattagcattgcaggccaaaccgtactgtatttccttctcataacctcaaggaaccatatgtgctacccacaacacctcattcttacccagggtgcgctgcgtcctcatggtactgtaggcagctgaagaaccgccgttcccttgaaagggaacacctggcattctgtggtgtttcgtgctgtcttaaataatggtgcatttattatgttcaagttatttcaggattgccatatgtgcaaacaaatcatgcaatgcagccaaggaatatatgttgttgttgttgttttaaacccattttttttttagaattttcattaatactgtagttatacaccatatgcctcattttatcatagcctattgtgtatgaaagatgtttgtacaatgaattgatgtttagtttgctttagtcatttaaaaagatattgtaccaggatgtgctattaagagcacgtatccattattcttctcaacccaagaacctgtttcctggaccagtgaccaaacctcatatgtgaaatggccaaagcacatgcaggctcctggttgttcctctcaaacctgtgctgaccaaagattagtaaccagttatacccagtattttgaggttttattgtttttttaataactaaaaagaaaaaaggaacagtgtaaatttgtaatcaagagtttgtgaggaaaaacttatggtttttggttttgtttgtttttgtaggtctgtgtatcaaatatgacacttttcttgcaataaagcttattttggggta

SEQ ID NO: 1604 - DNA, 1191 bp, Homo Sapiens
  NM_002001
agtctccagcatcctccacctgtctaccaccgagcatgggcctatatttgaagccttagatctctccagcacagtaagcaccaggagtccatgaagaagatggctcctgccatggaatcccctactctactgtgtgtagccttactgttcttcgctccagatggcgtgttagcagtccctcagaaacctaaggtctccttgaaccctccatggaatagaatatttaaaggagagaatgtgactcttacatgtaatgggaacaatttctttgaagtcagttccaccaaatggttccacaatggcagcctttcagaagagacaaattcaagtttgaatattgtgaatgccaaatttgaagacagtggagaatacaaatgtcagcaccaacaagttaatgagagtgaacctgtgtacctggaagtcttcagtgactggctgctccttcaggcctctgctgaggtggtgatggagggccagcccctcttcctcaggtgccatggttggaggaactgggatgtgtacaaggtgatctattataaggatggtgaagctctcaagtactggtatgagaaccacaacatctccattacaaatgccacagttgaagacagtggaacctactactgtacgggcaaagtgtggcagctggactatgagtctgagcccctcaacattactgtaataaaagctccgcgtgagaagtactggctacaattttttatcccattgttggtggtgattctgtttgctgtggacacaggattatttatctcaactcagcagcaggtcacatttctcttgaagattaagagaaccaggaaaggcttcagacttctgaacccacatcctaagccaaaccccaaaaacaactgatataattactcaagaaatatttgcaacattagtttttttccagcatcagcaattgctactcaattgtcaaacacagcttgcaatatacatagaaacgtctgtgctcaaggatttatagaaatgcttcattaaactgagtgaaactggttaagtggcatgtaatagtaagtgctcaattaacattggttgaataaatgagagaatgaatagattcatttattagcatttgtaaaagagatgttcaatttcaataaaataaatataaaaccatgtaacagaatgcttctgagtaaaaaaaaaaaaaaaaaaaaaaaaaaa

SEQ ID NO: 1605 - DNA, 1620 bp, Homo Sapiens
  NM_002002
agtggctctactttcagaagaaagtgtctctcttcctgcttaaacctctgtctctgacggtccctgccaatcgctctggtcgaccccaacacactaggaggacagacacaggctccaaactccactaaccagagctgtgattgtgcccgctgagtggactgcgttgtcagggagtgagtgctccatcatcgggagaatccaagcaggaccgccatggaggaaggtcaatattcagagatcgaggagcttcccaggaggcggtgttgcaggcgtgggactcagatcgtgctgctggggctggtgaccgccgctctgtgggctgggctgctgactctgcttctcctgtggcactgggacaccacacagagtctaaaacagctggaagagagggctgcccggaacgtctctcaagtttccaagaacttggaaagccaccacggtgaccagatggcgcagaaatcccagtccacgcagatttcacaggaactggaggaacttcgagctgaacagcagagattgaaatctcaggacttggagctgtcctggaacctgaacgggcttcaagcagatctgagcagcttcaagtcccaggaattgaacgagaggaacgaagcttcagatttgctggaaagactccgggaggaggtgacaaagctaaggatggagttgcaggtgtccagcggctttgtgtgcaacacgtgccctgaaaagtggatcaatttccaacggaagtgctactacttcggcaagggcaccaagcagtgggtccacgcccggtatgcctgtgacgacatggaagggcagctggtcagcatccacagcccggaggagcaggacttcctgaccaagcatgccagccacaccggctcctggattggccttcggaacttggacctgaagggggagtttatctgggtggatgggagccacgtggactacagcaactgggctccaggggagcccaccagccggagccagggcgaggactgcgtgatgatgcggggctccggtcgctggaacgacgccttctgcgaccgtaagctgggcgcctgggtgtgcgaccggctggccacatgcacgccgccagccagcgaaggttccgcggagtccatgggacctgattcaagaccagaccctgacggccgcctgcccaccccctctgcccctctccactcttgagcatggatacagccaggcccagagcaagaccctgaagacccccaaccacggcctaaaagcctctttgtggctgaaaggtccctgtgacattttctgccacccaaacggaggcagctgacacatctcccgctcctctatggcccctgccttcccaggagtacaccccaacagcaccctctccagatgggagtgcccccaacagcaccctctccagatgagagtacaccccaacagcaccctctccagatgagagtacaccccaacagcaccctctccagatgagagtacaccccaacagcaccctctccagatgcagccccatctcctcagcaccccaggacctgagtatccccagctcaggtggtgagtcctcctgtccagcctgcatcaataaaatggggcagtgatggcctcccacatttgtccccttcttggaaaaaa

SEQ ID NO: 1606 - DNA, 1555 bp, Homo Sapiens
  NM_002004
tcagcgcggctcatcttcgcccagccaggacacgcaggatcgcgttatctgtccctcccgcgggcacattgggagttgtagtctaattatatatttccgcccttagtgtggggagagcgggaactactcgacccacagagccgatcgcggagcggattctgcttttaggagtacccgccaacaagcgggaccgagcaggaatccgtatctgggaacaggatgcccctgtcccgctggttgagatctgtgggggtcttcctgctgccagccccctactgggcaccccgggagaggtggctgggttccctacggcggccctccctggtgcacgggtacccagtcctggcctggcacagtgcccgctgctggtgccaagcgtggacagaggaacctcgagccctttgctcctccctcagaatgaacggagaccagaattcagatgtttatgcccaagaaaagcaggatttcgttcagcacttctcccagatcgttagggtgctgactgaggatgagatggggcacccagagataggagatgctattgcccggctcaaggaggtcctggagtacaatgccattggaggcaagtataaccggggtttgacggtggtagtagcattccgggagctggtggagccaaggaaacaggatgctgatagtctccagcgggcctggactgtgggctggtgtgtggaactgctgcaagctttcttcctggtggcagatgacatcatggattcatcccttacccgccggggacagatctgctggtatcagaagccgggcgtgggtttggatgccatcaatgatgctaacctcctggaagcatgtatctaccgcctgctgaagctctattgccgggagcagccctattacctgaacctgatcgagctcttcctgcagagttcctatcagactgagattgggcagaccctggacctcctcacagccccccagggcaatgtggatcttgtcagattcactgaaaagaggtacaaatctattgtcaagtacaagacagctttctactccttctaccttcctatagctgcagccatgtacatggcaggaattgatggcgagaaggagcacgccaatgccaagaagatcctgctggagatgggggagttctttcagattcaggatgattaccttgacctctttggggaccccagtgtgaccggcaaaattggcactgacatccaggacaacaaatgcagctggctggtggttcagtgtctgcaacgggccactccagaacagtaccagatcctgaaggaaaattacgggcagaaggaggctgagaaagtggcccgggtgaaggcgctatatgaggagctggatctgccagcagtgttcttgcaatatgaggaagacagttacagccacattatggctctcattgaacagtacgcagcacccctgcccccagccgtctttctggggcttgcgcgcaaaatctacaagcggagaaagtgacctagagattgcaagggcggggagaggaggctctcaataaataatcgtgtaaccttcaaaaaaaaaaaaaaaaaaa

SEQ ID NO: 1607 - DNA, 2783 bp, Homo Sapiens
  NM_002005
ggaggaagcgcggaatcaggaactggccggggtccgcaccgggcctgagtcggtccgaggccgtcccaggagcagctgcccgtgcggaacagcactatgggcttctcttccgagctgtgcagcccccagggccacggggtcctgcagcaaatgcaggaggccgagcttcgtctactggagggcatgagaaagtggatggcccagcgggtcaagagtgacagggagtatgcaggactgcttcaccacatgtccctgcaggacagtgggggccagagccgggccatcagccctgacagccccatcagtcagtcctgggctgagatcaccagccaaactgagggcctgagccgcttgctgcggcagcacgcagaggatctgaactcagggcccctgagcaagctgagcctgctcatccgggaacggcagcagcttcgcaagacctacagcgagcagtggcagcagctgcagcaggagctcaccaagacccacagccaggacattgagaagctgaagagccagtaccgagctctggcacgggacagtgcccaagccaagcgcaagtaccaggaggccagcaaagacaaggaccgtgacaaggctaaggacaagtatgtgcgcagcctgtggaagctctttgctcaccacaaccgctatgtgctgggcgtgcgggctgcgcagctacaccaccagcaccaccaccagctcctgctgcccggcctgctgcggtcactgcaggacctgcacgaggagatggcttgcatcctgaaggagatcctgcaggaatacctggagattagcagcctggtgcaggatgaggtggtggccattcaccgggagatggctgcagctgctgcccgcatccagcctgaggctgagtaccaaggcttcctgcgacagtatgggtccgcacctgacgtcccaccctgtgtcacgttcgatgagtcactgcttgaggagggtgaaccgctggagcctggggagctccagctgaacgagctgactgtggagagcgtgcagcacacgctgacctcagtgacagatgagctggctgtggccaccgagatggtgttcaggcggcaggagatggttacgcagctgcaacaggagctccggaatgaagaggagaacacccacccccgggagcgggtgcagctgctgggcaagaggcaagtgctgcaagaagcactgcaggggctgcaggtagcgctgtgcagccaggccaagctgcaggcccagcaggagttgctgcagaccaagctggagcacctgggccccggcgagcccccgcctgtgctgctcctgcaggatgaccgccactccacgtcgtcctcggagcaggagcgagaggggggaaggacacccacgctggagatccttaagagccacatctcaggaatcttccgccccaagttctcgctccctccaccgctgcagctcattccggaggtgcagaagcccctgcatgagcagctgtggtaccacggggccatcccgagggcagaggtggctgagctgctggtgcactctggggacttcctggtgcgggagagccagggcaagcaggagtacgtgctgtcggtgctgtgggatggtctgccccggcacttcatcatccagtccttggataacctgtaccgactggaaggggaaggctttcctagcattcctttgctcatcgaccacctactgagcacccagcagcccctcaccaagaagagtggtgttgtcctgcacagggctgtgcccaaggacaagtgggtgctgaaccatgaggacctggtgttgggtgagcagattggacgggggaactttggcgaagtgttcagcggacgcctgcgagccgacaacaccctggtggcggtgaagtcttgtcgagagacgctcccacctgacctcaaggccaagtttctacaggaagcgaggatcctgaagcagtacagccaccccaacatcgtgcgtctcattggtgtctgcacccagaagcagcccatctacatcgtcatggagcttgtgcaggggggcgacttcctgaccttcctccgcacggagggggcccgcctgcgggtgaagactctgctgcagatggtgggggatgcagctgctggcatggagtacctggagagcaagtgctgcatccaccgggacctggctgctcggaactgcctggtgacagagaagaatgtcctgaagatcagtgactttgggatgtcccgagaggaagccgatggggtctatgcagcctcagggggcctcagacaagtccccgtgaagtggaccgcacctgaggcccttaactacggccgctactcctccgaaagcgacgtgtggagctttggcatcttgctctgggagaccttcagcctgggggcctccccctatcccaacctcagcaatcagcagacacgggagtttgtggagaaggggggccgtctgccctgcccagagctgtgtcctgatgccgtgttcaggctcatggagcagtgctgggcctatgagcctgggcagcggcccagcttcagcaccatctaccaggagctgcagagcatccgaaagcggcatcggtgaggctgggacccccttctcaagctggtggcctctgcaggcctaggtgcagctcctcagcggctccagctcatatgctgacagctcttcacagtcctggactcctgccaccagcatccacactgccggcaggatgcagcgccgtgtcctctctgtgtccctgctgctgccagggcttcctcttccgggcagaaacaataaaaccacttgtgcccactgaa

SEQ ID NO: 1608 - DNA, 4545 bp, Homo Sapiens
  NM_002010
actctgcgcgccggcgggggctgcgcaggaggagcgctccgcccggctacaacgctccgcgagccggcgcggcaacacctgttcgcggcagcctgggcggcacgcgagctcccggacgcggctctcctcgctcgccgctcgccacccgttctaagccaatggacatctgccgagcctctggagaatcctggatactagctttggacgcctaaagtttcttcttctttttgttttattattattatcattttttggaggggggaccgggaggggagatttgtcgccgccaccaacgtgagatttttttttccccttgaaggattcatgctgatgtctgcagagtcggttagagagtaaaaacagcgcatgccttcctggagtcaggatccgtaaattctgacgtagcccgtgcatcttaaaaatccctataataacgcctaggcatttaagttgctatggtcattctgatctcaaaccaaatggagaaactacggattttttttccttattacggtcggatgggatgaagaccttcctgcctgctaagagctggggatctatctatagagatacatagatatgtttatcaatatgtcagtgtgtgagtataaagtggtggtttcttagactatcagtggtttgaccttgaacctgtgccagtgaaacagcagattacttttatttatgcatttaatggattgaagaaaagaaccttttttttctctctctctctgcaactgcagtaagggaggggagttggatatacctcgcctaatatctcctgggttgacaccatcattattgtttattcttgtgctccaaaagccgagtcctctgatggctcccttaggtgaagttgggaactatttcggtgtgcaggatgcggtaccgtttgggaatgtgcccgtgttgccggtggacagcccggttttgttaagtgaccacctgggtcagtccgaagcaggggggctccccaggggacccgcagtcacggacttggatcatttaaaggggattctcaggcggaggcagctatactgcaggactggatttcacttagaaatcttccccaatggtactatccagggaaccaggaaagaccacagccgatttggcattctggaatttatcagtatagcagtgggcctggtcagcattcgaggcgtggacagtggactctacctcgggatgaatgagaagggggagctgtatggatcagaaaaactaacccaagagtgtgtattcagagaacagttcgaagaaaactggtataatacgtactcatcaaacctatataagcacgtggacactggaaggcgatactatgttgcattaaataaagatgggaccccgagagaagggactaggactaaacggcaccagaaattcacacattttttacctagaccagtggaccccgacaaagtacctgaactgtataaggatattctaagccaaagttgacaaagacagtttcttcacttgagcccttaaaaaagtaaccactataaaggtttcacgcggtgggttcttattgattcgctgtgtcatcacatcagctccactgttgccaaactttgtcgcatgcataatgtatgatggaggcttggatgggaatatgctgattttgttctgcacttaaaggcttctcctcctggagggctgcctagggccacttgcttgatttatcatgagagaagaggagagagagagagactgagcgctaggagtgtgtgtatgtgtgtgtgtgtgtgtgtgtgtgtgtgtgtatgtgtgtagcgggagatgtgggcggagcgagagcaaaaggactgcggcctgatgcatgctggaaaaagacacgcttttcatttctgatcagttgtacttcatcctatatcagcacagctgccatacttcgacttatcaggattctggctggtggcctgcgcgagggtgcagtcttacttaaaagactttcagttaattctcactggtatcatcgcagtgaacttaaagcaaagacctcttagtaaaaaataaaaaaaaataaaaaataaaaataaaaaaagttaaatttatttatagaaattccaaaggcaacattttatttattttatatatttatttattatatagagtttatttttaatgaaacatgtacaggccagataggcattttggaagctttaggctctgtaagcattaaatggcaaagtccgctatgaacctgtggtaaattcatgcaagtagatataatggtgcatggatataagaaattctaatgaccctaatgtactaaaggcgacaatctcttttgtgcccatattattgtaaacttatgcacatcgctcatgacactgagtattcactcttcagactgcttgtttcatagcttatcccagaggattaaagataaactgggtctcaaactttgattctgtgtctgcaatatttcctctctcataagtgactccactattgtaacttcatggttggaaaatatgagggttgatatatgtcttacttgtttaaatctgtcgcagaatataccaaagctaaataataactatgctttcattttagccgatctccagaatgacagtattaacatcaaacattgtattgatttagaattctcaaaaaaggaaaaaaaagtacatagcacagactattttttttaaagacgtaagaatcagattaacaggatcatacttgtaaactttttttggttcacttggctatcaaatatgaaattatagaagtatcataggggtcattgtaacatcttttagagaaaatggctatcagtgtgaactgtcataattacgtggtaatagcacccttagtaaaacttgcaaaatgaaactaataaatcgttatcaataatgacaatgagggggaaagtattatacttgttgactgtgttttgttttttaaaatggtctccacaagcgctcaatttttttagaggggatattactatatagaatatcttttacaaggcttttataacattttatgctgaaaagcataagaatacgtatttctttagtagcaataattttggaacttgcccttgggcaagcgagactatttcttactatatactaaggagaaaagagccaaattcttaaagcaatatttaagaaaaaaggaatttataacaaattctcatctacatatgacactttctagccagttgtgttgagaagtgcaaagtgacggtttaaacatgtgttgggatttattgaactaattttaaaatttactattcaaactttattttgctctgatgcacattctctatgaaaaataaaagtgtgtcactggtgagtgacagctgttatgagctagaagcgcatgacttattgtgacgatgtcttgcctttctgtggtccaagttggagtacatggcaatgccctcctgctgatgtgcattaaggaaaatctaagtctaatatttggaattaagatatattttagggggaggggacagaagcaatgtaaaatagttgatttatgataaagctcagaatgtcctcttcatttattttcttgttttattttcctttctaaacagaaactgcatttaattccaaaaagtagtattcttatttattatttaaccctttgctgctgctaaaatgtgcacatattcaggctttagtttttccaaaaggcattttttttttggctgaaaaatattaaacatttgaccacagggaagaatcaagtttctaggatgtcataggtatactatgtagcactgaaaaaattgattttaggtgacagccaaaagtagtcttaaagtagcatgagaccttagataatcgacctaaaagaaagaaaattgtgaaaaagacaaaaatcttcatgcattcctataaaacgctactttaaggtctacttttggagttaattttgtttggtactttttttttttttaagacgagcaaattgttatatgcttttggcaattgatacaataaactgtaatggtctgtaaataaataaatattgactcatgcgatttatgtaaatagtggaactgggagagtggatggctcagggtttcggtgtgggcattgtctcttgggcagtagagtgagtcatccccagctcatgggtttgcatccagttcttgtcttaagagacccaaagcccagtgaatggcagccctgagccactgtggaatgggggttctggtttcacaaacagatgcttagatagccaaaccactgtcttgttggtgccaacacttgcactgtggtcaaagacttaccgagcatgggctgaacaaccttcccatctgtcatgtgaatgtccccaagcagtggtgaaggacatgctaggtcagtgttggggaacctgccctgccaggtcctgttttgtagataaacaaatggctgccttctggtgtttttattctatttcatctcattaacactacaaccttgtgttatttacttgataatctgtaattgtatgtaaatacatacaggattatgtaatttgtgtaaatacataattacagagttttgaaaactgaaaaaaaaaaaaaaa

SEQ ID NO: 1609 - DNA, 1103 bp, Homo Sapiens
  NM_002012
gaattgcagtccccgctctgctctgtccggtcacaggactttttgccctctgttcccgggtccctcaggcggccacccagtgggcacactcccaggcggcgctccggccccgcgctccctccctctgcctttcattcccagctgtcaacatcctggaagctttgaagctcaggaaagaagagaaatccactgagaacagtctgtaaaggtccgtagtgctatctacatccagacggtggaagggagagaaagagaaagaaggtatcctaggaatacctgcctgcttagaccctctataaaagctctgtgcatcctgccactgaggactccgaagaggtagcagtcttctgaaagacttcaactgtgaggacatgtcgttcagatttggccaacatctcatcaagccctctgtagtgtttctcaaaacagaactgtccttcgctcttgtgaataggaaacctgtggtaccaggacatgtccttgtgtgcccgctgcggccagtggagcgcttccatgacctgcgtcctgatgaagtggccgatttgtttcagacgacccagagagtcgggacagtggtggaaaaacatttccatgggacctctctcaccttttccatgcaggatggccccgaagccggacagactgtgaagcacgttcacgtccatgttcttcccaggaaggctggagactttcacaggaatgacagcatctatgaggagctccagaaacatgacaaggaggactttcctgcctcttggagatcagaggaggaaatggcagcagaagccgcagctctgcgggtctactttcagtgacacagatgtttttcagatcctgaattccagcaaaagagctattgccaaccagtttgaagaccgccccccgcctctccccaagaggaactgaatcagcatgaaaatgcagtttcttcatctcaccatcctgtattcttcaaccagtgatcccccacctcggtcactccaactcccttaaaatacctagacctaaacggctcagacaggcagatttgaggtttccccctgtctccttattcggcagccttatgattaaacttccttctctgctgcaaaaaaaaaaaaaaa

SEQ ID NO: 1610 - DNA, 5738 bp, Homo Sapiens
  NM_002015
gcagccgccacattcaacaggcagcagcgcagcgggcgcgccgctggggagagcaagcggcccgcggcgtccgtccgtccttccgtccgcggccctgtcagctggagcgcggcgcaggctctgccccggcccggcggctctggccggccgtccagtccgtgcggcggaccccgaggagcctcgatgtggatggccccgcgaagttaagttctgggctcgcgcttccactccgccgcgccttcctcccagtttccgtccgctcgccgcaccggcttcgttcccccaaatctcggaccgtcccttcgcgccccctccccgtccgcccccagtgctgcgttctccccctcttggctctcctgcggctgggggaggggcgggggtcaccatggccgaggcgcctcaggtggtggagatcgacccggacttcgagccgctgccccggccgcgctcgtgcacctggccgctgcccaggccggagtttagccagtccaactcggccacctccagcccggcgccgtcgggcagcgcggctgccaaccccgacgccgcggcgggcctgccctcggcctcggctgccgctgtcagcgccgacttcatgagcaacctgagcttgctggaggagagcgaggacttcccgcaggcgcccggctccgtggcggcggcggtggcggcggcggccgccgcggccgccaccggggggctgtgcggggacttccagggcccggaggcgggctgcctgcacccagcgccaccgcagcccccgccgcccgggccgctgtcgcagcacccgccggtgccccccgccgccgctgggccgctcgcggggcagccgcgcaagagcagctcgtcccgccgcaacgcgtggggcaacctgtcctacgccgacctcatcaccaaggccatcgagagctcggcggagaagcggctcacgctgtcgcagatctacgagtggatggtcaagagcgtgccctacttcaaggataagggtgacagcaacagctcggcgggctggaagaattcaattcgtcataatctgtccctacacagcaagttcattcgtgtgcagaatgaaggaactggaaaaagttcttggtggatgctcaatccagagggtggcaagagcgggaaatctcctaggagaagagctgcatccatggacaacaacagtaaatttgctaagagccgaagccgagctgccaagaagaaagcatctctccagtctggccaggagggtgctggggacagccctggatcacagttttccaaatggcctgcaagccctggctctcacagcaatgatgactttgataactggagtacatttcgccctcgaactagctcaaatgctagtactattagtgggagactctcacccattatgaccgaacaggatgatcttggagaaggggatgtgcattctatggtgtacccgccatctgccgcaaagatggcctctactttacccagtctgtctgagataagcaatcccgaaaacatggaaaatcttttggataatctcaaccttctctcatcaccaacatcattaactgtttcgacccagtcctcacctggcaccatgatgcagcagacgccgtgctactcgtttgcgccaccaaacaccagtttgaattcacccagcccaaactaccaaaaatatacatatggccaatccagcatgagccctttgccccagatgcctatacaaacacttcaggacaataagtcgagttatggaggtatgagtcagtataactgtgcgcctggactcttgaaggagttgctgacttctgactctcctccccataatgacattatgacaccagttgatcctggggtagcccagcccaacagccgggttctgggccagaacgtcatgatgggccctaattcggtcatgtcaacctatggcagccaggcatctcataacaaaatgatgaatcccagctcccatacccaccctggacatgctcagcagacatctgcagttaacgggcgtcccctgccccacacggtaagcaccatgccccacacctcgggtatgaaccgcctgacccaagtgaagacacctgtacaagtgcctctgccccaccccatgcagatgagtgccctggggggctactcctccgtgagcagctgcaatggctatggcagaatgggccttctccaccaggagaagctcccaagtgacttggatggcatgttcattgagcgcttagactgtgacatggaatccatcattcggaatgacctcatggatggagatacattggattttaactttgacaatgtgttgcccaaccaaagcttcccacacagtgtcaagacaacgacacatagctgggtgtcaggctgagggttagtgagcaggttacacttaaaagtacttcagattgtctgacagcaggaactgagagaagcagtccaaagatgtctttcaccaactcccttttagttttcttggttaaaaaaaaaaacaaaaaaaaaaaccctccttttttcctttcgtcagacttggcagcaaagacatttttcctgtacaggatgtttgcccaatgtgtgcaggttatgtgctgctgtagataaggactgtgccattggaaatttcattacaatgaagtgccaaactcactacaccatataattgcagaaaagattttcagatcctggtgtgctttcaagttttgtatataagcagtagatacagattgtatttgtgtgtgtttttggtttttctaaatatccaattggtccaaggaaagtttatactctttttgtaatactgtgatgggcctcatgtcttgataagttaaacttttgtttgtactacctgttttctgcggaactgacggatcacaaagaactgaatctccattctgcatctccattgaacagccttggacctgttcacgttgccacagaattcacatgagaaccaagtagcctgttatcaatctgctaaattaatggacttgttaaacttttggaaaaaaaaagattaaatgccagctttgtacaggtcttttctatttttttttgtttattttgttatttgcaaatttgtacaaacatttaaatggttctaatttccagataaatgatttttgatgttattgttgggacttaagaacatttttggaatagatattgaactgtaataatgttttcttaaaactagagtctactttgttacatagtcagcttgtaaattttgtggaaccacaggtatttggggcagcattcataattttcattttgtattctaactggattagtactaattttatacatgcttaactggtttgtacactttgggatgctacttagtgatgtttctgactaatcttaaatcattgtaattagtacttgcatattcaacgtttcaggccctggttgggcaggaaagtgatgtatagttatggacactttgcgtttcttatttaggataacttaatatgtttttatgtatgtattttaaagaaatttcatctgcttctactgaactatgcgtactgcatagcatcaagtcttctctagagacctctgtagtcctgggaggcctcataatgtttgtagatcagaaaagggagatctgcatctaaagcaatggtcctttgtcaaacgagggattttgatccacttcaccattttgagttgagctttagcaaaagtttcccctcataattctttgctcttgtttcagtccaggtggaggttggttttgtagttctgccttgaggaattatgtcaacactcatacttcatctcattctcccttctgccctgcagattagattacttagcacactgtggaagtttaagtggaaggagggaatttaaaaatgggacttgagtggtttgtagaatttgtgttcataagttcagatgggtagcaaatggaatagaacttacttaaaaattggggagatttatttgaaaaccagctgtaagttgtgcattgagattatgttaaaagccttggcttaagaatttgaaaatttctttagcctgtagcaacctaaactgtaattcctatcattatgttttattactttccaattacctgtaactgacagaccaaattaattggctttgtgtcctatttagtccatcagtattttcaagtcatgtggaaagcccaaagtcatcacaatgaagagaacaggtgcacagcactgttcctcttgtgttcttgagaaggatctaatttttctgtatatagcccacatcacacttgctttgtcttgtatgttaattgcatcttcattggcttggtatttcctaaatgtttaacaagaacacaagtgttcctgataagatttcctacagtaagccagctctattgtaagcttcccactgtgatgatcatttttttgaagattcattgaacagccaccactctatcatcctcattttggggcagtccaagacatagctggttttagaaacccaagttcctctaagcacagcctcccgggtatgtaactgaacttggtgccaaagtacttgtgtactaatttctattactacgtactgtcactttcctcccgtgccattactgcatcataatacaaggaacctcagagcccccatttgttcattaaagaggcaactacagccaaaatcactgttaaaatcttactacttcatggagtagctcttaggaaaatatatcttcctcctgagtctgggtaattatacctctcccaagcccccattgtgtgttgaaatcctgtcatgaatccttggtagctctctgagaacagtgaagtccagggaaaggcatctggtctgtctggaaagcaaacattatgtggcctctggtagtttttttcctgtaagaatactgactttctggagtaatgagtatatatcagttattgtacatgattgctttgtgaaatgtgcaaatgatatcacctatgcagccttgtttgatttattttctctggtttgtactgttattaaaagcatattgtattatagagctattcagatattttaaatataaagatgtattgtttccgtaatatagacgtatggaatatatttaggtaatagatgtattacttggaaagttctgctttgacaaactgacaaagtctaaatgagcacatgtatcccagtgagcagtaaatcaatggaacatcccaagaagaggataaggatgcttaaaatggaaatcattctccaacgatatacaaattggacttgttcaactgctggatatatgctaccaataaccccagccccaacttaaaattcttacattcaagctcctaagagttcttaatttataactaattttaaaagagaagtttcttttctggttttagtttgggaataatcattcattaaaaaaaatgtattgtggtttatgcgaacagaccaacctggcattacagttggcctctccttgaggtgggcacagcctggcagtgtggccaggggtggccatgtaagtcccatcaggacgtagtcatgcctcctgcatttcgctacccgagtttagtaacagtgcagattccacgttcttgttccgatactctgagaagtgcctgatgttgatgtacttacagacacaagaacaatctttgctataattgtataaagccataaatgtacataaattatgtttaaatggcttggtgtctttcttttctaattatgcagaataagctctttattaggaattttttgtgaagctattaaatacttgagttaagtcttgtcagccacaa

SEQ ID NO: 1611 - DNA, 2148 bp, Homo Sapiens
  NM_002022
aagacaaacactttccttgactttgagaaataatttaagtcaaagaatctgctctatgctaaccaagagatagagcacagcaaagatctgccagccccaggcctctacctagtggcctggaaattcaagtattcttattggtggaggccatttgtttctgattagaagctgtctaaacctcctactcctcaactcaaaggaaaacacagagcataccatggccaagaaagttgcagtgattggagctggtgtgagtggcctctcctccatcaaatgctgtgtggatgaggacctggagcccacctgctttgagagaagtgatgacattgggggattatggaagtttactgaatcttccaaagatgggatgaccagggtctataagtcattagtgacaaatgtctgtaaggaaatgtcatgttacagtgacttccctttccacgaagattatcctaatttcatgaaccatgaaaaattttgggactatctccaagaatttgctgagcactttgacctcctgaaatacattcagtttaagaccactgtgtgcagcataacgaagcgtccagacttctccgaaactggtcagtgggatgttgtcacagagacagagggcaagcaaaatagagctgtctttgatgctgttatggtttgcactggacatttcctgaatccccatttacctttggaagcctttcctggaattcataagtttaaaggtcagatcctgcatagtcaagagtacaagatcccagaaggctttcagggcaaacgcgtcttggtgattggtcttgggaacactggaggagacattgctgtggaactcagtcgaacggcagctcaggtacttctcagtactagaactggtacctgggttcttgggcgctcttcagattggggctatccttataatatgatggttacaagaagatgctgtagttttattgcacaagttctgccttcacgttttctaaactggattcaagaaaggaagttgaataagagatttaatcatgaggattatggattaagtattaccaaagggaaaaaagcaaaattcattgtgaatgatgagctgccaaactgtatcctctgtggggcaatcactatgaaaaccagcgtgattgaatttacagaaacctctgctgtctttgaagatgggacagtggaagaaaacattgatgttgtgatcttcactacaggatatacattttcttttccattttttgaagaacctcttaaaagcctctgtacaaagaagatatttctatacaagcaagtctttcccttaaacctagagagagcgacattagccatcatcggccttatcggccttaaaggatccatcttatcaggcacagagctccaagcacgatgggtcacaagagtattcaaaggactctgtaagatacctccatcccaaaaattgatgatggaggctactgaaaaggaacagctcattaaaaggggagtgtttaaagacaccagcaaagacaaatttgactacattgcctacatggatgatatcgctgcctgcataggcacaaagcccagcatcccacttctgttcctcaaggatcccagactagcttgggaagttttctttggaccatgtactccttatcagtaccgcctcatgggccctggaaaatgggatggagccagaaatgccatcctgacccagtgggacagaacattgaaacctttaaaaactcgaattgtccctgattcctccaagcctgcctccatgtcacattatttaaaagcctggggggcacctgtcctacttgcctctcttctacttatctgtaaatcttcacttttcttgaaattggtgagagataaactacaggacagaatgtccccttacctagtaagtctttggcgaggatgaacctgattgttacaagggttacaccaagtcatgctaattctatctccaagtatcttgtgcatccctcctctgctctccatcataactgctattagccaaattcaggcccagtcatctcctatctgaattattgtattatcttcttctttgttttcagtaccctctttcttgccaccctttccaatgcatcttctaccctgctacctcagtgattattctaaaataaatatatatgatatggtttaaaaaaaaaa

SEQ ID NO: 1612 - DNA, 2836 bp, Homo Sapiens
  NM_002028
atctcagtaactcactcgaaagacgggtaggcgggaggagacattcgcgttcaaaatctttttgcctctatccgctcgccgtagcgctttagcccgctcgagtttcaatgcgcgttgttgcttaacgaagcagagtcctacacactgtctgctgctctcctgatcatggcttctccgagttctttcacctactattgccctccatcttcctcccccgtctggtcagagccgctgtacagtctgaggcccgagcacgcgcgagagcggttgcaggacgactcggtggaaacagtcacgtccatagaacaggcaaaagtagaagaaaagatccaagaggtcttcagttcttacaagttcaaccaccttgtaccaaggcttgttttgcagagggagaagcacttccattatctgaaaagaggccttcgacaactgacagatgcctatgagtgtctggatgccagccgcccatggctctgctattggatcctgcacagcttggaactgctagatgaacccatcccccagatagtggctacagatgtgtgtcagttcctggagctgtgtcagagcccagaaggtggctttggaggaggacccggtcagtatccacaccttgcacccacatatgcagcagtcaatgcattgtgcatcattggcaccgaggaggcctatgacatcattaacagagagaagcttcttcagtatttgtactccctgaagcaacctgacggctcctttctcatgcatgtcggaggtgaggtggatgtgagaagcgcatactgtgctgcctccgtagcctcgctgaccaacatcatcactccagacctctttgagggcactgctgaatggatagcaaggtgtcagaactgggaaggtggcattggcggggtaccagggatggaagcccatggtggctataccttctgtggcctggccgcgctggtaatcctcaagagggaacgttccttgaacttgaagagcttattacaatgggtgacaagccggcagatgcgatttgaaggaggatttcagggccgctgcaacaagctggtggatggctgctactccttctggcaggcggggctcctgcccctgctccaccgcgcactgcacgcccaaggtgaccctgcccttagcatgagccactggatgttccatcagcaggccctgcaggagtacatcctgatgtgctgccagtgccctgcgggggggcttctggataaacctggcaagtcgcgtgatttctaccacacctgctactgcctgagcggcctgtccatagcccagcacttcggcagcggagccatgttgcatgatgtggtcctgggtgtgcccgaaaacgctctgcagcccactcacccagtgtacaacattggaccagacaaggtgatccaggccactacatactttctacagaagccagtcccaggttttgaggagcttaaggatgagacatcggcagagcctgcaaccgactagaggacctgggtcccggcagctctttgctcacccatctccccagtcagacaaggtttatacgtttcaatacatactgcattctgtgctacacaagccttagcctcagtggagctgtggttctcttggtactttcttgtcaaacaaaaccaatggctctgggtttggagaacacagtggctggttttaaaaattctttccacacctgtcaaaccaaaaatctatcagcccacgtggtgtggttggtgaacagtgcatgccaggaggaagcagtccctcctcaccagctctccagccaggacgatcacacagagatgaatggcatctgagtattacggcatccagagccactgctgactcccacttgcacgccaccattcagtcaccagactgggtgccctccgatgggtggaataagtctgcttcatgccaaggctgggctttgggtcccaccaagatgagttctctgtaagactgtggtggagttgcaccaggaggtgcctctgcctctcgacttgcaccctggtcatttgtaagggaaaagagctggaggtggggagagaaagatctccttcagttgggagtccttccacttcaacactggagaactgagccttgcatctctccagggtccaaggccacgcttggtgcacaggcaagacttgcttcagccccaggtgtggtgacttagacctaggaaaccaattatgagtggaaagtgaccctctagttcaactgtgccagaggaaacagccctccagtgcccacctgcctcactcctccctatcatgtaccgtgaaaaccccctctgatggcctcaaggcagtgcctgcaggccgaggcccttctgggggtttctatctttcttccaccagactccaagcccactctcctccaagactgtgttgtcttttctcaccaagagtattaacactactaagtctttcaccttaacttatgactcaggatttattcacgtcctgcccactctaggctcacaggaataaaatcaagtgctagacacactggctgctactaaggcactagcctctgtagctggtggtggcagcgtggggtgccgcccagcgtgctgggtcctggcagtgcctctgctgtgctgcacattgagccctttctcagtcagtggagtatcaagttgggccatctgtctactgacctggccttcatgtaagcagctgtgggctgcgggcagacaggagctcagagatgcagcatgaggcgcttagaaaaacctggccatttgctgcctctaattcccttttgctttgccatattgggctatgtattacctccttgaaataataaaagaataacattttctaaaaaaaaaaaaaaaaaa

SEQ ID NO: 1613 - DNA, 1334 bp, Homo Sapiens
  NM_002029
aatcattagagcctgagtcactctccccaggagacccagacctagaactacccagagcaagaccacagctggtgaacagtccaggagcagacaagatggagacaaattcctctctccccacgaacatctctggagggacacctgctgtatctgctggctatctcttcctggatatcatcacttatctggtatttgcagtcacctttgtcctcggggtcctgggcaacgggcttgtgatctgggtggctggattccggatgacacacacagtcaccaccatcagttacctgaacctggccgtggctgacttctgtttcacctccactttgccattcttcatggtcaggaaggccatgggaggacattggcctttcggctggttcctgtgcaaattcgtctttaccatagtggacatcaacttgttcggaagtgtcttcctgatcgccctcattgctctggaccgctgtgtttgcgtcctgcatccagtctggacccagaaccaccgcaccgtgagcctggccaagaaggtgatcattgggccctgggtgatggctctgctcctcacattgccagttatcattcgtgtgactacagtacctggtaaaacggggacagtagcctgcacttttaacttttcgccctggaccaacgaccctaaagagaggataaatgtggccgttgccatgttgacggtgagaggcatcatccggttcatcattggcttcagcgcacccatgtccatcgttgctgtcagttatgggcttattgccaccaagatccacaagcaaggcttgattaagtccagtcgtcccttacgggtcctctcctttgtcgcagcagccttttttctctgctggtccccatatcaggtggtggcccttatagccacagtcagaatccgtgagttattgcaaggcatgtacaaagaaattggtattgcagtggatgtgacaagtgccctggccttcttcaacagctgcctcaaccccatgctctatgtcttcatgggccaggacttccgggagaggctgatccacgcccttcccgccagtctggagagggccctgaccgaggactcaacccaaaccagtgacacagctaccaattctactttaccttctgcagaggtggagttacaggcaaagtgaggagggagctgggggacactttcgagctcccagctccagcttcgtctcaccttgagttaggctgagccacaggcatttcctgcttattttaggattacccactcatcagaaaaaaaaaaaaaagcctttgtgtcccctgatttggggagaataaacagatatgagtttaaaaaaaaaaaaaaaaaa

SEQ ID NO: 1614 - DNA, 2517 bp, Homo Sapiens
  NM_002030
aaaacactcattttgttttatagcatgacaggctgtctgattccatctttataaccaaagccaattaagatcttaaaaccaaacatataacttcatctttttacaagtacttagagcctgagttgctccacaggaatccaggaactgggcacaggaaaaggatctaagctggtggtgtgggaagatggaaaccaacttctccattcctctgaatgaaactgaggaggtgctccctgagcctgctggccacaccgttctgtggatcttctcattgctagtccacggagtcacctttgtcttcggggtcctgggcaatgggcttgtgatctgggtggctggattccggatgacacgcacagtcaacaccatctgttacctgaacctggccctagctgacttctctttcagtgccatcctaccattccgaatggtctcagtcgccatgagagaaaaatggccttttggctcattcctatgtaagttagttcatgttatgatagacatcaacctgtttgtcagtgtctacctgatcaccatcattgctctggaccgctgtatttgtgtcctgcatccagcctgggcccagaaccatcgcaccatgagtctggccaagagggtgatgacgggactctggattttcaccatagtccttaccttaccaaatttcatcttctggactacaataagtactacgaatggggacacatactgtattttcaactttgcattctggggtgacactgctgtagagaggttgaacgtgttcattaccatggccaaggtctttctgatcctccacttcattattggcttcagcgtgcctatgtccatcatcacagtctgctatgggatcatcgctgccaaaattcacagaaaccacatgattaaatccagccgtcccttacgtgtcttcgctgctgtggtggcttctttcttcatctgttggttcccttatgaactaattggcattctaatggcagtctggctcaaagagatgttgttaaatggcaaatacaaaatcattcttgtcctgattaacccaacaagctccttggccttttttaacagctgcctcaacccaattctctacgtctttatgggtcgtaacttccaagaaagactgattcgctctttgcccactagtttggagagggccctgactgaggtccctgactcagcccagaccagcaacacagacaccacttctgcttcacctcctgaggagacggagttacaagcaatgtgaggtcggggatatttttgggctctgtctctttctaccctgcgttaagcggaaaaaaaaaattctgacagtgtttttcttcctctttcataccaccaccaccacaatcatcaacataaaggaagtctgtaccaaatctgtagggggtttttcccacaaccaagcaatagacaccagctgggtgtcctacaattaaattccaacactatctacctggagctactgtcagatcccacaggtttaagggctcattccccaagtctgctcctccagttgagacacaagtcacaaatccaggcttctgagacttcggaccaaccagcttcaatcagggttcccactaccccctctttgggggtagagtggctcatggaactcagagaaacatttatttcggcttgctggtttattataaaagcaaggtttattataaaagatactacaaaggatacagatgaagaggcacatagggcaaggtacggggttccacgccctccctgagtgcatcaccctctgggaacctccgtgtgttcacgtctcatgaagctctccaaatccagtcctcttgggtttttatggaagcttcatgatgtcagcattctttcctccagtgtataggatgggatcctctctggggagggtcttaagacccacaattagaaaggcaagggaagattagagtcctgctttggggtagatgaaaggaaaggagagagattctgtttcctgaggcttaatacacccaacattataacaaaggactgtagcaagggctatgggagttctgaagcagaaaccatgggctaaaaccaacatacatcttaataccagataccctaatcccagtcctaacttcatttaaccttggtcacattgagtcattccaggatgagtggctcaagtatttcctcagggaaaatacttctgtgccccctgatttgagggtaagaagtagataatgaggccactgtgggtgttattttttcatgtctggacctcagcctatatcctgagactaagtggaagtgggaaaagagtacaagagaagagacaaagtggggatatttgtaaggcttagatgagatagtgtttttttagaaaaaaactttatcttaccattaagtaaaatgtttgccataggctttctggggctttctctttttaaagtcagactgttgaaggtttcttctattcttatttgttaagagttttcttttattgtttaaatcatgaatgaatgttgaattttattaaatgcagtttctgtaaatatt

SEQ ID NO: 1615 - DNA, 6063 bp, Homo Sapiens
  NM_002033
aatccctccctccggcgggcgtcgctggcgggtggctaggcccaacggcaggaagccgacgctatcctccgttccgcggcgccgggtccgccttccgtctgttctagggcctgctcctgcgcggcagctgctttagaaggtctcgagcctcctgtaccttcccagggatgaaccgggccttccctctggaaggcgagggttcgggccacagtgagcgagggccagggcggtgggcgcgcgcagagggaaaccggatcagttgagagagaatcaagagtagcggatgaggcgcttgtggggcgcggcccggaagccctcgggcgcgggctgggagaaggagtgggcggaggcgccgcaggaggctcccggggcctggtcgggccggctgggccccgggcgcagtggaagaaagggacgggcggtgcccggttgggcgtcctggccagctcaccttgccctggcggctcgccccgcccggcacttgggaggagcagggcagggcccgcggcctttgcattctgggaccgcccccttccattcccgggccagcggcgagcggcagcgacggctggagccgcagctacagcatgagagccggtgccgctcctccacgcctgcggacgcgtggcgagcggaggcagcgctgcctgttcgcgccatgggggcaccgtggggctcgccgacggcggcggcgggcgggcggcgcgggtggcgccgaggccgggggctgccatggaccgtctgtgtgctggcggccgccggcttgacgtgtacggcgctgatcacctacgcttgctgggggcagctgccgccgctgccctgggcgtcgccaaccccgtcgcgaccggtgggcgtgctgctgtggtgggagcccttcggggggcgcgatagcgccccgaggccgccccctgactgccggctgcgcttcaacatcagcggctgccgcctgctcaccgaccgcgcgtcctacggagaggctcaggccgtgcttttccaccaccgcgacctcgtgaaggggccccccgactggcccccgccctggggcatccaggcgcacactgccgaggaggtggatctgcgcgtgttggactacgaggaggcagcggcggcggcagaagccctggcgacctccagccccaggcccccgggccagcgctgggtttggatgaacttcgagtcgccctcgcactccccggggctgcgaagcctggcaagtaacctcttcaactggacgctctcctaccgggcggactcggacgtctttgtgccttatggctacctctaccccagaagccaccccggcgacccgccctcaggcctggccccgccactgtccaggaaacaggggctggtggcatgggtggtgagccactgggacgagcgccaggcccgggtccgctactaccaccaactgagccaacatgtgaccgtggacgtgttcggccggggcgggccggggcagccggtgcccgaaattgggctcctgcacacagtggcccgctacaagttctacctggctttcgagaactcgcagcacctggattatatcaccgagaagctctggcgcaacgcgttgctcgctggggcggtgccggtggtgctgggcccagaccgtgccaactacgagcgctttgtgccccgcggcgccttcatccacgtggacgacttcccaagtgcctcctccctggcctcgtacctgcttttcctcgaccgcaaccccgcggtctatcgccgctacttccactggcgccggagctacgctgtccacatcacctccttctgggacgagccttggtgccgggtgtgccaggctgtacagagggctggggaccggcccaagagcatacggaacttggccagctggttcgagcggtgaagccgcgctcccctggaagcgacccaggggaggccaagttgtcagctttttgatcctctactgtgcatctccttgactgccgcatcatgggagtaagttcttcaaacacccatttttgctctatgggaaaaaaacgatttaccaattaatattactcagcacagagatgggggcccggtttccatattttttgcacagctagcaattgggctccctttgctgctgatgggcatcattgtttaggggtgaaggagggggttcttcctcaccttgtaaccagtgcagaaatgaaatagcttagcggcaagaagccgttgaggcggtttcctgaatttccccatctgccacaggccatatttgtggcccgtgcagcttccaaatctcatacacaactgttcccgattcacgtttttctggaccaaggtgaagcaaatttgtggttgtagaaggagccttgttggtggagagtggaaggactgtggctgcaggtgggactttgttgtttggattcctcacagccttggctcctgagaaaggtgaggagggcagtccaagaggggccgctgacttctttcacaagtactatctgttcccctgtcctgtgaatggaagcaaagtgctggattgtccttggaggaaacttaagatgaatacatgcgtgtacctcactttacataagaaatgtattcctgaaaagctgcatttaaatcaagtcccaaattcattgacttaggggagttcagtatttaatgaaaccctatggagaatttatccctttacaatgtgaatagtcatctcctaatttgtttcttctgtctttatgtttttctataacctggattttttaaatcatattaaaattacagatgtgaaaataaagcagaagcaacctttttccctcttcccagaaaaccagtctgtgtttacagacagaagagaaggaagccatagtgtcacttccacacaattatttatttcatgtctttactggacctgaaatttaaactgcaatgccagtcctgcaggagtgctggcattaccctctgcagaacagtgaaaggtattgcactacattatggaatcatgcaaaaggaaaaaaagtttcatgatatctgttgttggcagtttttgtttatctctgacagtttttagttaaatgtttagatcctcagaactacattagtgcctactattaacttactctgtctcttgttaaaggctaaatctgcgcttctccctggtgccagcaggttcccctcacagtcaatgcagtggtatagcatatcctcacatttctagtgcccttgagactgtgctatggaaccaatcttgaacatacatgcattgacttgacaagttactgagtaagcagcatattcagcaggtgccactacatgcctactctgccagacactgagcttggggccctagggaagatagagaattatacaaggcaaagtccttctctttagggctcttacaatctatcacttccaaaaagtaaatggtgactgataaaacaattggcagaacctgtttgattactgtgacagtcttaatgataccataaatcaatattagaaagctagttgacttaaagcctgaaataatgggagttttctcctccacttattagaataaggaccctcagtgactaattattgtgggtagggtcaagattaactagttttatacagagttctgctgtaaatagtcattttgcatttgattagtgcagttctctgaatcataaagcaagttttacctctctgtacatgtttttgcagacatacttgaaaagctcacttaaatctaggtgcttcaattcactttcttgagaggacaaatgaaaagctgtggagaaaatgtcctcattaaagtattaaagtgtgggcagaattacaattacaaagtgccagccaccgaataaagataaaagttcagttcttaaaatgagtttttatgagataacagtcagtgatcttggtgttaccgggattccacatggggcagtgggaaagagttcaggttttgaaggtaacctagtttagatttgaattccagctatgtgacattgggtaaattagtagtagtcctgagcctcagcgtcctcatctataaaatgactggcgaaaatacttcacaagctcattttgagcactttaggaagtaagtgaaagtacctaaaatagcaggcacccaattgatgattttatatcttccttctttgcttgcagtgatttcaggatgtcctcatatctatttataggtctaaaattatatcttaaggtatgttgtagaataaattaaaaggataatctaaatcaccatttagattaagcttgacttgcaaactaggaagaagcacctaggctttctttgaaaatatttttttggttcgttttggtaaagctctataaattggtatctattattttaccaatttttttttagtattaagtccatttagaactaaccatattatttatggaataattagcatgaggaaggtataattgcatttttttttttttgagacggagtcttgcactgtagccccagctggactgcagtggcgtgatcttggctcactgcaacctccgcctcccaggttcaagcgattctcctgcctcagcctcccgagcagctgagactacaggcgcctgccaccacgcctggccaattttttgtatttttagtagagactgcgtttcaccatgttgggcaggctggtcttgaactcctgaccttgtgatccacctgcctcggcctctcagagagctgggattacaggtgtgagccgccgtgcccagccattgcatttttattcacatacacattgttaatgtggaacaatttaacactaatctcatcagagagcgagatgaatgtggcaattgctcattttattttgcatatattaaattgagtaggttcagctctaacataccttaagaaaaatgcatatcggtgcactgtatgtatttcaaaatgcctttcctatgattgtcatgtcctcctttaaggcttttccctcaaatttattacaaatttagtatttttagtacttgatgactctaattacatgaatgcacctggaatgacatttgtaacagaagacggtctgacttgctttcagtattcacaagttctttccagtttccaagtcttttcctagcagtaatttaggggagacagaggagtttcatgtaaagagcatgcagtttggagtcagaacctgggtatgactctgtggccttgatgaagcaagttacttaaactcttgagttttagctttctcctttacaatgcatgaatgcctatccccctacaaaacaaagattaaatgtgatgatgtatgccaaggtgctttgtatattgtaaagtgctatataattataagatgttctaaattttcaaggatctaaaccagggattggcaaacgtttttccagggagtaaatattttacgctttgcatatataatttatggaggtgttgagaggatagattagacacttgaagtactcaggatagtgcctggcatgtaggaagcacctggaaaatattcgctgtgattaccatcagtccattttaccgaggaaggagccaaggtccaggcccactgaaggacttgcataacattacaatagcagtggcagaaccagccatgcttctgcaaatcacaacctctttgagcctctgtcacctgaactgcaaaatgagtgggttagacaaaatcatctgttgggacctcctagttccacgtgctatcattctactaactggcaccctaaggttgaaagtgcttatctgctttccaatgtggcttccttacagtctggaactgacaatatgcaggagcagtaaactggcagaaaaccaggaatcagagaaagaaaatataatttaactttaaagatgtaaattatatatatagtatattatatatatttttaaagctttatatgcctcaaatatcagggaaaggagccaagtccttggtatttagtttggtgaatacttgcattgaatacatgtcaagatgtcaagtcatttttgaatgtgtctcagggatttctatgctacacattcttttaacaaatcaagtatttatgtacacatgttcagattttttgacaaaatgattaaaataatgagatggaaaatgaaaaaaaaaaaaaaaa

SEQ ID NO: 1616 - DNA, 5198 bp, Homo Sapiens
  NM_002035
tcttcccctccgccgcggcccgccccggcccgcaaacccaaacactccaggcgcccgcccgccgcgcgtgattctcgcctcgccgcagcccagccctgcgcgccttgcccggcggcccccgcccggccgctccgggcccctggccccgcggagcgatgctgctgctggctgccgccttcctcgtggccttcgtgctgctgctgtacatggtgtctccgctcatcagccccaagcccctcgccctgcccggggcgcatgtggtggttacaggaggttccagtggcatcgggaagtgcattgctatcgagtgctataaacaaggagcttttataactctggttgcacgaaatgaggataagctgctgcaggcaaagaaagaaattgaaatgcactctattaatgacaaacaggtggtgctttgcatatcagttgatgtatctcaagactataaccaagtagagaatgtcataaaacaagcacaggagaaactgggtccagtggacatgctggtaaattgtgcaggaatggcagtgtcaggaaaatttgaagatcttgaagttagtacctttgaaaggttaatgagcatcaattacctgggcagcgtgtaccccagccgggccgtgatcaccaccatgaaggagcgccgggtgggcaggatcgtgtttgtgtcctcccaggcaggacagttgggattattcggtttcacagcctactctgcatccaagtttgccataaggggattggcagaagctttgcagatggaggtgaagccatataatgtctacatcacagttgcttacccaccagacacagacacacctggctttgccgaagaaaacagaacaaagcctttggagactcgacttatttcagagaccacatctgtgtgcaaaccagaacaggtggccaaacaaattgttaaagatgccatacaaggaaatttcaacagttcccttggctcagatgggtacatgctctcggccctgacctgtgggatggctccagtaacttctattactgaggggctccagcaggtggtcaccatgggccttttccgcactattgctttgttttaccttggaagttttgacagcatagttcgtcgctgcatgatgcagagagaaaaatctgaaaatgcagacaaaactgcctaatcttcttaccccttggaagaagactgtttccaaataatttgaacagcttgctgctaaatgggacccaatttttggcctatagacacttatgtattgttttcgaatacgtcagattggaccagtgctcttcaggaatgtggctgcaagcaaggggctagaagttcacctcctgacagtattattaatactatgcaaatatggaataggagaccatttgattttctaggctttgtggtagagaggtgaaggtatgagaattaatagcgtgtgaacaaagtaaagaacaggattccagaatgatcattaaatttgtttctatttattcttttttgcccccctagagattaagtccagaaatgtactttctggcacataaagaaatcttgaggactttgtttaaaccttccataaaaaaacaattttcggtttctcgggttctctctctctctctctctgtctctctgtctctctgtctctctgtctctctgtctctctgtctctctctctctctctctttctttctttgtgtattttattcaagatgagttggacccattgccagtgagtctgaatgtcactgacagccctgtgttgtgctcaggactcactctgctgctggtggaaactcatggcttctctctctctttgatcccataaagctacgagggggacgggagagggcagtgcaatgggaagtaaagagatattttccagtaggaaaagcaatgctttcttgtctttagactcaaatgcttagggaacgtttcatttctcattcatggggaaaggcagcctccttaaatgttttctgaagagcggtaaaatctagaagcttaagaatttacagttccttcaataaccatgatgacctgaagttcacctatcccattttagcatctacttgtttttcccatctcttcctttccaattttgcttatactgctgtaatatttttgtaaaaaaaaaaaaaaaggaaaaaaaagaccagctaaaattttcgacttgactttttaacttaactcatgaattaattaaagcaaatgaaaaaattaaaaagtgtgactttttctcggagcatatatgtagcttttaggaaaggctgatgatggtataaagtttgctcattaagaaaaaaagacaaggctgattttgaagagagttgcttttgaaataaaatgatcacctgttctttatgtgactctcccactgaacctgcagacattatttttataccacatgctaaggaagcccactcatctaactctgtagccctggaaaccctcttggcccctgaatgttgtttccaggttataggatctgtgttcattagtggattttgacagcaagtgcctctgatgagttttagccaacattccccgttgcatcctgctcattgttcacactcctctgacttgaggagagctgccttcaccttgatcttgtaacctgtcttccttgcatatacggtagcacattccagatcacttcggtgagaaaagacctctgtttttgaagaggaaactttcttaaattgtaaaataaaacttaaaaaacataaaaactctatacaaaaattgaagacctaaaaattatagcataccttttttttgctcttgagtttttgaagctcttgactttaaatgacttaactttttaaaaaataagatgttttatggctttaacccatgtttttattaagatctgagaatagcatattttaaacactgatagatacagaagaaattattatttaatatataaattgcttggaatgatttcattgcagcttgtaaggatgggttgatgccagaatggtttcataaatctttcagtcttacagagccaaagtttgcagattatatcgagttgcgttgtgcagctgctaaaatggaatcatagctttttataatttgcagaaaacaattgcattaatgtctggatgtttctcagttttattcttttctcataaatgttcctcgaatgttggcaccttctactgctgatctatattagaatctagtccaagaaagtgtctgatttaataacattaaatagttatttcaatatattttttcaaattatcctcatagaacctgttgcctccagtgagatggtaatctactacccgaataaatttaagagcacctgttgagagcccctgttttgcggtagaagacaattgtccctatcccaatttccactgaaatatgagagcagatttgcagagaccatcatgtcagagaagaaatttccttgtcagagatgttaaagggctacagtcccttagcaaagaaacttcgaaatctaagttggtttgtgtttttctaaatttgataccgtaattcatttggcagcaaaatctgacttgaactgatgtgagagtattgtactttatatttatgctacttcattgtgacttaattttccctgaagaaatatccatggatttgattataggttttcccttagatgctgtggaggtgttttgtaatattcaaaatatgcccatattgcctttttaaaaccccaaagattatgaattctgaaacacatccagcccagcgggttttggataaggggttgtaggcatttaagcagcctcacataatgggctgacttcatccaaaacatgaaaatattacaaggcaaattctattttttatattttttggttcaatgcttgaacaacttgtttttctgctgggggaagaaaaaaagaaccaaccctgagtgtgattgttacggaaactaatgactttgtttttaaaggatcacattgattcaacaccttctattggacccagaagtgcgtaaatattacctatggtagtaaacgtttaattatcattcagtttaaatgttggccttctgtatgtagccaagaacagctcattttgtgaatttcagtttttaagtggctgctttttgatttggttgtattattttattataatgtatttgcaagtatattaaaaaattaacattgagccataaaaatccccaaatatgttcaaggacttcataattgaaaaatatatagaaaacaatccttacttctttttacaaaaacaaaatcatgggaattattcttttctatatatttagttataaatctttctctgggccgggcgtggtggctcacgccagtaatcccagcactttgggaggctgagacaggcgaatcacgaggtcaggagttcgagaccagcctggccaacatggtgaaaccccgtctctactgaaaatacaaaaaattagctggacacggtggcaggcgcctgtgtgtggcgggcgccagctactcaggaggctgaggcaggagaatcgcttgaacccaggaggcagaggttgcagtgagccaagattgcgccactgcactccagcctaggtgacagtgcgagactctgtctcaaaaaaaaaaaaaaagaaaaaaaatctttatctggatctgttaaaccatatattattgatcattgcaagtgaaattttgagagattgtttctagtatttaggtgatgaaaacatttggtaatattgctttggttcaaagaattttatgtctttatctttctagaagaaagcaattatatatatatttttgctaaattacataaacatttaattacatcaggttctaatttaaacatgtattactcacttgaggccacttttaaatattcatactctttgacataagatgctttgtatatttctcatttcttttagttcttagtaagtcagctttaaaaagtacctgccaaccagaaccttccatattctggactaaatcttgctcttcggattatacttcagtgcagtaactgtggatttgcaattttgaaggggagatagtagctattatattttacacttgcttgatgtgataactctaaagactttttaactgataaaagcgcacatggctattttgatacacaaagttgtgtttgctactttagaagcttttgtggcagaattgtaatctaattttcataccttgtatttctgaatcacaacaaaaaaataaatggggaacaagactta

SEQ ID NO: 1617 - DNA, 2650 bp, Homo Sapiens
  NM_002037
gccgcgctggtggcggcggcgcgtcgttgcagttgcgccatctgtcaggagcggagccggcgaggagggggctgccgcgggcgaggaggaggggtcgccgcgagccgaaggccttcgagacccgcccgccgcccggcggcgagagtagaggcgaggttgttgtgcgagcggcgcgtcctctcccgcccgggcgcgccgcgcttctcccagcgcaccgaggaccgcccgggcgcacacaaagccgccgcccgcgccgcaccgcccggcggccgccgcccgcgccagggagggattcggccgccgggccggggacaccccggcgccgccccctcggtgctctcggaaggcccaccggctcccgggcccgccggggaccccccggagccgcctcggccgcgccggaggagggcggggagaggaccatgtgagtgggctccggagcctcagcgccgcgcagtttttttgaagaagcaggatgctgatctaaacgtggaaaaagaccagtcctgcctctgttgtagaagacatgtggtgtatataaagtttgtgatcgttggcggacattttggaatttagataatgggctgtgtgcaatgtaaggataaagaagcaacaaaactgacggaggagagggacggcagcctgaaccagagctctgggtaccgctatggcacagaccccacccctcagcactaccccagcttcggtgtgacctccatccccaactacaacaacttccacgcagccgggggccaaggactcaccgtctttggaggtgtgaactcttcgtctcatacggggaccttgcgtacgagaggaggaacaggagtgacactctttgtggccctttatgactatgaagcacggacagaagatgacctgagttttcacaaaggagaaaaatttcaaatattgaacagctcggaaggagattggtgggaagcccgctccttgacaactggagagacaggttacattcccagcaattatgtggctccagttgactctatccaggcagaagagtggtactttggaaaacttggccgaaaagatgctgagcgacagctattgtcctttggaaacccaagaggtacctttcttatccgcgagagtgaaaccaccaaaggtgcctattcactttctatccgtgattgggatgatatgaaaggagaccatgtcaaacattataaaattcgcaaacttgacaatggtggatactacattaccacccgggcccagtttgaaacacttcagcagcttgtacaacattactcagagagagctgcaggtctctgctgccgcctagtagttccctgtcacaaagggatgccaaggcttaccgatctgtctgtcaaaaccaaagatgtctgggaaatccctcgagaatccctgcagttgatcaagagactgggaaatgggcagtttggggaagtatggatgggtacctggaatggaaacacaaaagtagccataaagactcttaaaccaggcacaatgtcccccgaatcattccttgaggaagcgcagatcatgaagaagctgaagcacgacaagctggtccagctctatgcagtggtgtctgaggagcccatctacatcgtcaccgagtatatgaacaaaggaagtttactggatttcttaaaagatggagaaggaagagctctgaaattaccaaatcttgtggacatggcagcacaggtggctgcaggaatggcttacatcgagcgcatgaattatatccatagagatctgcgatcagcaaacattctagtggggaatggactcatatgcaagattgctgacttcggattggcccgattgatagaagacaatgagtacacagcaagacaaggtgcaaagttccccatcaagtggacggcccccgaggcagccctgtacgggaggttcacaatcaagtctgacgtgtggtcttttggaatcttactcacagagctggtcaccaaaggaagagtgccatacccaggcatgaacaaccgggaggtgctggagcaggtggagcgaggctacaggatgccctgcccgcaggactgccccatctctctgcatgagctcatgatccactgctggaaaaaggaccctgaagaacgccccacttttgagtacttgcagagcttcctggaagactactttaccgcgacagagccccagtaccaacctggtgaaaacctgtaaggcccgggtctgcggagagaggccttgtcccagaggctgccccacccctccccattagctttcaattccgtagccagctgctccccagcagcggaaccgcccaggatcagattgcatgtgactctgaagctgacgaacttccatggccctcattaatgacacttgtccccaaatccgaacctcctctgtgaagcattcgagacagaaccttgttatttctcagactttggaaaatgcattgtatcgatgttatgtaaaaggccaaacctctgttcagtgtaaatagttactccagtgccaacaatcctagtgctttccttttttaaaaatgcaaatcctatgtgattttaactctgtcttcacctgattcaactaaaaaaaaaaaagtattattttccaaaagtggcctctttgtctaaaacaataaaattttttttcatgttttaacaaaaaccaa

SEQ ID NO: 1618 - DNA, 1310 bp, Homo Sapiens
  NM_002046
aaattgagcccgcagcctcccgcttcgctctctgctcctcctgttcgacagtcagccgcatcttcttttgcgtcgccagccgagccacatcgctcagacaccatggggaaggtgaaggtcggagtcaacggatttggtcgtattgggcgcctggtcaccagggctgcttttaactctggtaaagtggatattgttgccatcaatgaccccttcattgacctcaactacatggtttacatgttccaatatgattccacccatggcaaattccatggcaccgtcaaggctgagaacgggaagcttgtcatcaatggaaatcccatcaccatcttccaggagcgagatccctccaaaatcaagtggggcgatgctggcgctgagtacgtcgtggagtccactggcgtcttcaccaccatggagaaggctggggctcatttgcaggggggagccaaaagggtcatcatctctgccccctctgctgatgcccccatgttcgtcatgggtgtgaaccatgagaagtatgacaacagcctcaagatcatcagcaatgcctcctgcaccaccaactgcttagcacccctggccaaggtcatccatgacaactttggtatcgtggaaggactcatgaccacagtccatgccatcactgccacccagaagactgtggatggcccctccgggaaactgtggcgtgatggccgcggggctctccagaacatcatccctgcctctactggcgctgccaaggctgtgggcaaggtcatccctgagctgaacgggaagctcactggcatggccttccgtgtccccactgccaacgtgtcagtggtggacctgacctgccgtctagaaaaacctgccaaatatgatgacatcaagaaggtggtgaagcaggcgtcggagggccccctcaagggcatcctgggctacactgagcaccaggtggtctcctctgacttcaacagcgacacccactcctccacctttgacgctggggctggcattgccctcaacgaccactttgtcaagctcatttcctggtatgacaacgaatttggctacagcaacagggtggtggacctcatggcccacatggcctccaaggagtaagacccctggaccaccagccccagcaagagcacaagaggaagagagagaccctcactgctggggagtccctgccacactcagtcccccaccacactgaatctcccctcctcacagttgccatgtagaccccttgaagaggggaggggcctagggagccgcaccttgtcatgtaccatcaataaagtaccctgtgctcaacc

SEQ ID NO: 1619 - DNA, 1501 bp, Homo Sapiens
  NM_002049
gacaccccctgggatcacactgagcttgccacatccccaaggcggccgaaccctccgcaaccaccagcccaggttaatccccagaggctccatggagttccctggcctggggtccctggggacctcagagcccctcccccagtttgtggatcctgctctggtgtcctccacaccagaatcaggggttttcttcccctctgggcctgagggcttggatgcagcagcttcctccactgccccgagcacagccaccgctgcagctgcggcactggcctactacagggacgctgaggcctacagacactccccagtctttcaggtgtacccattgctcaactgtatggaggggatcccagggggctcaccatatgccggctgggcctacggcaagacggggctctaccctgcctcaactgtgtgtcccacccgcgaggactctcctccccaggccgtggaagatctggatggaaaaggcagcaccagcttcctggagactttgaagacagagcggctgagcccagacctcctgaccctgggacctgcactgccttcatcactccctgtccccaatagtgcttatgggggccctgacttttccagtaccttcttttctcccaccgggagccccctcaattcagcagcctattcctctcccaagcttcgtggaactctccccctgcctccctgtgaggccagggagtgtgtgaactgcggagcaacagccactccactgtggcggagggacaggacaggccactacctatgcaacgcctgcggcctctatcacaagatgaatgggcagaacaggcccctcatccggcccaagaagcgcctgattgtcagtaaacgggcaggtactcagtgcaccaactgccagacgaccaccacgacactgtggcggagaaatgccagtggggatcccgtgtgcaatgcctgcggcctctactacaagctacaccaggtgaaccggccactgaccatgcggaaggatggtattcagactcgaaaccgcaaggcatctggaaaagggaaaaagaaacggggctccagtctgggaggcacaggagcagccgaaggaccagctggtggctttatggtggtggctgggggcagcggtagcgggaattgtggggaggtggcttcaggcctgacactgggccccccaggtactgcccatctctaccaaggcctgggccctgtggtgctgtcagggcctgttagccacctcatgcctttccctggacccctactgggctcacccacgggctccttccccacaggccccatgccccccaccaccagcactactgtggtggctccgctcagctcatgagggcacagagcatggcctccagaggaggggtggtgtccttctcctcttgtagccagaattctggacaacccaagtctctgggccccaggcaccccctggcttgaaccttcaaagcttttgtaaaataaaaccaccaaagtcctgaaaaaaaaaaaaaaaaaaaaaaaa

SEQ ID NO: 1620 - DNA, 3067 bp, Homo Sapiens
  NM_002051
ggcgccgtcttgatactttcagaaagaatgcattccctgtaaaaaaaaaaaaaaaatactgagagagggagagagagagagaagaagagagagagacggagggagagcgagacagagcgagcaacgcaatctgaccgagcaggtcgtacgccgccgcctcctcctcctctctgctcttcgctacccaggtgacccgaggagggactccgcctccgagcggctgaggaccccggtgcagaggagcctggctcgcagaattgcagagtcgtcgcccctttttacaacctggtcccgttttattctgccgtacccagtttttggatttttgtcttccccttcttctctttgctaaacgacccctccaagataatttttaaaaaaccttctcctttgctcacctttgcttcccagccttcccatccccccaccgaaagcaaatcattcaacgacccccgaccctccgacggcaggagccccccgacctcccaggcggaccgccctccctccccgcgcgcgggttccgggcccggcgagagggcgcgagcacagccgaggccatggaggtgacggcggaccagccgcgctgggtgagccaccaccaccccgccgtgctcaacgggcagcacccggacacgcaccacccgggcctcagccactcctacatggacgcggcgcagtacccgctgccggaggaggtggatgtgctttttaacatcgacggtcaaggcaaccacgtcccgccctactacggaaactcggtcagggccacggtgcagaggtaccctccgacccaccacgggagccaggtgtgccgcccgcctctgcttcatggatccctaccctggctggacggcggcaaagccctgggcagccaccacaccgcctccccctggaatctcagccccttctccaagacgtccatccaccacggctccccggggcccctctccgtctaccccccggcctcgtcctcctccttgtcggggggccacgccagcccgcacctcttcaccttcccgcccaccccgccgaaggacgtctccccggacccatcgctgtccaccccaggctcggccggctcggcccggcaggacgagaaagagtgcctcaagtaccaggtgcccctgcccgacagcatgaagctggagtcgtcccactcccgtggcagcatgaccgccctgggtggagcctcctcgtcgacccaccaccccatcaccacctacccgccctacgtgcccgagtacagctccggactcttcccccccagcagcctgctgggcggctcccccaccggcttcggatgcaagtccaggcccaaggcccggtccagcacaggcagggagtgtgtgaactgtggggcaacctcgaccccactgtggcggcgagatggcacgggacactacctgtgcaacgcctgcgggctctatcacaaaatgaacggacagaaccggcccctcattaagcccaagcgaaggctgtctgcagccaggagagcagggacgtcctgtgcgaactgtcagaccaccacaaccacactctggaggaggaatgccaatggggaccctgtctgcaatgcctgtgggctctactacaagcttcacaatattaacagacccctgactatgaagaaggaaggcatccagaccagaaaccgaaaaatgtctagcaaatccaaaaagtgcaaaaaagtgcatgactcactggaggacttccccaagaacagctcgtttaacccggccgccctctccagacacatgtcctccctgagccacatctcgcccttcagccactccagccacatgctgaccacgcccacgccgatgcacccgccatccagcctgtcctttggaccacaccacccctccagcatggtcaccgccatgggttagagccctgctcgatgctcacagggcccccagcgagagtccctgcagtccctttcgacttgcatttttgcaggagcagtatcatgaagcctaaacgcgatggatatatgtttttgaaggcagaaagcaaaattatgtttgccactttgcaaaggagctcactgtggtgtctgtgttccaaccactgaatctggaccccatctgtgaataagccattctgactcatatcccctatttaacagggtctctagtgctgtgaaaaaaaaaatgctgaacattgcatataacttatattgtaagaaatactgtacaatgactttattgcatctgggtagctgtaaggcatgaaggatgccaagaagtttaaggaatatgggagaaatagtgtggaaattaagaagaaactaggtctgatattcaaatggacaaactgccagttttgtttcctttcactggccacagttgtttgatgcattaaaagaaaataaaaaaaagaaaaaagagaaaagaaaaaaaaagaaaaaagttgtaggcgaatcatttgttcaaagctgttggcctctgcaaaggaaataccagttctgggcaatcagtgttaccgttcaccagttgccgttgagggtttcagagagcctttttctaggcctacatgctttgtgaacaagtccctgtaattgttgtttgtatgtataattcaaagcaccaaaataagaaaagatgtagatttatttcatcatattatacagaccgaactgttgtataaatttatttactgctagtcttaagaactgctttctttcgtttgtttgtttcaatattttccttctctctcaatttttggttgaataaactagattacattcagttggcctaaggtggttgtgctcggagggtttcttgtttcttttccattttgtttttggatgatatttattaaatagcttctaagagtccggcggcatctgtcttgtccctattcctgcagcctgtgctgagggtagcagtgtatgagctaccagcgtgcatgtcagcgaccctggcccgacaggccacgtcctgcaatcggcccggctgcctcttcgccctgtcgtgttctgtgttagtgatcactgcctttaatacagtctgttggaataatattataagcataataataaagtgaaaatattttaaaactacaa

SEQ ID NO: 1621 - DNA, 3050 bp, Homo Sapiens
  NM_002053
ggagtcagtgatttgaacgaagtactttcagtttcatattactctaaatccattacaaatctgcttagcttctaaatatttcatcaatgaggaaatcccagccctacaacttcggaacagtgaaatattagtccagggatccagtgagagacacagaagtgctagaagccagtgctcgtgaactaaggagaaaaagaacagacaagggaacagcctggacatggcatcagagatccacatgacaggcccaatgtgcctcattgagaacactaatgggcgactgatggcgaatccagaagctctgaagatcctttctgccattacacagcctatggtggtggtggcaattgtgggcctctaccgcacaggcaaatcctacctgatgaacaagctggctggaaagaaaaagggcttctctctgggctccacggtgcagtctcacactaaaggaatctggatgtggtgtgtgccccaccccaagaagccaggccacatcctagttctgctggacaccgagggtctgggagatgtagagaagggtgacaaccagaatgactcctggatcttcgccctggccgtcctcctgagcagcaccttcgtgtacaatagcataggaaccatcaaccagcaggctatggaccaactgtactatgtgacagagctgacacatagaatccgatcaaaatcctcacctgatgagaatgagaatgaggttgaggattcagctgactttgtgagcttcttcccagactttgtgtggacactgagagatttctccctggacttggaagcagatggacaacccctcacaccagatgagtacctgacatactccctgaagctgaagaaaggtaccagtcaaaaagatgaaacttttaacctgcccagactctgtatccggaaattcttcccaaagaaaaaatgctttgtctttgatcggcccgttcaccgcaggaagcttgcccagctcgagaaactacaagatgaagagctggaccccgaatttgtgcaacaagtagcagacttctgttcctacatctttagtaattccaaaactaaaactctttcaggaggcatccaggtcaacgggcctcgtctagagagcctggtgctgacctacgtcaatgccatcagcagtggggatctgccgtgcatggagaacgcagtcctggccttggcccagatagagaactcagctgcagtgcaaaaggctattgcccactatgaacagcagatgggccagaaggtgcagctgcccacagaaaccctccaggagctgctggacctgcacagggacagtgagagagaggccattgaagtcttcatcaggagttccttcaaagatgtggaccatctatttcaaaaggagttagcggcccagctagaaaaaaagcgggatgacttttgtaaacagaatcaggaagcatcatcagatcgttgctcagctttacttcaggtcattttcagtcctctagaagaagaagtgaaggcgggaatttattcgaaaccagggggctatcgtctctttgttcagaagctacaagacctgaagaaaaagtactatgaggaaccgaggaaggggatacaggctgaagagattctgcagacatacttgaaatccaaggagtctatgactgatgcaattctccagacagaccagactctcacagaaaaagaaaaggagattgaagtggaacgtgtgaaagctgagtctgcacaggcttcagcaaaaatgttgcaggaaatgcaaagaaagaatgagcagatgatggaacagaaggagaggagttatcaggaacacttgaaacaactgactgagaagatggagaacgacagggtccagttgctgaaagagcaagagaggaccctcgctcttaaacttcaggaacaggagcaactactaaaagagggatttcaaaaagaaagcagaataatgaaaaatgagatacaggatctccagacgaaaatgagacgacgaaaggcatgtaccataagctaaagaccagagccttcctgtcacccctaaccaaggcataattgaaacaattttagaatttggaacaagcgtcactacatttgataataattagatcttgcatcataacaccaaaagtttataaaggcatgtggtacaatgatcaaaatcatgttttttcttaaaaaaaaaaaaagactgtaaattgtgcaacaaagatgcatttacctctgtatcaactcaggaaatctcataagctggtaccactcaggagaagtttattcttccagatgaccagcagtagacaaatggatactgagcagagtcttaggtaaaagtcttgggaaatatttgggcattggtctggccaagtctacaatgtcccaatatcaaggacaaccaccctagcttcttagtgaagacaatgtacagttatccgttagatcaagactacacggtctatgagcaataatgtgatttctggacattgcccatgtataatcctcactgatgatttcaagctaaagcaaaccaccttatacagagatctagaatctctttatgttctccagaggaaggtggaagaaaccatgggcaggagtaggaattgagtgataaacaattgggctaatgaagaaaacttctcttattgttcagttcatccagattataacttcaatgggacactttagaccattagacaattgacactggattaaacaaattcacataatgccaaatacacaatgtatttatagcaacgtataatttgcaaagatggactttaaaagatgctgtgtaactaaactgaaataattcaattacttattatttagaatgttaaagcttatgatagtcttttctaactcttaacactcatacttgaaaactttctgagtttccccagaagagaatatgggattttttttgacatttttgactcatttaataatgctcttgtgtttacctagtatatgtagactttgtcttatgtgtgaaaagtcctaggaaagtggttgatgtttcttatagcaattaaaaattatttttgaactgaaaatacaatgtatttcac

SEQ ID NO: 1622 - DNA, 3074 bp, Homo Sapiens
  NM_002061
attgtcttccaggaaacagctccctcagtttggaatcagctctcccgctgcggccgcagtagccggagccggagccgcagccaccggtgccttcctttcccgccgccgcccagccgccgtccggcctccctcgggcccgagcgcagaccaggctccagccgcgcggcgccggcagcctcgcgctccctctcgggtctctctcgggcctcgggcaccgcgtcctgtggggcggccgcctgcctgcccgcccgcccgcagccccttcgctgcgcggcccctgggcggccgctgccatgggcaccgacagccgcgcggccaaggcgctcctggcgcgggcccgcaccctgcacctgcagacggggaacctgctgaactggggccgcctgcggaagaagtgcccgtccacgcacagcgaggagcttcatgattgtatccaaaaaaccttgaatgaatggagttcccaaatcaacccagatttggtcagggagtttccagatgtcttggaatgcactgtatctcatgcagtagaaaagataaatcctgatgaaagagaagaaatgaaagtttctgcaaaactgttcattgtagaatcaaactcttcatcatcaactagaagtgcagttgacatggcctgttcagtccttggagttgcacagctggattctgtgatcattgcttcacctcctattgaagatggagttaatctttccttggagcatttacagccttactgggaggaattagaaaacttagttcagagcaaaaagattgttgccataggtacctctgatctagacaaaacacagttggaacagctgtatcagtgggcacaggtaaaaccaaatagtaaccaagttaatcttgcctcctgctgtgtgatgccaccagatttgactgcatttgctaaacaatttgacatacagctgttgactcacaatgatccaaaagaactgctttctgaagcaagtttccaagaagctcttcaggaaagcattcctgacattcaagcgcacgagtgggtgccgctgtggctactgcggtattcggtcattgtgaaaagtagaggaattatcaaatcaaaaggctacattttacaagctaaaagaaggggttcttaactgacttaggagcataacttacctgtaatttccttcaatatgagagaaaattgagatgtgtaaaaatctagttactgcctgtaaatggtgtcattgaggcagatattctttcgtcatatttgacagtatgttgtctgtcaagttttaaatacttatcttgcctccatatcaatccattctcatgaacctctgtattgctttccttaaactattgttttctaattgaaattgtctataaagaaaatacttgcaatatatttttcctttatttttatgactaatataaatcaagaaaatttgttgttagatatattttggcctaggtatcagggtaatgtatatacatattttttatttccaaaaaaaattcattaattgcttcttaactcttattataaccaagcaatttaattacaattgttaaaactgaaatactggaagaagatatttttcctgtcattgatgagatatatcagagtaactggagtagctgggatttactagtagtgtaaataaaattcactcttcaatacatgaatggaaacttaaatttttttttatgtgtccttgcttatagtttagctgtaataatttaaccttgtattcttgtgccatattctgtctttttattacttataaagacaaaccaaagtaaatctgaaaggagactagaagctttgaaattattgtttgggggttttataaaagcaactactgtcacctccatccagattcttttaaattattgatccatccatagtatatattgctactcattcaagaatcctcaataagtattgagtatttaccatatgttgggatactgtgggctctggagagaggagggggcaatagagctaggaattaagaatcagttgagtaaaatgtgtaatatttattccccattaataactgactaggaaggactaaaagccagaaaggggatgaaaaaaaaatccttaattcagggccgacattatctacttaaacaactttgagatatggtcttaattattttaaagcagaataatataattgaaagtttatagctaaaagagactatataggtcatttagtataattcttcattagtttacgaaccacaaaattgcaaataaataagctatgaactttgatgtacactataaatctccttaattctataaatttgtgtctgtaacctgaatagtttgaaaacttctttaaaaatctcttgtatttcatccgggcgcagtggctcacacctgtaatcccagcactttgggaggccgaggtgggcagatcacgaggtcaggagtttgagaccagcctgaccaacatggtaaaaccccatctctactaaaatacaaaaattggctgggcgtggtggcactcgcctgtaatctcagctacttgggaggctgaggcaggagaatcgcttgaacccgggaggcggaggttacagtgagccgagatcacatcactgcactccagcctgggcgacagagcgagactccatctcaaaaaaaaaaaaaaactcttgtatctcaatatttttaaaccacaggcctaaataaaactaattttgctcaagttttctcaacctagggaaaaagaactatggttccatattcaaaataaatattatagacccttttcctaagtaggattttgtggtttactgattgggtaatttgatcattaaaattatgtgaaatctgcccgggcacacctcatgcctgtaatcccagcactctgggaggccaaggcagatgatcacctgaggtcaggagttctagaccagcctggctaacatggtgaaaccctgtatctgctaaaaatacaaaaattagccaggcgtggtggcgggctcctgtaatcccagctactttggaggcgaggcacgagaatcgcttgaacctgggaggcggagtttgcagtgagccgagatcacgccattgcactccagcctgggcg

SEQ ID NO: 1623 - DNA, 1661 bp, Homo Sapiens
  NM_002064
attgcattcctgggcattgctaactagtgaagtataccagatggaaatgtcttcgaagctgtccctttaaaactcgagcaagctaccaggcaaactccgcctccagggaggttccttattaaataggagccaactggctgggtcggggctcaataccccaagcaatacctgcaactgaggattcttcccggggagaccgcagcccatcggcatggctcaagagtttgtgaactgcaaaatccagcctgggaaggtggttgtgttcatcaagcccacctgcccgtactgcaggagggcccaagagatcctcagtcaattgcccatcaaacaagggcttctggaatttgtcgatatcacagccaccaaccacactaacgagattcaagattatttgcaacagctcacgggagcaagaacggtgcctcgagtctttattggtaaagattgtataggcggatgcagtgatctagtctctttgcaacagagtggggaactgctgacgcggctaaagcagattggagctctgcagtaaccacagaacaggccccatgctgacgtccctcctcaagagctggatggcattgcaaatgatgacagcacttctggtggatgaatttgggggcacaaacagcttttttcctcttttggctcagtatttaaaagtggaccaacttgctcttaatcacagggccaagaaggttgacgggccatcttggttttcttctggatgtgctctttggttttcagaagactgtgacaagttctggcccaggattcgctcactgaccctcaattgtcctctttggcatgcgtttcttactgttctccatgtgtcggcatgtctctacctctaagccagtgtttttcaactatgtttatccagactccttctccacaatgatgaatccacagttggttatctgctactgcccattagctaaaatcattttgctgcttgactttatggagtttgtattatgaaatcagtgggtattttgaatgtgttctttctaactacatgcatctctccactcaactccaccccatcccatcccaccttgaaaatcactgctctgaaccagtgttctccaccttgtcctccacagatctcataggaaatgttcaacaattctgtgaaaggtcacaggacccaattggagaaatcatatgaaaagcatagttggtcttggtgtcatatggatcagaggcacaagtgcagaggctgtggtcatgcggaacactctgttatttaagatggctatccagataatcctgaacactgtgtatttattttatttagactaccagcaaagattaaagcatgaaatgtaaaacatctgataaaacttacagccccctacaccaagagtgtatctgtgaaagagctcctacactttgaaaacttaagaatcccttatcatgaagtttgcctgttctagaattgtaagattgttaatttccttcaatctctagtgacaacacttaatttcttttctaataaaaaaaacctatagatgattcagtgatttttgtccaattcatttgcatgttctcaagacattaaggaatgttatgcgaaatacactaacttaaaactgtgtttatatttggccctgccattataaataaagacacgtgctgctgtcaaaaaaaaaaaaaaa

SEQ ID NO: 1624 - DNA, 1615 bp, Homo Sapiens
  NM_002067
gctgcggcggcggcgcgggctgagtgcggccgcgcgggagtccgcggctggcgcggcccgagcggggacccggcggctcgccaggcggcggccgaggcggggcgggccggcccggggccgagggccggtggccgaggccggagggccgcggcgggcggcggccgaggcggctccggccagggccgggccgggggccggggggcggcggcgggcaggcggccgcgtcggccggggccgggacgatgactctggagtccatgatggcgtgttgcctgagcgatgaggtgaaggagtccaagcggatcaacgccgagatcgagaagcagctgcggcgggacaagcgcgacgcccggcgcgagctcaagctgctgctgctcggcacgggcgagagcgggaagagcacgttcatcaagcagatgcgcatcatccacggcgccggctactcggaggaggacaagcgcggcttcaccaagctcgtctaccagaacatcttcaccgccatgcaggccatgatccgggccatggagacgctcaagatcctctacaagtacgagcagaacaaggccaatgcgctcctgatccgggaggtggacgtggagaaggtgaccaccttcgagcatcagtacgtcagtgccatcaagaccctgtgggaggacccgggcatccaggaatgctacgaccgcaggcgcgagtaccagctctccgactctgccaagtactacctgaccgacgttgaccgcatcgccaccttgggctacctgcccacccagcaggacgtgctgcgggtccgcgtgcccaccaccggcatcatcgagtaccctttcgacctggagaacatcatcttccggatggtggatgtggggggccagcggtcggagcggaggaagtggatccactgctttgagaacgtgacatccatcatgtttctcgtcgccctcagcgaatacgaccaagtcctggtggagtcggacaacgagaaccggatggaggagagcaaagccctgttccggaccatcatcacctacccctggttccagaactcctccgtcatcctcttcctcaacaagaaggacctgctggaggacaagatcctgtactcgcacctggtggactacttccccgagttcgatggtccccagcgggacgcccaggcggcgcgggagttcatcctgaagatgttcgtggacctgaaccccgacagcgacaagatcatctactcacacttcacgtgtgccaccgacacggagaacatccgcttcgtgttcgcggccgtgaaggacaccatcctgcagctcaacctcaaggagtacaacctggtctgagcgcccaggcccagggagacgggatggagacacggggcaggaccttccttccacggagcctgcggctgccgggcgggtggcgctgccgagtccgggccggggcctctgcccgcgggaggagatttttttttttcatatttttaacaaatggtttttatttcacagttatcaggggatgtacatctctccctccgtacacttcgcgcaccttctcaccttttgtcaacggcaaaggcagcctttttctggccttgacttatggctcgcttttttctaaaaaaaaaaaaaaaaaa

SEQ ID NO: 1625 - DNA, 2132 bp, Homo Sapiens
  NM_002068
ggggagccctggcctccccacctcctcccgtccccaccctgttcccagcactcaagccttgccaccgccgagccgggcttcctgggtgtttcaggcaaggaagtctaggtccctggggggtgacccccaaggaaaaggcagcctccctgcgcacccggttgcccggagccctctccagggccggctgggctgggggttgccctggccagcaggggcccgggggcgatgccacccggtgccgactgaggccaccgcaccatggcccgctcgctgacctggcgctgctgcccctggtgcctgacggaggatgagaaggccgccgcccgggtggaccaggagatcaacaggatcctcttggagcagaagaagcaggaccgcggggagctgaagctgctgcttttgggcccaggcgagagcgggaagagcaccttcatcaagcagatgcggatcatccacggcgccggctactcggaggaggagcgcaagggcttccggcccctggtctaccagaacatcttcgtgtccatgcgggccatgatcgaggccatggagcggctgcagattccattcagcaggcccgagagcaagcaccacgctagcctggtcatgagccaggacccctataaagtgaccacgtttgagaagcgctacgctgcggccatgcagtggctgtggagggatgccggcatccgggcctactatgagcgtcggcgggaattccacctgctcgattcagccgtgtactacctgtcccacctggagcgcatcaccgaggagggctacgtccccacagctcaggacgtgctccgcagccgcatgcccaccactggcatcaacgagtactgcttctccgtgcagaaaaccaacctgcggatcgtggacgtcgggggccagaagtcagagcgtaagaaatggatccattgtttcgagaacgtgatcgccctcatctacctggcctcactgagtgaatacgaccagtgcctggaggagaacaaccaggagaaccgcatgaaggagagcctcgcattgtttgggactatcctggaactaccctggttcaaaagcacatccgtcatcctctttctcaacaaaaccgacatcctggaggagaaaatccccacctcccacctggctacctatttccccagtttccagggccctaagcaggatgctgaggcagccaagaggttcatcctggacatgtacacgaggatgtacaccgggtgcgtggacggccccgagggcagcaagaagggcgcacgatcccgacgcctcttcagccactacacatgtgccacagacacacagaacatccgcaaggtcttcaaggacgtgcgggactcggtgctcgcccgctacctggacgagatcaacctgctgtgacccaggccccacctggggcaggcggcaccggcgggcgggtgggaggtgggagtggctgcagggacccctagtgtccctggtctatctctccagcctcggcccacacgcaagggagtcgggggacggacggcccgctgctggccgctctcttctctgcctctcaccaggacagccgccccccagggtactcctgcccttgcttgactcagtttccctcctttgaaagggaaggagcaaaacggccatttgggatgccagggtggatgaaaaggtgaagaaatcaggggattgaggacttgggtgggtgggcatctctcaggagccccatctccgggcgtgtcacctcctgggcagggttctgggaccctctgtgggtgacgcacaccctgggatggggctagtagagccttcaggcgccttcgggcgtggactctggcgcactctagtggacaggagaaggaacgccttccaggaacctgtggactaggggtgcagggacttccctttgcaaggggtaacagaccgctggaaaacactgtcactttcagagctcggtggctcacagcgtgtcctgccccggtttgcggacgagagaaatcgcggcccacaagcatccccccatcccttgcaggctgggggctgggcatgctgcatcttaaccttttgtatttattccctcaccttctgcagggctccgtgcgggctgaaattaaagatttcttagaggctgcgtcgccagcgtcctgttt

SEQ ID NO: 1626 - DNA, 2200 bp, Homo Sapiens
  NM_002070
actgccgacccgagtgcttcccgcagagggctggtggtgggagcggagtgggtcgggcggggccgagccgggccgtgggccgtgtgggggccgggcggcggccgggccggcggacggcgggatgggctgcaccgtgagcgccgaggacaaggcggcggccgagcgctctaagatgatcgacaagaacctgcgggaggacggagagaaggcggcgcgggaggtgaagttgctgctgttgggtgctggggagtcagggaagagcaccatcgtcaagcagatgaagatcatccacgaggatggctactccgaggaggaatgccggcagtaccgggcggttgtctacagcaacaccatccagtccatcatggccattgtcaaagccatgggcaacctgcagatcgactttgccgacccctccagagcggacgacgccaggcagctatttgcactgtcctgcaccgccgaggagcaaggcgtgctccctgatgacctgtccggcgtcatccggaggctctgggctgaccatggtgtgcaggcctgctttggccgctcaagggaataccagctcaacgactcagctgcctactacctgaacgacctggagcgtattgcacagagtgactacatccccacacagcaagatgtgctacggacccgcgtaaagaccacggggatcgtggagacacacttcaccttcaaggacctacacttcaagatgtttgatgtgggtggtcagcggtctgagcggaagaagtggatccactgctttgagggcgtcacagccatcatcttctgcgtagccttgagcgcctatgacttggtgctagctgaggacgaggagatgaaccgcatgcatgagagcatgaagctattcgatagcatctgcaacaacaagtggttcacagacacgtccatcatcctcttcctcaacaagaaggacctgtttgaggagaagatcacacacagtcccctgaccatctgcttccctgagtacacaggggccaacaaatatgatgaggcagccagctacatccagagtaagtttgaggacctgaataagcgcaaagacaccaaggagatctacacgcacttcacgtgcgccaccgacaccaagaacgtgcagttcgtgtttgacgccgtcaccgatgtcatcatcaagaacaacctgaaggactgcggcctcttctgaggggcagcggggcctggcgggatgggccaccgccgactttgtaccccccaacccctgaggaagatgggggcaagaagatcacgctccccgcctgttcccccgccgcttttctcctctttcctctctttgttctcagctccccctgtcccctcagctccagacgtaggggaggggttgccacaggcctccctgtttgaagcctgcccttgtctgagatgctggtaatggccatggtacccccttctgggcatctgttctggtttttaaccattgtcttgttctgtgatgaggggaggggggcacatgctgagtctcccaaggctgcgtctggaggggcccctgcttctccagcctggacccccagctttgcccaacaccagcccctgccccagcccaagtccaaatgtttacagggagcctcctgcccagtcccccaaccccagccgctcggaggccccaaaggaaaaagcacaagaagcgtgagacgccaccattcctggaaaccacagtccacctgctcattctcgtagctttttaaaaaaatgaaagtaaaggaaaaaaaaaaaactgcaaatctagaaaactttttagagaaaaactatttaaaactgtcagatcctgaccagcaagcccccccccagccccccttccaagtgactccgtgccttgagtgtgtctgcgtgtttacacccgtccctctgctggccgcccccgtgcgagcggcacccctgccctgccctccacagaattgggttccaagggctgttccagacaactgccaacgtcactgagggccctgccccagcggccctggccccaggctctattaacctaaaatgtagctccctagcgctaacctaggaaccgccgctgcctgctggggggccacgcccctcatgcccttgtcccaggcccggggccttcagcgttgaacacttccttgcttttttcacatgttttatggaattgttcacctggtttgaaataataaaatgtagaaagaaaaaaaat

SEQ ID NO: 1627 - DNA, 2215 bp, Homo Sapiens
  NM_002072
gggagggtgtgtgtgcgcgctgtgagcagggggtgccggcggggctgcagcggaggcactttggaagaatgactctggagtccatcatggcgtgctgcctgagcgaggaggccaaggaagcccggcggatcaacgacgagatcgagcggcagctccgcagggacaagcgggacgcccgccgggagctcaagctgctgctgctcgggacaggagagagtggcaagagtacgtttatcaagcagatgagaatcatccatgggtcaggatactctgatgaagataaaaggggcttcaccaagctggtgtatcagaacatcttcacggccatgcaggccatgatcagagccatggacacactcaagatcccatacaagtatgagcacaataaggctcatgcacaattagttcgagaagttgatgtggagaaggtgtctgcttttgagaatccatatgtagatgcaataaagagtttatggaatgatcctggaatccaggaatgctatgatagacgacgagaatatcaattatctgactctaccaaatactatcttaatgacttggaccgcgtagctgaccctgcctacctgcctacgcaacaagatgtgcttagagttcgagtccccaccacagggatcatcgaatacccctttgacttacaaagtgtcattttcagaatggtcgatgtagggggccaaaggtcagagagaagaaaatggatacactgctttgaaaatgtcacctctatcatgtttctagtagcgcttagtgaatatgatcaagttctcgtggagtcagacaatgagaaccgaatggaggaaagcaaggctctctttagaacaattatcacatacccctggttccagaactcctcggttattctgttcttaaacaagaaagatcttctagaggagaaaatcatgtattcccatctagtcgactacttcccagaatatgatggaccccagagagatgcccaggcagcccgagaattcattctgaagatgttcgtggacctgaacccagacagtgacaaaattatctactcccacttcacgtgcgccacagacaccgagaatatccgctttgtctttgctgccgtcaaggacaccatcctccagttgaacctgaaggagtacaatctggtctaattgtgcctcctagacacccgccctgcccttccctggtgggctattgaagatacacaagagggactgtatttctgtggaaaacaatttgcataatactaatttattgccgtcctggactctgtgtgagcgtgtccacagagtttgtagtaaatattatgattttatttaaactattcagaggaaaaacagaggatgctgaagtacagtcccagcacatttcctctctatcttttttttaggcaaaaccttgtgactcagtgtattttaaattctcagtcatgcactcacaaagataagacttgtttctttctgtctctctctctttttcttttctatggagcaaaacaaagctgatttcccttttttcttcccccgctaattcatacctccctcctgatgtttttcccaggttacaatggcctttatcctagttccattcttggtcaagtttttctctcaaatgatacagtcaggacacatcgttcgatttaagccatcatcagcttaatttaagtttgtagtttttgctgaaggattatatgtattaatacttacggttttaaatgtgttgctttggatacacacatagtttcttttttaatagaatatactgtcttgtctcactttggactgggacagtggatgcccatctaaaagttaagtgtcatttcttttagatgtttaccttcagccatagcttgattgctcagagaaatatgcagaaggcaggatcaaagacacacaggagtcctttcttttgaaatgccacgtgccattgtctttcctcccttctttgcttctttttcttaccctctctttcaattgcagatgccaaaaaagatgccaacagacactacattaccctaatggctgctacccagaacctttttataggttgttcttaatttttttgttgttgttgttcaagcttttcctttcttttttttcttggtgtttgggccacgattttaaaatgacttttattatgggtatgtgttgccaaagctggctttttgtcaaataaaatgaatacgaacttaaaaaataaaaaaaaaaaaaaaaaaaaa

SEQ ID NO: 1628 - DNA, 5144 bp, Homo Sapiens
  NM_002076
ccctgtccctggctcacgtgatcgcgcctagggagaaaacgtctgactccagccaccggccttcaaggcacggctttttattccttcggctggtcggcctctcgcccttcagctacctgtgcgtccctccgtcccgtcccgtcccggggtcaccccggagcctgtccgctatgcggctcctgcctctagccccaggtcggctccggcggggcagcccccgccacctgccctcctgcagcccagcgctgctactgctggtgctgggcggctgcctgggggtcttcggggtggctgcgggaacccggaggcccaacgtggtgctgctcctcacggacgaccaggacgaagtgctcggcggcatgacaccgctaaagaaaaccaaagctctcatcggagagatggggatgactttttccagtgcttatgtgccaagtgctctctgctgccccagcagagccagtatcctgacaggaaagtacccacataatcatcacgttgtgaacaacactctggaggggaactgcagtagtaagtcctggcagaagatccaagaaccaaatactttcccagcaattctcagatcaatgtgtggttatcagaccttttttgcagggaaatatttaaatgagtacggagccccagatgcaggtggactagaacacgttcctctgggttggagttactggtatgccttggaaaagaattctaagtattataattacaccctgtctatcaatgggaaggcacggaagcatggtgaaaactatagtgtggactacctgacagatgttttggctaatgtctccttggactttctggactacaagtccaactttgagcccttcttcatgatgatcgccactccagcgcctcattcgccttggacagctgcacctcagtaccagaaggctttccagaatgtctttgcaccaagaaacaagaacttcaacatccatggaacgaacaagcactggttaattaggcaagccaagactccaatgactaattcttcaatacagtttttagataatgcatttaggaaaaggtggcaaactctcctctcagttgatgaccttgtggagaaactggtcaagaggctggagttcactggggagctcaacaacacttacatcttctatacctcagacaatggctatcacacaggacagttttccttgccaatagacaagagacagctgtatgagtttgatatcaaagttccactgttggttcgaggacctgggatcaaaccaaatcagacaagcaagatgctggttgccaacattgacttgggtcctactattttggacattgctggctacgacctaaataagacacagatggatgggatgtccttattgcccattttgagaggtgccagtaacttgacctggcgatcagatgtcctggtggaataccaaggagaaggccgtaacgtcactgacccaacatgcccttccctgagtcctggcgtatctcaatgcttcccagactgtgtatgtgaagatgcttataacaatacctatgcctgtgtgaggacaatgtcagcattgtggaatttgcagtattgcgagtttgatgaccaggaggtgtttgtagaagtctataatctgactgcagacccagaccagatcactaacattgctaaaaccatagacccagagcttttaggaaagatgaactatcggttaatgatgttacagtcctgttctgggccaacctgtcgcactccaggggtttttgaccccggatacaggtttgacccccgtctcatgttcagcaatcgcggcagtgtcaggactcgaagattttccaaacatcttctgtagcgacctcacacagcctctgcagatggatccctgcacgcctctttctgatgaagtgattgtagtaggtgtctgtagctagtcttcaagaccacacctggaagagtttctgggctggctttaagtcctgtttgaaaaagcaacccagtcagctgacttcctcgtgcaatgtgttaaactgtgaactctgcccatgtgtcaggagtggctgtctctggtctcttcctttagctgacaaggacactcctgaggtctttgttctcactgtattctttttatcctggggccacagttcttgattattcctcttgtggttaaagactgaatttgtaaacccattcagataaatggcagtactttaggacacacacaaacacacagacacaccttttgatatgtaagcttgacctaaagtcaaaggacctgtgtagcatttcagattgagcacttcactatcaaaaatactaacatcacatggcttgaagagtaaccatcagagctgaatcatccaagtaagaacaagtaccattgttgattgataagtagagatacattttttatgatgttcatcacagtgtggtaaggttgcaaattcaaaacatgtcacccaagctctgttcatgtttttgtgaattctaggctggtgctgcactgaaatagagcagtaagcttgtgataaaggccaattccaggtagctcttgaaggtgatagccatctactttccagtggctgccaaccacagggagtgccagttaacactggaaggattaaggcaaggtcccttctcttgagactcccctctgagatctgaaaaatgaagtggcttaggaacatcagcagtgaagaactgccaagagttggtgaaggttgtctcttccgagggccttctgaagacagggctcttgaacagacaagtggaagggctgtaccagggataaaggaaagaagtgcctgtccagcagggagcttgaatttaagttccatgtatgaagtcattggctctatctgcatttttctgtcattctcttcatttgttttaaggtggaaaattttcttacagttgatgcaaagtatcaactactttaccctaccttctccccttttagatgggttcttcctgagttttggagtcttgtatgattatcagtattcccctgtcaaaatcaaatctattcaggtttcttcactgttgagaacacctaaatgtttttatttttgagaagtggggacagagtctcactatgtcacccaggctggagtgcaatggcatgatctcagctcactgcaaccttcgcctcctgggttcaagcgattctcctgcctccgcctcctgagtagctgggattataggcacgcaccaccacgcccagctaattttttgtatttttagtagagacagagtttcaccatgttggccaggctggtcttgaactcctgaccttgtgatccacccacctcggcctcccagagtgctgggattacaggcatgagccaccacgcttggctaagaacacctaaatttttatgtttcttggctcaaaaaccagttccatttctaatgttgtcctcacaagaaggctaattggtggtgagacagcaggggaggaggaagagctgtggtttgtaacttgttcaactcaggcaataagcgattttagctttatttaaagtcttctgtccagctttaagcactttgtaagacatggctgaaagtagcttttctatcagaattgcagatagtcatgttgggctaacagtcaattggatatattcctttacctcacatgaccccagcaactgtggtggtatctagaggtgaaacaggcaagtgaaatggacacctctgctgtgaatgttttagagaaggaaattcaaaaaatgttgtaactgaaagcactgttgaatatgggtatcggctttctttttcactttgactcttaacattatcagtcaacttccacattaatgaaagttgaccatagttatttccaaataaaaagaaaccaactcttaccaggtcttggactgtgatgtcatattattcagttttatgcttgttcctgagcagaactcataagagtgacatagtcagctgctgacggcacctcagccacgccactcttactcagttcagtgggtgtgcttgcgtggtaggatgtggtgcagccctctctacgctcttctatttttggtatatttcctatctaaccttcaaatagcttccaattctttttttcttggactggcttcattctgaatttgtgctaaaataatctttcataaagagacctcagtttatagcgtaacagactacacaatgcactgatgttttcataatgtttaagggacccactgcaagaagcttgctgcctccttttaattgtattcatttagattttgattttccatgttaagaaggtgaggtccatgttggtgcccttcagagtagagaaccatgtaaacattaggaatgaacagaggccttaggaatgaatagagagtttgccttatacaatttcctgttacaaagctctccctctcatgcaaagtagggaacaccttttgagcatctttgaatttgacaaatggtgctgttgcaaacactttttttttgagatgaagtctcgcggttgtcacccgggctggagtgcagtggcgtgatctcggctcactgcaacttccacctcctgggttccagcagttctcctgcctcagcctcccaagtagctgagattacaggcgcctgccaccccacctggctgatttttgtaattttagtagagacggggtttcaccatgttggccaggctgattaactcctgacctcaggtgatccacctttctcggcctcccaaagtgctgggattacgggtgtgagccaccgtgcccggcctgcaaacacattttaattgacaacactagggctgttgtacaaaatagtaatgatagccatggaagttttaccttattctgtgagaagtgttcttaaacttattaagtgtctaaactaaggtttagtgcttttttaaaggaaagttgtcccaggattcatcctaaagaaagcaaaagttaattcaactgatccaccaatggaattagatgggtagagttgggttcttgagttttaccaccacttagttcccactgaattttgtaacttcctgtgtttgcatcctctgttcctattctgcccttgctctgtgtcatctcagtcatttgacttagaaagtgcccttcaaaaggaccctgttcactgctgcacttttcaatgaattaaaatttatttctgttctagtgggaaaaaaaaaaaaaaaaaa

SEQ ID NO: 1629 - DNA, 4899 bp, Homo Sapiens
  NM_002077
cttccggcgcgctgggagacgtgcggttccgggtcgctgctcggctcgccggctgggcggtgggggttggtgacgcgggccggggctcacgagaggcccgggaggcggggctttgctggcttcccagagagaggcaggacagaatgctttgacctccaagctgttttaaatctagtagataagccagatcctgtgttgccataagcccttggcccacatttaagtgggaatgcagctagcttggatgtctgaaactttgtaggcgcctctgtctgaatcctgaacacaggcaccaggactactgagagctcgtcatctgtgcaggatagccacacagcaaacatgtttgcaaaactgaagaagaaaattgcagaagagactgctgttgctcagaggccaggaggtgctactaggatcccacggtctgtgagcaaggaatcagttgcctcaatgggagctgactcaggagatgactttgcttccgatggaagcagctccagagaagatctttcatcccagcttctgagaaggaatgaacagatacggaagttagaggccagactttctgactatgctgaacaggtccgaaacttgcagaagataaaagagaagcttgaaattgcattagaaaaacaccaggattcttccatgcggaaatttcaagagcagaatgagacattccaagccaacagagccaaaatggcagaaggactggctttggcattagccagaaaggaccaggaatggtcagaaaagatggatcagcttgaaaaggagaaaaatattctgacagcccagttacaggaaatgaagaaccagagtatgaatcttttccaaaggagagatgaaatggatgaattagaggggttccagcagcaggaactaagtaaaataaagcacatgcttttaaaaaaagaagaaagtctagggaaaatggaacaagaattggaggcacgaaccagagaacttagtcgtacccaggaggagttgatgaactccaatcagatgtcatcagacttaagccagaagctagaagaattgcagagacactactcaacgctggaagagcagagagatcatgtgatagcttcaaaaacaggtgcagaaagtaagatcacagccctggaacaaaaggaacaagagctccaagcactcattcagcagctttccattgatttgcaaaaggtcactgctgaaactcaagagaaagaagacgttatcacacatttgcaagagaaggttgcatccttggagaagagactagaacagaacttatcaggagaagaacacgtgcaagaactcctgaaagagaaaacacttgctgagcagaatttggaggataccagacaacagctcttggcagccagaagcagccaggctaaggccattaacaccctggagactcgggtgagagaactggagcagaccttgcaggcctctgaggagcagctccaacagagcaagggcattgtggctgcccaggaaactcagatacaggagctcgctgccgccaaccaggagagcagccatgtgcagcagcaggcccttgctctggagcagcagttcttggagcgcacccaggcgctagaagcccagatagtggccctggagagaacgcgggcagctgaccagaccaccgcagagcaagggatgagacaactggagcaagaaaatgcagcccttaaagaatgcaggaatgaatatgaacgttctttacaaaatcaccaatttgaactaaagaagctgaaggaagaatggagccaaagagaaattgtgagcgtggccatggctcaagccctggaggaggtgcggaagcaaagggaagagttccagcaacaggcagctaacctgacagccataatagacgagaaggaacagaatctgcgggaaaaaaccgaagtgcttctccagaaagagcaggagattctccagctggagcgaggtcacaactctgccctgctgcagatacaccagctgcaggccgagctggaggccctgaggaccctcaaggcggaggaggctgcagtggtcgcggagcaggaggacctgctgaggctgcggggcccattgcaggccgaagcactctcagtcaatgagtcgcacgtgacctcgagggccatgcaggaccctgtgttccagcttccaactgcaggaagaacaccaaatggtgaggttggggccatggatctcacacagctacagaaggagaaacaggacttggagcagcaacttctggagaaaaataagaccataaagcagatgcagcagcggatgctggagctccggaagactctgcagaaggagctgaaaatcagacccgataatgagctcttcgaagtccgggagaaacctggacctgagatggcaaacatggcgccttccgtcacgaataacactgacctgacagatgcccgcgagatcaactttgagtaccttaaacatgtggttttaaaattcatgtcttgtcgcgaatccgaggcttttcatcttataaaagctgtgtcagtgttgctgaacttttcccaagaggaggagaacatgctcaaggaaactctggaatataagatgtcatggtttgggtccaaaccagctcccaagggcagcatccggccgtctatctcaaaccctcggataccatggtcctagaggggactacccaaggatggagctccgtgggttgacactttttctgtgaaaagaacactgacacaccagtctgggtgggtttttaatcactgtaactgcagtattttgtacaagtgtctaaacattgtttacaagactaaggcccacttccctgcaggctgacctgaacctcagggggtagctgatcctgtcattctggtcaccaaacaggagggtcctggcactacccagatttccacagtgctgctaatatcccagctccagccagcaccccatctgcacctgaatcctctaacttcacggtagcacttacagctgaagccatcagcatctggcaggcacacctgagtcaccatgtagcgctgctactggaggtagagacggccctttgagatggtgcccagcaggccaaacccacctgcctctgccaggaacagccaactccatgggaactctatgggagtggcttttaaaaattcagatgagttagaagctttttatcccttcctctcaagaaaatattctttcaccctgtctctcaaaccacctagaactttagaggatccatctttaagggccggtgtggatgaatgagaaaatgcacctttctgacagtatctccactttacttaagaaaactagcaaatatatgaaaagacccttagtaccaaatacactcaattgcctttttaatgaatgtacttgtcttggataggttgctggtaaaccattttaaactattttttatagctgaagttcttcactactataaacatgtcttctgtactataaaatccatttaactggtgttcttaaaatcagagcgtccagaggaaattcttcctaaaactaggattcctgttcctttgtcttctcactcgcactctggcactgctccctctgaagtgcagtgggatctcgtgtgctttgtcttgattctgtgctgcgctgccgctgggcgatgcagaccacctgtcttctactgaaggacagtccgctgtctccagtgggggcagcagctgtcccccagcctcgatggagacactggggcagtctgccttgtctgtggagctgctctctctccctcatcccaccccaaatacttaaaatgacactacacccagacggcgcccagctggctgcagcacttgtagcatgcacatgactctggtagtaaccaacaaaaacttgttttatggattcctcgtttactgaggaaagggaacatgctggttctggaaaagccacaatattgaatctaaaaggaaaccgtttattgtttgatgaaagtttcactggttaaataaaaaactaaattaataactggagcctctaaatttattatccattatccagtgatggaaagttgtatttctcaatcatgcttagggccaaaataggtatataaaatgtgtcacagaaaaacacgcatttgcaacgttaacctaacgaaatttccatgaagaaccaagtcagggcagcatctccttagtcccagctcaggctctctgccttccagaggccgcttctccagtgactaacctcctcctctggctcctccttgcagacagttatcccttgtttagaacacgaatttccatttacctggtgggaacacgaaacaggagtctcttctgttctgcaagtttgatgggtaagaggtagccttttttcaaagtaggatttcctttttcaactgttccaggaaagaatctctaagactgggtagctcacagccagccaaaggcagctacatttccacagaagcccgtccgctgcctccgtggcttctccagccattgaactggtcccacacgcaccccaggccccactcctcggcagtttcaggtgtagctgtggggcccgttcctaggtctgtactcactttagggaggcttcactgactaggctttcctcctgcatgttgaatttccttcagctttaagaggaagagtggaataaatattctaagtgatttaatgcactttgacttgtataaaactttctgtgttagcgacggtatctatagccctttatacgagcgatggatcttgagctctccttccatgttgtaaatagggattgtattcttgaaaactgctgtagcaaattcatctgtggtgcaatacactttttgattaaagctcttcaatccagatgcaactacaatggattttactagtttggtgtgtcagtatttctttgactcattaaatctggtattttgtgtctcataaaaaaaaaaaaaaaaaa

SEQ ID NO: 1630 - DNA, 2140 bp, Homo Sapiens
  NM_002079
gcgttccttctcccctgtgccttcgtcgtcagaagctggcgattggttaatcgcgttgccaagctttggacgcggctcgaccattggaggccgcgggcccgcccccgccggctaggtgaaggtgagtgtctcctccagtcgcaacggccagacctgacctgccagctccgggcgtggggtgaaatctcttgattcctagtctctcgatatggcacctccgtcagtctttgccgaggttccgcaggcccagcctgtcctggtcttcaagctcactgccgacttcagggaggatccggacccccgcaaggtcaacctgggagtgggagcatatcgcacggatgactgccatccctgggttttgccagtagtgaagaaagtggagcagaagattgctaatgacaatagcctaaatcacgagtatctgccaatcctgggcctggctgagttccggagctgtgcttctcgtcttgcccttggggatgacagcccagcactcaaggagaagcgggtaggaggtgtgcaatctttggggggaacaggtgcacttcgaattggagctgatttcttagcgcgttggtacaatggaacaaacaacaagaacacacctgtctatgtgtcctcaccaacctgggagaatcacaatgctgtgttttccgctgctggttttaaagacattcggtcctatcgctactgggatgcagagaagagaggattggacctccagggcttcctgaatgatctggagaatgctcctgagttctccattgttgtcctccacgcctgtgcacacaacccaactgggattgacccaactccggagcagtggaagcagattgcttctgtcatgaagcaccggtttctgttccccttctttgactcagcctatcagggcttcgcatctggaaacctggagagagatgcctgggccattcgctattttgtgtctgaaggcttcgagttcttctgtgcccagtccttctccaagaacttcgggctctacaatgagagagtcgggaatctgactgtggttggaaaagaacctgagagcatcctgcaagtcctttcccagatggagaagatcgtgcggattacttggtccaatccccccgcccagggagcacgaattgtggccagcaccctctctaaccctgagctctttgaggaatggacaggtaatgtgaagacaatggctgaccggattctgaccatgagatctgaactcagggcacgactagaagccctcaaaacccctgggacctggaaccacatcactgatcaaattggcatgttcagcttcactgggttgaaccccaagcaggttgagtatctggtcaatgaaaagcacatctacctgctgccaagtggtcgaatcaacgtgagtggcttaaccaccaaaaatctagattacgtggccacctccatccatgaagcagtcaccaaaatccagtgaagaaacaccacccgtccagtaccaccaaagtagttctctgtcatgtgtgttccctgcctgcacaaacctacatgtacataccatggattagagacacttgcaggactgaaaggctgctctggtgaggcagcctctgtttaaaccggccccacatgaagagaacatcccttgagacgaatttggagactgggattagagcctttggaggtcaaagcaaattaagatttttatttaagaataaaagagtactttgatcatgagacataggtatcttgtccctctcactaaaaaggagtgttgtgtgtggcggccacgtgcttctatgtggtgtttgactctgtacaaattctagtcccaaagatcaagttgtctgaaggagccaaagtgtgaatgtgggtgtcggctgcggcattaaattcatcatctcaacccagagtgtctggtctccctgctctttctgcatggttgtgtccctagtcctaagctttggttctttagggtgactgtggtaagaaggatatttaatcatgacatgcacggacacgtacatatttaactgaaacaagttttaccaaacagtatttactcgtgatgtgcgtagtgcattctgatatttttgagccattctattgtgttctacttcacctaaaaaaataaaataaaaatgttgatcaagaaaaaaaaaaaaaa

SEQ ID NO: 1631 - DNA, 2473 bp, Homo Sapiens
  NM_002080
tctggcccagggaagtccctgtccttaccttcagcaggagccggttccctgtgtgtgtgtccgctcgccctctgctccgtcctgcggctgcccactgccctcctacggtccaccatggccctgctgcactccggccgcgtcctccccgggatcgccgccgccttccacccgggcctcgccgccgcggcctctgccagagccagctcctggtggacccatgtggaaatgggacctccagatcccattctgggagtcactgaagcctttaagagggacaccaatagcaaaaagatgaatctgggagttggtgcctaccgggatgataatggaaagccttacgttctgcctagcgtccgcaaggcagaggcccagattgccgcaaaaaatttggacaaggaatacctgcccattgggggactggctgaattttgcaaggcatctgcagaactagccctgggtgagaacagcgaagtcttgaagagtggccggtttgtcactgtgcagaccatttctggaactggagccttaaggatcggagccagttttctgcaaagattttttaagttcagccgagatgtctttctgcccaaaccaacctggggaaaccacacacccatcttcagggatgctggcatgcagctacaaggttatcggtattatgaccccaagacttgcggttttgacttcacaggcgctgtggaggatatttcaaaaataccagagcagagtgttcttcttctgcatgcctgcgcccacaatcccacgggagtggacccgcgtccggaacagtggaaggaaatagcaacagtggtgaagaaaaggaatctctttgcgttctttgacatggcctaccaaggctttgccagtggtgatggtgataaggatgcctgggctgtgcgccacttcatcgaacagggcattaatgtttgcctctgccaatcatatgccaagaacatgggcttatatggtgagcgtgtaggagccttcactatggtctgcaaagatgcggatgaagccaaaagggtagagtcacagttgaagatcttgatccgtcccatgtattccaaccctcccctcaatggggcccggattgctgctgccattctgaacaccccagatttgcgaaaacaatggctgcaagaagtgaaagtcatggctgaccgcatcattggcatgcggactcaactggtctccaacctcaagaaggagggttccacccacaattggcaacacatcaccgaccaaattggcatgttctgtttcacagggctaaagcctgaacaggtggagcggctgatcaaggagttctccatctacatgacaaaagatggccgcatctctgtggcaggggtcacctccagcaacgtgggctaccttgcccatgccattcaccaggtcaccaagtaatgtccctggtgcgaggaaacagagacaacctttctgtcttcagcctctgctattgagagcttcacacagacaatgagagagggtggatggtggtgagtggatcatttctttcagccacagtgtgtaacactcagcatttgaatgtttctcagaaaagaacatgtagtgacacagggcagaggcatccatggctggcgtctggaatattaaaccaaactctccccggtccttttttctccaacttttctcaaagagtttacatgtgcaagaaagtcatcgcaccaaaaaacctgtcaattatgccattgcaatatttcagaagctttaactgaagtgtcaggttcctcgtgagaaacagcacacgttagaggctttgagagaaggcctagttctgtcatgagtagtcggcctcgtgtctgtcctcccatcttggaacaaccttatcaacaggccgcactgcagaaatgatgttttatgaaaaccaatgaggctgctgccactccagcaagggaaataatgcagtttcctgtcttatttaagaaaaagagaaggctctcttttctcccttgtcattgccgttcttttccttacacgcaaagattttttaactattgcagattttcatcccattctactgcttgattgaccatcaactccatcctatcgagatttatttaagaatgaagaacataattttctgctgatgctgtaccctcacccttttcagcaaagaatagtggagagtaggaaactgtactttatctcggcatcctcttgaatgatagtgcaagtttctccagttgggatgttgtctctgcccggttggacctcctccctttgttgaatgtggtgtgcagcctctcatctcacactgtgagtccagcggcgcagggtggtaccaggaaagaggatattctaggctttgcgtgctgctagctgggttcaggcttcacccactggaaagaaccaccatctgctctaaccatgtagacttattgcggcctggtttctctgttacaataaaattactgtagacccaaaaaaaaaaaaaaaaaaaaaaaaaaaa

SEQ ID NO: 1632 - DNA, 2952 bp, Homo Sapiens
  NM_002082
cggctggctgcggcggccggggaggccggggaggccgcggcgcggtcactgcgagccgagccgagccgcgccgagccgcgccgatcgccatccggcctcggcactcgcgcgcgatcccggccggcggcgcggcccggcgggccaggcggcgccacagcccatggagctcgagaacatcgtagcgaacacggtgctactcaaggcccgggaaggtggcggtggaaatcgcaaaggcaaaagcaagaaatggcggcagatgctccagttccctcacatcagccagtgcgaagagctgcggctcagcctcgagcgtgactatcacagcctgtgcgagcggcagcccattgggcgcctgctgttccgagagttctgtgccacgaggccggagctgagccgctgcgtcgccttcctggatggggtggccgagtatgaagtgaccccggatgacaagcggaaggcatgtgggcggcagctaacgcagaattttctgagccacacgggtcctgacctcatccctgaggtcccccggcagctggtgacgaactgcacccagcggctggagcagggtccctgcaaagaccttttccaggaactcacccggctgacccacgagtacctgagcgtggccccttttgccgactacctcgacagcatctacttcaaccgtttcctgcagtggaagtggctggaaaggcagccagtgaccaaaaacaccttcaggcaataccgagtcctgggcaaaggtggctttggggaggtgtgcgcctgccaggtgcgggccacaggtaagatgtatgcctgcaagaagctagagaaaaagcggatcaagaagcggaaaggggaggccatggcgctgaacgagaagcagatcctggagaaagtgaacagtaggtttgtagtgagcttggcctacgcctatgagaccaaggacgcgctgtgcctggtgctgacactgatgaacgggggcgacctcaagttccacatctaccacatgggccaggctggcttccccgaagcgcgggccgtcttctacgccgccgagatctgctgtggcctggaggacctgcaccgggagcgcatcgtgtacagggacctgaagcccgagaacatcttgctggatgaccacggccacatccgcatctctgacctgggactagctgtgcatgtgcccgagggccagaccatcaaagggcgtgtgggcaccgtgggttacatggctccggaggtggtgaagaatgaacggtacacgttcagccctgactggtgggcgctcggctgcctcctgtacgagatgatcgcaggccagtcgcccttccagcagaggaagaagaagatcaagcgggaggaggtggagcggctggtgaaggaggtccccgaggagtattccgagcgcttttccccgcaggcccgctcactttgctcacagctcctctgcaaggaccctgccgaacgcctggggtgtcgtgggggcagtgcccgcgaggtgaaggagcaccccctctttaagaagctgaacttcaagcggctgggagctggcatgctggagccgccgttcaagcctgacccccaggccatttactgcaaggatgttctggacattgaacagttctctacggtcaagggcgtggagctggagcctaccgaccaggacttctaccagaagtttgccacaggcagtgtgcccatcccctggcagaacgagatggtggagaccgagtgcttccaagagctgaatgtctttgggctggatggctcagttcccccagacctggactggaagggccagccacctgcacctcctaaaaagggactgctgcagagactcttcagtcgccaaaggattgctgtggaaactgcagcgacagcgaggaagagctccccacccgcctctagcccccagcccgaggcccccaccagcagttggcggtagcagctactccgagcgccgtttacagttttgcacagtgatcttccccattgtccactcaagtcgtggcctggggaacacagacggagctgtccccagtgtcctccgtccctcagcccctggcctggctgagtttggcagggcctgggccatccctgggacaaaggtgcgtcccttcagctcttctccgtggagctcggggctttctgtatttatgtatttgtacgaatgtatatagcgaccagagcattcttaattcccgccgcagacctggcgcccccgccttggctcctgggggcagccagccctggctgggagagcgggagctggcagaggagccactgccaaactcaaggctcctctggcccagcttggatggctgagggtggtcacacccctgagccttcagcactgtgctggccaccccggcctctgagtaagactcgtgcctccccctgctgccctgggctcaggctgctaccctctggggcccaaagctgtcccttctcagtgcttgtcagcgctgggtctggggcctctgtatgccctaggcctgtgccaaagtggccagagattgggctgcctgtgatacccatcagcccactgccccggccggcccagataggtctgcctctgccttccagctcccacagcctggtccctgatactgggctctgtcctgcagacacctctttcagaaacgcccaagcccagcccctaggagggggtggggcatccctggtcaaccctcaaacattccggactcccctcataacaatagacacatgtgcccagcaataatccgccccttcctgtgtgcgcctgtggggtgcgtgcgcgcgcgtgtgtacctgtgtgggtgaaggggatagggcgaggctgtgcctgtgccccaggtcccagccctggcccttcccagactgtgatggccatcctggtcccagtgttagggtagcatgggattacagggccctgttttttccatatttaaagccaatttttattactcgttttgtccaacgtaa

SEQ ID NO: 1633 - DNA, 3303 bp, Homo Sapiens
  NM_002086
agttctcgcgggacaccgacggggagcggaagccaggaggtattgctgcttcggcgaccgggcggcggcagcggcggcggcggctgtggcagagtctgtgcctgtggcggtgacggcggcgggagcaagcgctgccctcgcagagcagccttggggtcgccggccgctcgcagcgttgtggaggggcgggccggacgctgagcggagcagctgcgccacgggtggcattgtgtgtcccagagtgccggagcgagtcccagaagagaggcgaggctaagcccagagcgctgggttgcttcagcagggaagactcccttccccctgcttcaggctgctgagcactgagcagcgctcagaatggaagccatcgccaaatatgacttcaaagctactgcagacgacgagctgagcttcaaaaggggggacatcctcaaggttttgaacgaagaatgtgatcagaactggtacaaggcagagcttaatggaaaagacggcttcattcccaagaactacatagaaatgaaaccacatccgtggttttttggcaaaatccccagagccaaggcagaagaaatgcttagcaaacagcggcacgatggggcctttcttatccgagagagtgagagcgctcctggggacttctccctctctgtcaagtttggaaacgatgtgcagcacttcaaggtgctccgagatggagccgggaagtacttcctctgggtggtgaagttcaattctttgaatgagctggtggattatcacagatctacatctgtctccagaaaccagcagatattcctgcgggacatagaacaggtgccacagcagccgacatacgtccaggccctctttgactttgatccccaggaggatggagagctgggcttccgccggggagattttatccatgtcatggataactcagaccccaactggtggaaaggagcttgccacgggcagaccggcatgtttccccgcaattatgtcacccccgtgaaccggaacgtctaagagtcaagaagcaattatttaaagaaagtgaaaaatgtaaaacacatacaaaagaattaaacccacaagctgcctctgacagcagcctgtgagggagtgcagaacacctggccgggtcaccctgtgaccctctcactttggttggaactttagggggtgggagggggcgttggatttaaaaatgccaaaacttacctataaattaagaagagtttttattacaaattttcactgctgctcctctttcccctcctttgtcttttttttcatccttttttctcttctgtccatcagtgcatgacgtttaaggccacgtatagtcctagctgacgccaataataaaaaacaagaaaccaagtgggctggtattctctctatgcaaaatgtctgttttagttggaatgactgaaagaagaacagctgttcctgtgttcttcgtatatacacacaaaaaggagcgggcagggccgctcgatgcctttgctgtttagcttcctccagaggaggggacttgtaggaatctgccttccagcccagacccccagtgtattttgtccaagttcacagtagagtagggtagaaggaaagcatgtctctgcttccatggcttcctgagaaagcccacctgggctgggcgcggtggctcacgcctgtaatcccagcactttgggaggccaaggtgggcggatcacaaggtcaggagttcgagaccaacctagccaacatggtgaaaccccgtctctactaaaaataagaaattagccgggtgtggcacgcacctgtagtcccagctacttgggagcctgaggcaggagaatcgcttgaacctgggaagtggaggttgagtgagccgggaccgtgccattgtactccagcctgggtgacagagcgagattccgtctcaaaaaaaaaaaaaaaaagcccacctgaaagcctgtctctttccactttgttggcccttccagtgggattatcgagcatgttgttttttcatagtgcctttttccttatttcaagggttgcttctgagtggtgttttttttttttttttaatttgttttgttttaaaataagttaaaggcagtccagagcttttcagccaatttgtctcctactctgtgtaaatatttttccctccgggcaggggagccagggtagagcaaaggagacaaagcaggagtggaaggtgaggcgttctcctgcttgtactaagccaggaggctttaagctccagctttaagggttgtgagccccttgggggttcagggaactgcttgcccagggtgcagtgtgagtgtgatgggccaccggggcaagagggaaggtgaccgcccagctctcccacatcccactggatctggcttacaggggggtcggaagcctgtcctcaccgtctcgggggttgtggcccccgccccctccctatatgcacccctggaaccagcaagtcccagacaaggagagcggaggaggaagtcatgggaacgcagcctccagttgtagcaggtttcactattcctatgctggggtacacagtgagagtactcacttttcacttgtcttgctcttagattgggccatggctttcatcctgtgtcccctgacctgtccaggtgagtgtgagggcagcactgggaagctggagtgctgcttgtgcctcccttcccagtgggctgtgttgactgctgctccccacccctaccgatggtcccaggaagcagggagagttggggaaggcaagattggaaagacaggaagaccaaggcctcggcagaactctctgtcttctctccacttctggtcccctgtggtgatgtgcctgtaatctttttctccacccaaaccccttcccacgacaaaaacaagactgcctccctctcttccgggagctggtgacagccttgggcctttcagtcccaaagcggccgatgggagtctccctccgactccagatatgaacagggcccaggcctggagcgtttgctgtgccaggaggcggcagctcttctgggcagagcctgtccccgccttccctcactcttcctcatcctgcttctcttttcctcgcagatgataaaaggaatctggcattctacacctggaccatttgattgttttattttggaattggtgtatatcatgaagccttgctgaactaagttttgtgtgtatatatttaaaaaaaaaatcagtgtttaaataaagacctatgtacttaatcctttaactctgcggatagcatttggtaggtagtgattaactgtgaataataaatacacaatgaattcttca

SEQ ID NO: 1634 - DNA, 2323 bp, Homo Sapiens
  NM_002087
ggcgagaggaagcagggaggagagtgatttgagtagaaaagaaacacagcattccaggctggccccacctctatattgataagtagccaatgggagcgggtagccctgatccctggccaatggaaactgaggtaggcgggtcatcgcgctggggtctgtagtctgagcgctacccggttgctgctgcccaaggaccgcggagtcggacgcaggcagaccatgtggaccctggtgagctgggtggccttaacagcagggctggtggctggaacgcggtgcccagatggtcagttctgccctgtggcctgctgcctggaccccggaggagccagctacagctgctgccgtccccttctggacaaatggcccacaacactgagcaggcatctgggtggcccctgccaggttgatgcccactgctctgccggccactcctgcatctttaccgtctcagggacttccagttgctgccccttcccagaggccgtggcatgcggggatggccatcactgctgcccacggggcttccactgcagtgcagacgggcgatcctgcttccaaagatcaggtaacaactccgtgggtgccatccagtgccctgatagtcagttcgaatgcccggacttctccacgtgctgtgttatggtcgatggctcctgggggtgctgccccatgccccaggcttcctgctgtgaagacagggtgcactgctgtccgcacggtgccttctgcgacctggttcacacccgctgcatcacacccacgggcacccaccccctggcaaagaagctccctgcccagaggactaacagggcagtggccttgtccagctcggtcatgtgtccggacgcacggtcccggtgccctgatggttctacctgctgtgagctgcccagtgggaagtatggctgctgcccaatgcccaacgccacctgctgctccgatcacctgcactgctgcccccaagacactgtgtgtgacctgatccagagtaagtgcctctccaaggagaacgctaccacggacctcctcactaagctgcctgcgcacacagtgggggatgtgaaatgtgacatggaggtgagctgcccagatggctatacctgctgccgtctacagtcgggggcctggggctgctgcccttttacccaggctgtgtgctgtgaggaccacatacactgctgtcccgcggggtttacgtgtgacacgcagaagggtacctgtgaacaggggccccaccaggtgccctggatggagaaggccccagctcacctcagcctgccagacccacaagccttgaagagagatgtcccctgtgataatgtcagcagctgtccctcctccgatacctgctgccaactcacgtctggggagtggggctgctgtccaatcccagaggctgtctgctgctcggaccaccagcactgctgcccccagggctacacgtgtgtagctgaggggcagtgtcagcgaggaagcgagatcgtggctggactggagaagatgcctgcccgccgggcttccttatcccaccccagagacatcggctgtgaccagcacaccagctgcccggtggggcagacctgctgcccgagcctgggtgggagctgggcctgctgccagttgccccatgctgtgtgctgcgaggatcgccagcactgctgcccggctggctacacctgcaacgtgaaggctcgatcctgcgagaaggaagtggtctctgcccagcctgccaccttcctggcccgtagccctcacgtgggtgtgaaggacgtggagtgtggggaaggacacttctgccatgataaccagacctgctgccgagacaaccgacagggctgggcctgctgtccctaccgccagggcgtctgttgtgctgatcggcgccactgctgtcctgctggcttccgctgcgcagccaggggtaccaagtgtttgcgcagggaggccccgcgctgggacgcccctttgagggacccagccttgagacagctgctgtgagggacagtactgaagactctgcagccctcgggaccccactcggagggtgccctctgctcaggcctccctagcacctccccctaaccaaattctccctggaccccattctgagctccccatcaccatgggaggtggggcctcaatctaaggccttccctgtcagaagggggttgtggcaaaagccacattacaagctgccatcccctccccgtttcagtggaccctgtggccaggtgcttttccctatccacaggggtgtttgtgtgtgtgcgcgtgtgcgtttcaataaagtttgtacactttcaaaaaaaaaaaaaaaaaa

SEQ ID NO: 1635 - DNA, 7134 bp, Homo Sapiens
  NM_002093
cgggcttgtgccgccgccgccgccgccgccgcccgggccaagtgacaaaggaaggaaggaagcgaggaggagccggccccgcagccgctgacagggctctgggctggggcaaagcgcggacacttcctgagcgggcaccgagcagagccgaggggcgggagggcggccgagctgttgccgcggacgggggagggggccccgagggacggaagcggttgccgggttcccatgtccccggcgaatggggaacagtcgaggagccgctgcctggggtctgaagggagctgcctccgccaccgccatggccgctggatccagccgccgcctgcagctgctcctggcgcaatgaggagaggagccgccgccaccgccaccgcccgcctctgactgactcgcgactccgccgccctctagttcgccgggcccctgccgtcagcccgccggatcccgcggcttgccggagctgcagcgtttcccgtcgcatctccgagccaccccctccctccctctccctccctcctacccatccccctttctcttcaagcgtgagactcgtgatccttccgccgcttcccttcttcattgactcggaaaaaaaatccccgaggaaaatataatattcgaagtactcattttcaatcaagtatttgcccccgtttcacgtgatacatatttttttaggatttgccctctcttttctctcctcccaggaaagggaggggaaagaattgtattttttcccaagtcctaaatcatctatatgttaaatatccgtgccgatctgtcttgaaggagaaatatatcgcttgttttgttttttatagtatacaaaaggagtgaaaagccaagaggacgaagtctttttctttttcttctgtgggagaacttaatgctgcatttatcgttaacctaacaccccaacataaagacaaaaggaagaaaaggaggaaggaaggaaaaggtgattcgcgaagagagtgatcatgtcagggcggcccagaaccacctcctttgcggagagctgcaagccggtgcagcagccttcagcttttggcagcatgaaagttagcagagacaaggacggcagcaaggtgacaacagtggtggcaactcctgggcagggtccagacaggccacaagaagtcagctatacagacactaaagtgattggaaatggatcatttggtgtggtatatcaagccaaactttgtgattcaggagaactggtcgccatcaagaaagtattgcaggacaagagatttaagaatcgagagctccagatcatgagaaagctagatcactgtaacatagtccgattgcgttatttcttctactccagtggtgagaagaaagatgaggtctatcttaatctggtgctggactatgttccggaaacagtatacagagttgccagacactatagtcgagccaaacagacgctccctgtgatttatgtcaagttgtatatgtatcagctgttccgaagtttagcctatatccattcctttggaatctgccatcgggatattaaaccgcagaacctcttgttggatcctgatactgctgtattaaaactctgtgactttggaagtgcaaagcagctggtccgaggagaacccaatgtttcgtatatctgttctcggtactatagggcaccagagttgatctttggagccactgattatacctctagtatagatgtatggtctgctggctgtgtgttggctgagctgttactaggacaaccaatatttccaggggatagtggtgtggatcagttggtagaaataatcaaggtcctgggaactccaacaagggagcaaatcagagaaatgaacccaaactacacagaatttaaattccctcaaattaaggcacatccttggactaaggattcgtcaggaacaggacatttcacctcaggagtgcgggtcttccgaccccgaactccaccggaggcaattgcactgtgtagccgtctgctggagtatacaccaactgcccgactaacaccactggaagcttgtgcacattcattttttgatgaattacgggacccaaatgtcaaactaccaaatgggcgagacacacctgcactcttcaacttcaccactcaagaactgtcaagtaatccacctctggctaccatccttattcctcctcatgctcggattcaagcagctgcttcaacccccacaaatgccacagcagcgtcagatgctaatactggagaccgtggacagaccaataatgctgcttctgcatcagcttccaactccacctgaacagtcccgagcagccagctgcacaggaaaaaccaccagttacttgagtgtcactcagcaacactggtcacgtttggaaagaatattaaaaagagaaaaaaatcctgttcattttagtgttcaatttttttattattattgttgttcttatttaaccttgtaaaatatctataaatacaaaccaatttcattgtattctcactttgagggagatccagggggtgggaggggttgtggggagggggaaagcggagcactagaacatacaatctctctcccacgacaatctttttttattaaaagtctgctgttgtatactttaaaaacaggactcctgcctcatgccccttccacaaaagaagaaaacctttttctgtgctgatgggtttttttgaactttgttttcttttaaagtctagtgtgagactttggtatagtgcacagcttgaaattggttgggagcttagcaggtataactcaacggggacttaaatgtcacttgtaaaattaatccatatcttcgggtatttatagacttgcctttggcatgttggtggcaggtgtggcagacaaagaaatgtgtatcattcgtaacccagggaggtcaataaagtttggaactctacagggaagattcttagtagatttgttaaggttttgttttgctctcagttagtgctagtgatgtagaggcttgtacaggaggctgccagaggggaagcagcaagcaagactcaggcacacatgctctacaggtggctctttgtttgcctgaccaaagttctttgcaaatcttagcacagtttcaaactagtgacctgggaggagatggaaggggtgttgagcaggctgagctagctgctgaggtcaaaggctgatgagcccagaggaaggggacaggtcagggatacatctcaccactgtgaataagtttgtccagatttttttctaaagttacttcccttggaaagatacacttgagaggacattgtagttaaataatgtgaactgtaacagtcatctactggtttatttttcatattttttaattgaaaattgagcttgcagaaatagccacattctacacatagttctaattttaaatccaaatctagaatctgtatttaatttgttttttaacctcatgctttttacatttatttattgatgcatgtcagatggtagaaatattaaaaactacacatcagaatgatacagtcacttatacctgctgactttataggaaagctgatgatataaatgtgtgtatatatgttatatatacatatattcaatactgcctttttttttgtctacagtatcaaaattgactggttgaagcatgagaagaatgtttcccccacacccagttaagagtttttgtgtctgttttctttgtgtatcagtgaacgatgttaagaatcagtctctctttttgaagaaaaagcaatattccttggaaagcaaggagaattgaaggactatgtttgccgtgaggaaatagattttcatgactagtttgttttatacttttaaggttggcatctatgtgggccttatatactctaaaatgaactttagtcaccttggtgcttatgggccattacttgacctatgaatctttaaggcacaatcagttgtactttacatttaaagatcacttgagtgatggccgcctttccctcctacccgctccttccccacatgccttccaaggttagctggtaactgtagggctgcagagctgagcccatggttgtgtgtaacttgccctcaccctcctcattgccaccttaggtcactttatgggtctcgtcctccagagggttcggaagtggagtctgttggcagccctcctgcaggccctagcaccctgtcctgctccttaactgtgtgtgtgactctccaagagagttgtcctgcctgctgaagtgaaccagtacccagaaagacaactgtgagccatcttggttttcactcgctgtttagctgaggtcttgggccacaaaaggggtttcacaaacctctggatatatcagagtttatgagaaaggaaacatgctcagtcaaaccaaatcaaacaaattgaattttatgttttataaagtgcttctgaaagctaagatttgaaagaagtctgaaatcaaagtatttggcagcataactccttaaaggtagtggcgttgatagaccattttcagacagaatttataaagaatctgaaaaggcaggtctgtgatagagaaatggacctgcattcagatccaactgcccagcaagcgtttggatgcagacactgctctggacgtggtatactccccagagtccataaaaatcagtgcttattttaggaaacaggttgccccccacaactggggtaaaagaagagagaaaagtcacgcttttctctcatttcattgtgtgtgcatgtgtgcgtgtgtgtgtgtgtgtgtgtgtgctgagatgtgtgatttttctttctcaaggatcatggtgggatcacagaactcttttatacaagtgagatccaggtctctgaatatctttttgtatataataataataaaaagctcctcaccaaattcaagcttgtacattatattttctttctgtgtttttaaatttaagttttattgttttgtatgtaaatatgtggacccaggaactgttattaatgagcaaaaagttactgttcagggcagtgattctgtttaataatcagacaaaatgtagacgagctttttaaagccatatagttttaactctgtacagtaggtaccggcctgtattattgtaacaataactctagcaatgtatagtgtatctatatagtttggagtgccttcgcttccatgtgtttttttttttaatttgttcttttttaaattttaattggtttcctttatccatgtctccctgtccaccccctttccctttgaaataataactcactcataacagtatctttgccccttccacagttaagtttcagtgataccatactcaggagtgggaagaggaaatcatattcgtaatttcatttcgttgaagccctgcctttgttttggttctgaatgtctttcctcctcggtagcagtgagaccggtttcatttcatacttagtccattcagggacttagtgtagcaccagggagccctagagctggaggatatcgaatagattaaattttgctcgtctcttccacaagccctaaccatgggtcttaaaaacagcagattctgggagccttccatgctctctctctctcctcttttatctacttccctcccaaatgagagagtgacagagaattgtttttttataaatcgaagtttcttaatagtatcaggttttgatacgtcagtggtctaaaatgctatagtgcaattactagcagttactgcacggagtgccaccgtgccaatagaggactgttgttttaacaagggaactcttagcccatttcctccctcccgccatctctacccttgctcaatgaaatatcattttaatttcttttaaaaaaaatcagtttaattcttactgtgtgcccaacacgaaggccttttttgaaagaaaaatagaatgttttgcctcaaagtagtccatataaaatgtcttgaatagaagaaaaaactaccaaaccaaaggttactatttttgaaacatcgtgtgttcattccagcaaggcagaagactgcaccttctttccagtgacatgctgtgtcattttttttaagtcctcttaatttttagacacatttttggtttatgttttaacaatgtatgcctaaccagtcatcttgtctgcaccaatgcaaaggtttctgagaggagtattctctatccctgtggatatgaagacactggcatttcatctatttttccctttcctttttaaaggatttaactttggaatcttccaaaggaagtttggccaatgccagatccccaggaatttggggggttttctttcttttcaactgaaattgtatctgattcctactgttcatgttagtgatcatctaatcacagagccaaacacttttctcccctgtgtggaaaagtaggtatgctttacaataaaatctgtcttttctggtagaaacctgagccactgaaaataaaagagacaactagaagcacagtagagtcccagactgagatctacctttgagaggctttgaaagtaatccctggggtttggattattttcacaagggttatgccgttttattcaagtttgttgctccgttttgcacctctgcaataaaagcaaaatgacaaccagtacataaggggttagcttgacaaagtagacttccttgtgttaatttttaagtttttttttccttaactatatctgtctacaggcagatacagatagttgtatgaaaatctgcttgcctgtaaaatttgcatttataaatgtgttgccgatggatcacttgggcctgtacacataccaattagcgtgaccacttccatcttaaaaacaaacctaaaaaacaaaatttattatatatatatatatatatatataaaggactgtgggttgtatacaaactattgcaaacacttgtgcaaatctgtcttgatataaaggaaaagcaaaatctgtataacattattactacttgaatgcctctgtgactgatttttttttcattttaaatataaacttttttgtgaaaagtatgctcaatgttttttttccctttccccattcccttgtaaatacattttgttctatgtgacttggtttggaaatagttaactggtactgtaatttgcattaaataaaaagtaggttagcctggaaatgaaattaaaaaaaaaaaaaaaaaa

SEQ ID NO: 1636 - DNA, 2551 bp, Homo Sapiens
  NM_002096
actgcgcactgaggtggccacagtcgctaagaaggttgccatcgcgacgcggctgctcgagggtttcgcttccgggttaggcggccgcagaagcgtagaccgagtagcttgagcgcctcttccggttaccttttcccagcgccagaggcgcctagggttggggtcctcgctcaggcacagagacccgacaccgagcggcggcttccccgggatcgagggacgcgcacgccagaggagacgaaaggaacccgggtcggaccagatcggaaccactgaccattgcccatggcggccctaggccctagcagccagaatgtcactgaatacgtcgttcgagttcctaagaatacaaccaaaaaatataacatcatggcttttaatgcagccgacaaagtcaactttgctacgtggaatcaggctcggctggagcgggacttgagcaacaagaaaatctaccaagaggaggagatgcccgaatcgggcgcgggcagtgagttcaaccgcaagcttcgggaggaggctcggaggaagaagtacggcatcgtcctcaaggagttccggcccgaggaccagccctggctgctccgggtcaacggcaaatcaggcaggaagttcaagggcatcaagaagggaggcgtaacagagaacacgtcctactacatcttcacccagtgccccgacggggccttcgaggccttccccgtgcacaactggtacaatttcacaccgctggcccggcatcgcacgctcactgccgaggaggccgaggaggagtgggagaggaggaacaaggtgctgaaccacttcagcatcatgcagcagcggcggctcaaggatcaggaccaggacgaggatgaggaggagaaggagaaacgtggccgcaggaaggcgagcgagctgcgcatccacgacctggaggacgacctggagatgtcgtccgatgccagtgatgccagtggtgaggaggggggcagagtccccaaggccaagaagaaggcgccgctggccaagggcggcaggaaaaagaagaagaagaagggttcagacgacgaggccttcgaggacagcgatgatggggacttcgagggccaagaggtggactacatgtcagacggctccagtagctcccaagaagagcctgagagcaaggccaaggcgccgcagcaggaggaggggcccaagggtgtcgatgagcagagcgacagtagtgaggagagtgaggaggagaagccgcctgaggaggacaaggaggaggaggaggagaagaaggcacccaccccgcaggagaagaagcgcaggaaagacagcagcgaggagtcggacagctcagaggagagcgacattgacagcgaggcctcctcagccctcttcatggcgaagaagaagacgccacccaagagagagcggaagccgtcgggagggagctcaaggggcaacagccgcccaggcacgcccagcgcagagggtggcagcacctcctccaccctgcgggcggctgccagcaaactcgagcaagggaagcgggtgagcgagatgcctgcagccaagcggttgcggctggacacgggaccccagagcctgtctgggaagtcgacaccccagccaccatcaggcaagacaacacccaacagcggcgacgtgcaggtgactgaggatgccgtgcgccgctacctgacacggaagcccatgaccactaaggacctgctgaaaaagttccagaccaagaagacagggctgagcagcgagcagacagtgaacgtgttggcccagatcctcaagcgactcaaccccgagcgcaagatgatcaacgacaaaatgcacttctccctcaaggagtgaggcttggtccaatacatggctctgccccccagaacttaaggctctcactgccccttcgccatcctagagtgaggctctgtccaatacatggctctgccctccagaacttcaggctctcagtgacccttcgacatcctgcttgctccctgactcccagggccccgtagttagcaattctggaaaagttaagccatctcctcctctggcccttccttctggaatcttcagatgcctgttaggccttcttattgtcctcctcctcctggctcggcctccctcacactgaccaagggcctgtgctgcccactgggtaacttctacagttctcccttccacttccctaagtctctcttcagctgtgacttatccaccacatagcccagtaagtcttcagttttggctgggcatgatggtgagcgcctgcagtcccagctacttgggaggctaagcccagttcaaggctgcagtgaactatgatggtgccactgcattccagcctgggtgacagaatgaaatcctggcacaaaaaaaaaaaaaaagtagccaggcatggtggcgggagcctgttgtcccagctgttccgtaggctgaggcacgagattcacttgaacctgggaggtggaggttgctgtgagctgacaccacgccactgcactccagcctgggtgacagtgagactctgtctcaataaataaaaaataataataaattg

SEQ ID NO: 1637 - DNA, 2287 bp, Homo Sapiens
  NM_002098
agtcacccaggagatgatggagaggctgatcaggcctcctggaaagggaggaagagggccctagttggagagatccatcagcagaagccagggaggagatacagacccttgctccctgacgctcctcagggctagcatggggcaggagtttagctgggaggaggcggaggcagctggcgagatagatgtggcggagctccaggagtggtacaagaagtttgtgatggagtgccccagcggcacactctttatgcatgagtttaagcgcttcttcaaggtcacagacgatgaggaggcctcccagtatgtagagggcatgttccgagccttcgacaagaatggggacaacaccatcgacttcctggagtacgtggcagctctgaatctcgtgctgaggggcaccctggagcacaagctgaagtggacattcaagatctatgataaggatggcaatggctgcatcgaccgcctggagctactcaacattgtggagggaatttaccagctgaagaaagcctgccggcgagagctacaaactgagcaaggccagctgctcacacccgaggaggtcgtggacaggatcttcctcctggtggatgagaatggagatggccagctgtctctgaacgagtttgttgaaggtgcccgtcgggacaagtgggtgatgaagatgctgcagatggacatgaatcccagcagctggctcgctcagcagagacggaaaagtgccatgttctgaggagtctggggcccctccacgactccaggctcacccaggtttccagggtagtaggagggtccctggctcagcctgctcatgcccactcttcccctggtgttgacttcctggcaccccctgtgcagggctgagtggggatggggaagggctgctgggtttgaagtggccaacagggcatagtccattttggaggagtccctgggatggtgaagggaattcagttacttttcctgttcagccgctcctgggaggactgtgccttggctgggtggttgtggggctcccacagtttctgggtgttctcagttggaagcaagagccaactgaggggtgagggtcccacagaccaaatcagaaatgagaacacaaagactggtaggaggcaggggtgggagggtgttgagactgaagaaaaggcaggagttgccgggcacggtggctcacgcctgtaatcccagcactttgggaggccgaggcgggcagatcacgaggtcaggagatcgagaccatcctggctaacacggggtgaaaccccgtctctactaaaaatacaaaaaatcagccgggtgaggtggcgggcgcctgtagtcccagctactcaggaggctgaggcaagagaatggcgtgaaccccagggggccgagcctacagtgagccgagattgcgccactgcactccagcctggacgacagtgagactccgtctcaaaaaaaaaaaaagaaagaaaagaaaaggcaggagttttggggggcagggggcagcaataattctataacttccgggatgctgaggggcgttcatggggaggaccctggcctcctcctccccaaggcatcctcaccagtggtgtcaacaggaaaaatggcagcaaatacgctgcaggctgtggtctttctgcctttgaaagggtcagctgtacttaaagggactgtttcagctctgcctgggtgctgctctgggaccccctgctgccaacccaccactcccccaacaatcctctctttccatccatatcccccagtatggaccttccacaactcccagccataagctgaatgtttctctttaaaggatggagaaaacttctgtctgtctctggcaagaattgggggactgttgactgggattgtgggctgggcttggcttctaactgctgtgtgacccaagacagccacttctcctccctaaccttggttatgtcttggcagcacagtgagcaggtcggactaggcgaacagttttggattattgtgtttttagatgtggaattattttttgttatataaactcttatgtgtaaccccaatatagaaactagattaaaagggagtctctctggttgaaaggggagctgagtaccctctggaactggaggcacctctgaaaaaagcaaactgaaaaccagtgccctgggtcactgttactcctataagacagtttaaagtgagacctggaaaaacatttgctttaccttgaatagataggtttttatgttggtatataagaaataaaactaacctattaaacctgaaaaaaaaaaaaaaaaaa

SEQ ID NO: 1638 - DNA, 2660 bp, Homo Sapiens
  NM_002099
gcaggaaggtgggcctggaagataacagctagcaggctaaggtcagacactgacacttgcagttgtctttggtagtttttttgcactaacttcaggaaccagctcatgatctcaggatgtatggaaaaataatctttgtattactattgtcagaaattgtgagcatatcagcattaagtaccactgaggtggcaatgcacacttcaacttcttcttcagtcacaaagagttacatctcatcacagacaaatgatacgcacaaacgggacacatatgcagccactcctagagctcatgaagtttcagaaatttctgttagaactgtttaccctccagaagaggaaaccggagaaagggtacaacttgcccatcatttctctgaaccagagataacactcattatttttggggtgatggctggtgttattggaacgatcctcttaatttcttacggtattcgccgactgataaagaaaagcccatctgatgtaaaacctctcccctcacctgacacagacgtgcctttaagttctgttgaaatagaaaatccagagacaagtgatcaatgagaatctgttcaccaaaccaaatgtggaaagaacacaaagaagacataagacttcagtcaagtgaaaaattaacatgtggactggacactccaataaattatatacctgcctaagttgtacaatttcagaatgcaattttcattataatgagttccagtgactcaatgatggggaaaaaaatctctgctcattaatatttcaagataaagaacaaatgtttccttgaatgcttgcttttgtgtgttagcataatttttagaattgtttgagaattctgatccaaaactttagttgaattcatctacgtttgtttaatattaacttaacctattctattgtattataatgatgattctgtcaaatgaaaggcttgaaatacctagatgaagtttagattttcttcctattgtaaacttttgagtctggtttcattgttttaaataaattaaggggacactaaagtcctatcattcatttccttcattgctgaacaggcaagatataatattacatgaatgattactatattttgttcacactaataaagcttatgctcagaaatgccatacacacacacacacacacacacaaacacacacatttatcatttaatgcataaatcaacacaaaaggttttcccattaatatgaaatattacatatatataagtgccatatttaaaataatttgtctaacagtagaactgtgtcggagcactcactgaagcttgcattccactgaaagagttatttgtgtaagtagagtatccggagaaggaaaagaacttacgacctttctttataacagaaactcaactctaaattcaacaagatgtgcaaaccggacatgcaggtgaatattttaataggttactataaggttctcaattaaattctttaatctgtccagtcccagtttctcttattaataaaactttggaaattgctttaaaccatttaaaggaaatttctagatatagaaactaaggactgtgactatacagctgtcactcatttgtagtaaaacttaaaaagcaaaaacaaaaaacaaaaaagaccttcctgtgatactttatttccgaactaataaaaatctatatgactttttattattgtgtgataaccaagtaaatgttttctattttgcatattttcaggcatggtaacagaaatttaccttttaataaattaaaaaatctaaattttaacctacttgtatgttcggagagtgtttttgtactatattgactacttaaaatagagaatgagactaagaagggaacatttctgttgatacatgttttttaaaagtaattttaagagcattattaggttaattaatccaattaatgacccaaatgccaaggtaattttaaatttacatttttaataaaagcaacatgttgaaacaagagagggtgagattaacctttttgctaaagtaatttacaagtcaaagacaggaagagatcagagtgaatgtgccttcttaaccagagctacagaatttagtgaataattaaagtacaaactgctttgacctccttgaacttttccaagcaatttctctgtacttctatatatgaatgtcttagccaattttctgctactataacagaatacgacagactgggtaatttaaaaagaaaagaaatttattttcttcctagttctggaggctgggaaggcgaagggcatggcactgacatctgccttgtaactgatgagaaccttcttactgcatgataacaaagcagcaaggcaagcaaaagcgtaagatgaagagagaggaaatgaagccaaacacatcctttcatcagaagcccattccctctataaggcgttattacatttatgagaatggagtcctcatgacctaatcgtgaccttaaaggcccctcccaacactgttacaatggcaattaaatttcaacaaaggttccagaggtgacattcgaatcagcaatgaaattttcatagttaaatttggtattcgtgggggaagaaatgaccatttcccttgtatttttataattaaatcagcaaaatattgtaataaagaaatctttcctgtgaagataccatgacccca

SEQ ID NO: 1639 - DNA, 527 bp, Homo Sapiens
  NM_002100
agttgtctttggtagtttttttgcactaacttcaggaaccagctcatgatctcaggatgtatggaaaaataatctttgtattactattgtcagaaattgtgagcatatcagcattaagtaccactgaggtggcaatgcacacttcaacctcttcttcagtcacaaagagttacatctcatcacagacaaatggagaaacgggacaacttgtccatcgtttcactgtaccagctcctgtagtgataatactcattattttgtgtgtgatggctggtattattggaacgatcctcttaatttcttacactattcgccgactgataaaggcatgaggatgtggcctgcatgctgcctgatcttgcctagaaccggctgcacctgctgttctcttgtttatgcaaactggctgcacctgctattcctttgcttatgcccctacccctggctatcctaattccctgttctcctgcctcactattactgtattctctacttctaaataaaaataaaacaaaatacaaaccgtt

SEQ ID NO: 1640 - DNA, 511 bp, Homo Sapiens
  NM_002102
agttgtctttggtagtttttttgcactaacttcaggagccagctcgtgatctcaggatgtatggaaaaataatctttgtattactattgtcaggaattgtgagcatatcagcatcaagtaccactggtgtggcaatgcacacttcaacctcttcttcagtcacaaagagttacatctcatcacagacaaatgggataacactcattaattggtgggcgatggctcgtgttatttttgaggtgatgcttgttgttgttggaatgatcatcttaatttcttactgtattcgatgactgataaaggcatgaggatgtggcctgcatgctgcctgatcttgcctagaaccagctgcacctgctgttctcttgcttatgcaaactggctgcacctgctattcctttgcttatgccccaacccttggctatcctaactccctgttctcctgcctattactgtattctctacttctaaataaaaataaaacaaaatacaaattaaaaaaaaaaaaaaa

SEQ ID NO: 1641 - DNA, 1074 bp, Homo Sapiens
  NM_002104
gatcaacacatttcatctgggcttcttaaatctaaatctttaaaatgactaagttttcttccttttctctgtttttcctaatagttggggcttatatgactcatgtgtgtttcaatatggaaattattggagggaaagaagtgtcacctcattccaggccatttatggcctccatccagtatggcggacatcacgtttgtggaggtgttctgattgatccacagtgggtgctgacagcagcccactgccaatatcggtttaccaaaggccagtctcccactgtggttttaggcgcacactctctctcaaagaatgaggcctccaaacaaacactggagatcaaaaaatttataccattctcaagagttacatcagatcctcaatcaaatgatatcatgctggttaagcttcaaacagccgcaaaactcaataaacatgtcaagatgctccacataagatccaaaacctctcttagatctggaaccaaatgcaaggttactggctggggagccaccgatccagattcattaagaccttctgacaccctgcgagaagtcactgttactgtcctaagtcgaaaactttgcaacagccaaagttactacaacggcgacccttttatcaccaaagacatggtctgtgcaggagatgccaaaggccagaaggattcctgtaagggtgactcagggggccccttgatctgtaaaggtgtcttccacgctatagtctctggaggtcatgaatgtggtgttgccacaaagcctggaatctacaccctgttaaccaagaaataccagacttggatcaaaagcaaccttgtcccgcctcatacaaattaagttacaaataattttattggatgcacttgcttcttttttcctaatatgctcgcaggttagagttgggtgtaagtaaagcagagcacatatggggtccatttttgcacttgtaagtcattttattaaggaatcaagttctttttcacttgtatcactgatgtatttctaccatgctggttttattctaaataaaatttagaagactcaaaaaaaaaaaaaaaaaaaaaaaaaaaaa

SEQ ID NO: 1642 - DNA, 951 bp, Homo Sapiens
  NM_002106
attggtgggatgagcaatccgagttcccggatgagggaacattctgcagtataaagggagcagggaaggcgggagacagcgcagtttgaatcgcggtgcgacgaaggagtaggtggtgggatctcaccgtgggtccgattagccttttctctgccttgcttgcttgagcttcagcggaattcgaaatggctggcggtaaggctggaaaggactccggaaaggccaagacaaaggcggtttcccgctcgcagagagccggcttgcagttcccagtgggccgtattcatcgacacctaaaatctaggacgaccagtcatggacgtgtgggcgcgactgccgctgtgtacagcgcagccatcctggagtacctcaccgcagaggtacttgaactggcaggaaatgcatcaaaagacttaaaggtaaagcgtattacccctcgtcacttgcaacttgctattcgtggagatgaagaattggattctctcatcaaggctacaattgctggtggtggtgtcattccacacatccacaaatctctgattgggaagaaaggacaacagaagactgtctaaaggatgcctggattccttgttatctcaggactctaaatactctaacagctgtccagtgttggtgattccagtggactgtatctctgtgaaaaacacaattttgcctttttgtaattctatttgagcaagttggaagtttaattagctttccaaccaaccaaatttctgcattcgagtcttaaccatatttaagtgttactgtggcttcaaagaagctattgattctgaagtagtgggttttgattgagttgactgtttttaaaaaactgtttggattttaattgtgatgcagaagttatagtaacaaacatttggttttgtacagacattatttccactctggtggataagttcaataaaggtcatatcccaaacaaaa

SEQ ID NO: 1643 - DNA, 3139 bp, Homo Sapiens
  NM_002108
acagacagaaacgagggaagagagagaaattggggaccctgaagaaagggggccagcagcaggtaggtgccatcagggacaagaacagcacctcccagggtgggagaccccaggcctttctggcagcaggtctggatggaaagtggacaggaggctcacccgtctgcatcccctgctcctgcccctgctcggctacaaaaaccaaagggacagcagctgaccacaccccggtagccactcctgcataaagctctcccctcctgtgaccagctgaggacctcaggctgcagcggagccatgcccagatacacggtgcacgtacgtggggaatggctggcagtgccctgccaggacgcgcagctcactgtgggctggctgggccgggaggccgtgaggcgctatatcaagaataagcccgacaatggtggcttcacctccgtggatgacgcgcacttccttgtgcgccggtgcaagggcctgggcctgctggacaacgaggaccggctcgaggtggccctagagaacaacgagttcgtggaagtggttatagagggtgatgccatgtctcctgacttcattccatctcaaccagaaggagtttatctatacagcaagtaccgggagcctgaaaagtacatcgagttagatggagaccgtctgaccacggaggatctggtcaacttgggaaagggacgctacaaaataaagctcaccccaacagctgagaagagggtgcagaaatccagggaggtcatagatagcatcataaaagagaaaacagttgtttacggtattactacaggttttgggaaatttgccagaactgtaattcctatcaataagctacaggagcttcaggtcaacttagtacgctcacattcttcaggtgttgggaaaccactaagtcctgagaggtgtcggatgctcttggctttaaggatcaatgtcttagccaaaggatacagtggcatttccctggagaccctcaaacaagtcatagaaatgtttaatgcctcctgcctgccctatgtcccagagaaaggaaccgttggtgccagtggagaccttgccccactctctcatcttgctcttgggctagttggagaagggaagatgtggtctccgaagagtggctgggctgatgctaaatacgtgctagaagcccatggattgaaaccagttattttaaaaccaaaagagggcctggcactcatcaatgggacgcagatgatcacatccctgggctgtgaagctgtagagcgagccagtgctattgcacggcaggctgacattgtggcagccctgacccttgaggtgctgaagggcaccaccaaagcctttgacactgacattcatgctcttcgacctcaccgtgggcaaattgaagttgcttttcggtttcggtcactcttggactcagatcaccacccatcagaaatagcagagagtcacaggttctgtgatcgcgtccaggatgcatacaccttgcgctgctgtccacaggtccatggtgtggtgaatgatacaatagcatttgtgaagaacatcattaccacagaactgaacagcgcaacagataatcctatggtctttgccaataggggagagacagtttctggaggaaacttccatggtgaatacccagccaaagccctagactacttggccattggcatccatgaacttgctgcaatcagtgagagaagaatcgagcggctctgcaatccctccctcagtgagctgcctgccttcctggtggctgaaggtggtctgaactctgggttcatgatagctcactgcacggcagcagcccttgtttctgagaacaaggctctgtgccatccctcgtctgttgactccctctccaccagcgcagccacggaggaccacgtctccatgggaggatgggcagcaaggaaagccctcagggtcatcgagcatgtggagcaagtgctggccatcgagctccttgcagcctgccagggcatagagtttctacgtcccctgaaaacaaccactccgctggagaaggtctatgacctggtgcgctctgttgtaaggccctggataaaagatcgcttcatggccccggacatcgaggcagcccacaggctgctcctggagcagaaggtttgggaagtagctgctccatacattgaaaaatacagaatggagcatattccagaatcaagacctctttctccaacagccttttcactgcaatttctgcacaagaaatccaccaaaatcccggagtctgaggacctttaatgggctttgtcatgaagtagcagatgagagggcagtcagtttagcacaaagcaatactaggctgaaggagagacctgagaactttcctaggtagatcaatccattgtatcattcagttcttctaaagcctacgttggttaggctgatggcagtattatagttgctaaattcagcactgtgttcctgttgtcgtggttcaagacccaccaggtattttcagattataaaacttttctttctttcttaacagtttcaacaggccactcactcttaagggtgagaagaataaccacaattgtatgtgcctgttttttactcttagcattagatgaattcaaatttggaaacagattgatagcaattttttctaaaaacattagacttttgttaacctttttttttttttttaaatttgcttcaacaagctctccaccagttgactttctttggctaattttactttgcatgatatgccttaatatgccttcataaataaccattttaagtcataatttgtccttaagctgcttttttcttctattaattggatcatagtaaagagtagtcaatagggtcttcagctattaattgtagaggtgattaaaaccaacaaggagtttcatgtgcaaaggagataaggaatgaatataaagattgctatttgggtggctcttattaaactgtgtattttgtacttatcactacacgtatcccccaaatgcttacatgggagtttgaggttagtattttcacttccttggtgttagtactctattcacattcttattgtaaccttcctcatttcacagataaggaatctttggggattaaccaacctcctttctgtaatggtaatcattaaaataag

SEQ ID NO: 1644 - DNA, 2168 bp, Homo Sapiens
  NM_002110
ggagttagcctcgctcagggcgcggctaaggcgcccagatggcctgcgggcgccaccacgtccctggtcccagctcgggagcacatcagaggcttagaggcgagtgggaagggactcagacagtgcaggacgagaaacgcccgcggcaccaaagcccctcagagcgtcgcccccgcctctagttctagaaagtcagtttcccggcactggcaccccggaacctcaggggctgccgagctgggggggcgctcaagctgcgaggatccgggctgcccgcgagacgaggagcgggcgcccaggatggggtgcatgaagtccaagttcctccaggtcggaggcaatacattctcaaaaactgaaaccagcgccagcccacactgtcctgtgtacgtgccggatcccacatccaccatcaagccggggcctaatagccacaacagcaacacaccaggaatcagggaggcaggctctgaggacatcatcgtggttgccctgtatgattacgaggccattcaccacgaagacctcagcttccagaagggggaccagatggtggtcctagaggaatccggggagtggtggaaggctcgatccctggccacccggaaggagggctacatcccaagcaactatgtcgcccgcgttgactctctggagacagaggagtggtttttcaagggcatcagccggaaggacgcagagcgccaactgctggctcccggcaacatgctgggctccttcatgatccgggatagcgagaccactaaaggaagctactctttgtccgtgcgagactacgaccctcggcagggagataccgtgaaacattacaagatccggaccctggacaacgggggcttctacatatccccccgaagcaccttcagcactctgcaggagctggtggaccactacaagaaggggaacgacgggctctgccagaaactgtcggtgccctgcatgtcttccaagccccagaagccttgggagaaagatgcctgggagatccctcgggaatccctcaagctggagaagaaacttggagctgggcagtttggggaagtctggatggccacctacaacaagcacaccaaggtggcagtgaagacgatgaagccagggagcatgtcggtggaggccttcctggcagaggccaacgtgatgaaaactctgcagcatgacaagctggtcaaacttcatgcggtggtcaccaaggagcccatctacatcatcacggagttcatggccaaaggaagcttgctggactttctgaaaagtgatgagggcagcaagcagccattgccaaaactcattgacttctcagcccagattgcagaaggcatggccttcatcgagcagaggaactacatccaccgagacctccgagctgccaacatcttggtctctgcatccctggtgtgtaagattgctgactttggcctggcccgggtcattgaggacaacgagtacacggctcgggaaggggccaagttccccatcaagtggacagctcctgaagccatcaactttggctccttcaccatcaagtcagacgtctggtcctttggtatcctgctgatggagatcgtcacctacggccggatcccttacccagggatgtcaaaccctgaagtgatccgagctctggagcgtggataccggatgcctcgcccagagaactgcccagaggagctctacaacatcatgatgcgctgctggaaaaaccgtccggaggagcggccgaccttcgaatacatccagagtgtgctggatgacttctacacggccacagagagccagtaccaacagcagccatgatagggaggaccagggcagggccagggggtgcccaggtggtggctgcaaggtggctccagcaccatccgccagggcccacacccccttcctactcccagacacccaccctcgcttcagccacagtttcctcatctgtccagtgggtaggttggactggaaaatctctttttgactcttgcaatccacaatctgacattctcaggaagcccccaagttgatatttctatttcctggaatggttggattttagttacagctgtgatttggaagggaaactttcaaaatagtgaaatgaatatttaaataaaagatataaatgccaaagtctttaccaaaaaaaaaaaaaaaaa

SEQ ID NO: 1645 - DNA, 2646 bp, Homo Sapiens
  NM_002112
tcttttacggcatccacctggaggctgcctgcaggcttgggttgctaagtgcactgcttaatttagaagcgccttttatcctggctctcttgaccagtcaaagttgtggtcgctgttttctacaaggactggggaaagaaagggtggaattaattaaacctggaggaagggactttgaagggcggagctaaggtcaaagaaagaaccctttaaataaagggcccacactggctgccagggagtgcgcaggactggcaagagggaagccgggctgctccacgcctttcacgccttccacctcctgcgtgtccatctgtgagaaggagccagagcccaagggagatgatggagcctgaggagtacagagagagagggagagagatggtggattacatctgccagtacctgagcactgtgcgggagagacgtgtgacgccagacgtgcagcctggctacctgcgagcccagctgcctgagagtgctcctgaggaccccgacagctgggacagcatctttggggacattgaacgaatcatcatgcctggggtggtacattggcagagcccccatatgcacgcctactacccagccctcacctcttggccctccctgctaggagacatgctggctgatgccatcaactgcttgggattcacctgggcatccagccctgcgtgtacagagctggagatgaacgtcatggactggttggcaaaaatgctgggacttccagagcacttcttgcaccaccaccccagcagccagggcggaggcgtcctgcagagcacggtcagtgaatccactttgattgccctgctggcagcaaggaagaacaaaatcctggaaatgaaaacgtctgagcccgatgctgatgagtcctgcctaaatgcccgactcgtggcctatgcctctgaccaggctcactcctctgtggaaaaggctggtttgatttcccttgtgaagatgaaatttctgcctgtggatgacaacttctcactccgaggggaagctcttcagaaggccatcgaggaagacaagcagcggggcttggtgcccgtctttgtctgtgcaacactagggaccactggggtctgtgcatttgactgcctgtcagagctgggccccatctgtgcccgtgaggggctgtggctccacatcgatgctgcttatgcaggcactgccttcctgtgccccgagttccgggggtttctgaaggggattgagtatgccgactccttcacctttaatccttccaagtggatgatggtgcattttgactgtactgggttctgggtcaaggacaagtacaagctgcagcagaccttcagtgtgaatcccatctacctcaggcatgccaactcaggcgtggccaccgacttcatgcactggcagatccccctgagccgacggtttcgctctgttaaactctggttcgtgattcggtccttcggggtgaagaatcttcaagcacatgtcagacatggtactgaaatggctaaatattttgaatctctggtcagaaacgacccttcctttgaaattcctgccaagaggcaccttggcctggtggtttttcgtctaaagggtcctaattgtctcacagaaaatgtgttaaaggaaatagctaaagctggccgtctcttcctcatcccggccactatccaggacaagttaatcatccgtttcactgtgacatcccagtttaccactagggatgacatcctgagagactggaatctcattcgagatgctgccactctcatcctgagtcagcactgtacttcccaacccagccctcgggttgggaacctcatctcccaaatcaggggtgccagagcctgggcctgtggaacgtcccttcagtctgtcagtggggcaggagatgatccagtccaggccaggaagatcatcaagcagcctcagcgtgtgggagccggtcccatgaaaagggaaaatggcctccatcttgaaaccctgctggacccagttgatgactgcttttcagaagaggccccagatgccaccaagcacaagctgtcctccttcctgttcagttacttgtctgtgcagactaagaagaagacggtgcgctccctcagttgcaacagtgtgccagtgagtgctcagaagccactgcccacagaggcctctgtgaagaatgggggctcctccagggtcagaatcttttccaggtttccagaagacatgatgatgctgaagaaaagtgccttcaaaaaactcatcaaattctacagcgtccccagctttcctgaatgcagctctcaatgtggactccagctgccctgttgccctctgcaggccatggtttagacacagggccttcagccagagtctgaggatatacttcagggactctgtgaacccctcacaattgtatgccaactttgtgtgcttatgtgtacatgcatttttcttggggcgagttcataattttaatcaaattctcataggggttcatgacccacaataggatacaaacgaagagtttaagccagcatgatccagatgggttcagcagtctggtcagtgagaaagggccgagggtagacaggcagcttctgtggttcagcttgtgacatgatatataacacagaaataaattatgcttgtccctgaaacaaaaaa

SEQ ID NO: 1646 - DNA, 3080 bp, Homo Sapiens
  NM_002115
gggtgcctcatattgccagacaagagctcagacctgaggagagtgactagcttctctgtgtcccaggtggccaccttccactgtggaagctcatggactccattgggtcttcagggttgcggcagggggaagaaaccctgagttgctctgaggagggcttgcccgggccctcagacagctcagagctggtgcaggagtgcctgcagcagttcaaggtgacaagggcacagctacagcagatccaagccagcctcttgggttccatggagcaggcgctgaggggacaggccagccctgcccctgcggtccggatgctgcctacatacgtggggtccaccccacatggcactgagcaaggagacttcgtggtgctggagctgggggccacaggggcctcactgcgtgttttgtgggtgactctaactggcattgaggggcatagggtggagcccagaagccaggagtttgtgatcccccaagaggtgatgctgggtgctggccagcagctctttgactttgctgcccactgcctgtctgagttcctggatgcgcagcctgtgaacaaacagggtctgcagcttggcttcagcttctctttcccttgtcaccagacgggcttggacaggagcaccctcatttcctggaccaaaggttttaggtgcagtggtgtggaaggccaggatgtggtccagctgctgagagatgccattcggaggcagggggcctacaacatcgacgtggttgctgtggtgaacgacacagtgggcaccatgatgggctgtgagccgggggtcaggccgtgtgaggttgggctagttgtagacacgggcaccaacgcgtgttacatggaggaggcacggcatgtggcagtgctggacgaagaccggggccgcgtctgcgtcagcgtcgagtggggctccttcagcgatgatggggcgctgggaccagtgctgaccaccttcgaccataccctggaccatgagtccctgaatcctggtgctcagaggtttgagaagatgatcggaggcctgtacctgggtgagctggtgcggctggtgctggctcacttggcccggtgtggggtcctctttggtggctgcacctcccctgccctgctgagccaaggcagcatcctcctggaacacgtggctgagatggaggacccctctactggggcagcccgtgtccatgctatcctgcaggacttgggcctgagccctggggcttcggatgttgagcttgtgcagcacgtctgtgcggccgtgtgcacgcgggctgcccagctctgtgctgccgccctggccgctgttctctcctgcctccagcacagccgggagcaacaaacactccaggttgctgtggccaccggaggccgagtgtgtgagcggcaccccaggttctgcagcgtcctgcaggggacagtgatgctcctggccccggaatgcgatgtctccttaatcccctctgtggatggtggtggccggggagtggcgatggtgactgccgtggctgcccgtctggctgcccaccggcgcctgctggaggagaccctggccccattccggttgaaccatgatcaactggctgcggttcaggcacagatgcggaaggccatggccaaggggctccgaggggaggcctcctcccttcgcatgctgcccactttcgtccgggccacccctgacggcagcgagcgaggggatttcctggccctggacctcgggggcacgaacttccgtgtcctcctggtacgtgtgaccacaggcgtgcagatcaccagcgagatctactccattcccgagactgtggcccagggttctgggcagcagctctttgaccacatcgtggactgcatcgtggacttccagcagaagcagggcctgagcgggcagagcctcccactgggttttaccttctccttcccatgtaggcagcttggcctagaccagggcatcctcctgaactggaccaagggtttcaaggcatcagactgcgagggccaagatgtcgtgagtctgttgcgggaagccatcactcgcagacaggcagtggagctgaatgtggttgccattgtcaatgacacggtggggaccatgatgtcctgtggctatgaggacccccgttgcgagataggcctcattgtcggaaccggcaccaatgcctgctacatggaggagctccggaatgtggcgggcgtgcctggggactcaggccgcatgtgcatcaacatggagtggggcgcctttggggacgatggctctctggccatgctcagcacccgctttgatgcaagtgtggaccaggcgtccatcaaccccggcaagcagaggtttgaaaagatgatcagcggcatgtacctgggggagatcgtccgccacatccttttacatttaaccagccttggcgttctcttccggggccagcagatccagcgccttcagaccagggacatcttcaagaccaagttcctctctgagatcgaaagtgacagcctggccctgcggcaggtccgagccatcctagaggatctggggctacccctgacctcagatgacgccctgatggtgctagaggtgtgccaggctgtgtcccagagggctgcccagctctgtggggcgggtgtagctgccgtggtggagaagatccgggagaaccggggcctggaagagctggcagtgtctgtgggggtggatggaacgctctacaagctgcacccgcgcttctccagcctggtggcggccacagtgcgggagctggcccctcgctgtgtggtcacgttcctgcagtcagaggatgggtccggcaaaggtgcggccctggtcaccgctgttgcctgccgccttgcgcagttgactcgtgtctgaggaaacctccaggctgaggaggtctccgccgcagccttgctggagccgggtcggggtctgcctgtttcccagccaggcccagccacccaggactcctgggacatcccatgtgtgacccctctgcggccatttggccttgctccctggctttccctgagagaagtagcactcaggttagcaatatatatatataatttatttacaaaaaaaaaaaaa

SEQ ID NO: 1647 - DNA, 1412 bp, Homo Sapiens
  NM_002118
atttgtccctgcctacctagccaatctgtccctgtttgggacactggactcccgtgagctggaaggaacagatttaatatctaggggctgggtatccccacatcactcatttggggggtcaagggacccgggcaatatagtattctgctcagtgtctggagatcatctacccaggctggggcttctgggacaggcgaggacccacggaccctggaagagctggtccaggggactgaactcccggcatctttacagagcagagcatgatcacattcctgccgctgctgctggggctcagcctgggctgcacaggagcaggtggcttcgtggcccatgtggaaagcacctgtctgttggatgatgctgggactccaaaggatttcacatactgcatctccttcaacaaggatctgctgacctgctgggatccagaggagaataagatggccccttgcgaatttggggtgctgaatagcttggcgaatgtcctctcacagcacctcaaccaaaaagacaccctgatgcagcgcttgcgcaatgggcttcagaattgtgccacacacacccagcccttctggggatcactgaccaacaggacacggccaccatctgtgcaagtagccaaaaccactccttttaacacgagggagcctgtgatgctggcctgctatgtgtggggcttctatccagcagaagtgactatcacgtggaggaagaacgggaagcttgtcatgcctcacagcagtgcgcacaagactgcccagcccaatggagactggacataccagaccctctcccatttagccttaaccccctcttacggggacacttacacctgtgtggtagagcacactggggctcctgagcccatccttcgggactggacacctgggctgtcccccatgcagaccctgaaggtttctgtgtctgcagtgactctgggcctgggcctcatcatcttctctcttggtgtgatcagctggcggagagctggccactctagttacactcctcttcctgggtccaattattcagaaggatggcacatttcctagaggcagaatcctacaacttccactccaagtgagaaggagattcaaactcaatgatgctaccatgcctctccaacatcttcaaccccctgacattatcttggatcctatggtttctccatccaattctttgaatttcccagtctcccctatgtaaaacttagcaacttgggggacctcattcctgggactatgctgtaaccaaattattgtccaaggctatatttctgggatgaatataatctgaggaagggagttaaagaccctcctggggctctcagtgtgccatagaggacagcaactggtgattgtttcagagaaataaactttggtggaaatattgttaaaaaaaaaaaaaaa

SEQ ID NO: 1648 - DNA, 3485 bp, Homo Sapiens
  NM_002119
cttcttctttacctccgccttgttcctgtcctcaccacacggactgagactgatttgattaaagcaccagagtgtaatggccctcagagcagggctggtcctggggttccacaccctgatgaccctcctgagcccgcaggaggcaggggccaccaaggctgaccacatgggctcctacggacccgccttctaccagtcttacggcgcctcgggccagttcacccatgaatttgatgaggaacagctgttctctgtggacctgaagaaaagcgaggccgtgtggcgtctgcctgagtttggtgactttgcccgctttgacccgcagggcgggctggccggcatcgccgcaatcaaagcccatctggacatcctggtggagcgctccaaccgcagcagagccatcaacgtgcctccacgggtgaccgtgctccccaagtctcgggtggagctgggccagcccaacatcctcatctgcatcgtggacaacatcttcccccctgtgatcaatatcacctggctgcgcaacggccaaactgtcactgagggagtggcccagaccagcttctattcccagcctgaccatttgttccgcaagttccactacctgcccttcgtgccctcagccgaggacgtctatgactgccaggtggagcactggggcctggatgcgccactcctcaggcattgggagctccaggtgcctattccaccaccagatgccatggagaccctggtctgtgccctgggcctggccatcggcctggtgggcttcctcgtgggcaccgtcctcatcatcatgggcacatatgtgtccagtgtccccaggtaatgatccttctgagagaaatgacttgtgggagacaccctgcagatcctcatgggtttgtgacagcccctgcgtgctcagtgccctttaagtgcatcccgctgtgctgactttgagtgggatcaacatctgtcctacgggtcccctcttttttggccccagtattcatggcagggtttgttggacacctactagcttcccttcccattcaacacacacacacattcttgctctacccaaagctctggctggcagcactaaatgctttggtggtgtttgcactgtgtcctttccaggccttggccagttcttccaggggtgaggcatgtggtgctggggattggcagccatcctggggcccacacaggtgtgtcttgctccatttggcccattgtgtgttactttgtgaatgagccatttcacatggacttcatgaaatttgcctcctgagttcaggtttaccctgaaagggatgcagattatcctgttcctcacgaccccctcagctaacaacagttctgaagggtgctgggacaggacaggctcatggggactccactcctgcctgggtttactctgtatgaagaggccactggtatcctgccatgatgttatctcctttttctacttttccctagagtcccatgcatgataaagagaggcccaaggcttggataaggtggccacttccctcagtggagtcagtcatgttaggtaggaggtggtagagtcggtctgcgaggtatctcgtaagaggggaggtccacctagacacactctaaatatgtggcctagaagattttggtctacttttctgtgaacagaatttaaaacatacaaagagataaatcaccataccacatagtttatgtcaggaccaaaatgagcaatacagattacggttttcaaaccagaatgcacataagaactgcttgggatccttttaaaagtacaggcattggcctggtgcagtggctcattcctgtaatcccagcactttgggaggccaaggggacaggactgcttgaggccaagaggtggaaaccatcttgggctacatagagagaccccatctctacaaagaaagatttaaaaattaaccaggcatggtggctcgcacctgtattcccagccactggggaggctgaggccggaggagtgcttgagcccaggagttcaaggctgcagtgagccaagattgcgccactgcactccagcctaggtgacagagtgagaccctgtctctaaataaataaataaataaaatataaaaataacagtcatcacccagacctactgaattagaatctcgggagtgcagggggcagcaacagggaggctgtcttttctgagatggggtctcactctgtcaccaggctggagtgccatggcatgatctcagctcactgcaacctccacctcctgagttcaagccattctcctgcctcagcctcctgagtagctgggactacaggtgtgcgccactacactcagctaatttttgtattttaagtagagacggggtttcatcatgttggccaggatggcctccatctcttgacctcgtgatccacccaccttccctcccaaagtactggaattacaggcattagccactgtgcccagccgaggctgtcatttttaaccggctctggatgactctgatgcagccatcctggaccttggctgtggtctggtaactggaacccagtgacgtaatcaggtgccatcgggggtcatgggaaagggggatccccaaggtctgaggtggactaggaaggctttctgaagaacctgggtctgttagggcatcagccaatcaaggtacaagtaaatagaggcaaaatgagggtttgaactgtgagcagttggtcctggaaaagaaagaaaccaagagattatggggactcaatgggcttcttaagagagaataagttgaaatcaatgaccagaagaccctgatggaagtggaggagaatcatctcaggcaaactttttgtgtgccagtaacagaaaccctctttgtgtgatcacatgcaaagtataggatatttgcaatatagccatggggaggagtgcagggcccaagggtagattttagccaggcctcccaggaacagaactcggatccgaaaagcccagagaagctagagctgcccctccaacactctcggatccacatggtctgtgttctctagacccccctgcatgttagcggtgttctctctctgtggactgactgtccttctcagtgaacatgtccacccgacagctcctgagtttatatcatctcaaccctcacaacccacagaggctgtgtctcctagtcacagctttaaattactggaaaaataaatgactggccaaacttggagcaggtgtccatcccagccctgtgtagttagagcaggaatcaagatctcaacacaaatgtggctgccaagcactcagccccggggcgaggggtcaagttcttctcagagaaagaggaataagttggttctcagaagacatcacaagatacgtgtgtacccaacaatctctgatctctgctgatcttttgcttagacgttaacttgatgcatcattggaaaggtgtttctctcatctctgtcctaaggcttgataaagtcattaaaattgtgttcttttgactaaa

SEQ ID NO: 1649 - DNA, 1388 bp, Homo Sapiens
  NM_002120
gatttatactcttaatgggtactttctgactgaattttatgagctcattctgaagaggctgacgattttactatctcatttttttcctttctccagaatgggttctgggtgggtcccctgggtggtggctctgctagtgaatctgacccgactggattcctccatgactcaaggcacagactctccagaagattttgtgattcaggcaaaggctgactgttacttcaccaacgggacagaaaaggtgcagtttgtggtcagattcatctttaacttggaggagtatgtacgtttcgacagtgatgtggggatgtttgtggcattgaccaagctggggcagccagatgctgagcagtggaacagccggctggatctcttggagaggagcagacaggccgtggatggggtctgtagacacaactacaggctgggcgcacccttcactgtggggagaaaagtgcaaccagaggtgacagtgtacccagagaggaccccactcctgcaccagcataatctgctgcactgctctgtgacaggcttctatccaggggatatcaagatcaagtggttcctgaatgggcaggaggagagagctggggtcatgtccactggccctatcaggaatggagactggacctttcagactgtggtgatgctagaaatgactcctgaacttggacatgtctacacctgccttgtcgatcactccagcctgctgagccctgtttctgtggagtggagagctcagtctgaatattcttggagaaagatgctgagtggcattgcagccttcctacttgggctaatcttccttctggtgggaatcgtcatccagctaagggctcagaaaggatatgtgaggacgcagatgtctggtaatgaggtctcaagagctgttctgctccctcagtcatgctaaggtcctcactgaagcttctctctctggagcctgaagtagtgatgagtagtctgggccctgggtgaggtaaaggacattcatgaggtcaatgttctgggaataactctcttccctgatccttggaggagcccgaactgattctggagctctgtgttctgagatcatgcatctcccacccatctgcccttctcccttctacgtgtacatcattaatccccattgccaagggcattgtccagaaactcccctgagaccttactccttccagccccaaatcatttacttttctgtggtccagccctactcctataagtcatgatctccaaagctttctgtcttccaactgcagtctccacagtcttcagaagacaaatgctcaggtagtcactgtttccttttcactgtttttaaaaaccttttattgtcaaataaaatggagatacaaaaaatgtaaaaaaaaaaaaaaaaa

SEQ ID NO: 1650 - DNA, 1501 bp, Homo Sapiens
  NM_002121
agcgagtccttcttttcctgactgcagctcttttcattttgccatccttttccagctccatgatggttctgcaggtttctgcggccccccggacagtggctctgacggcgttactgatggtgctgctcacatctgtggtccagggcagggccactccagagaattaccttttccagggacggcaggaatgctacgcgtttaatgggacacagcgcttcctggagagatacatctacaaccgggaggagttcgcgcgcttcgacagcgacgtgggggagttccgggcggtgacggagctggggcggcctgctgcggagtactggaacagccagaaggacatcctggaggagaagcgggcagtgccggacaggatgtgcagacacaactacgagctgggcgggcccatgaccctgcagcgccgagtccagcctagggtgaatgtttccccctccaagaaggggcccttgcagcaccacaacctgcttgtctgccacgtgacggatttctacccaggcagcattcaagtccgatggttcctgaatggacaggaggaaacagctggggtcgtgtccaccaacctgatccgtaatggagactggaccttccagatcctggtgatgctggaaatgaccccccagcagggagatgtctacacctgccaagtggagcacaccagcctggatagtcctgtcaccgtggagtggaaggcacagtctgattctgcccggagtaagacattgacgggagctgggggcttcgtgctggggctcatcatctgtggagtgggcatcttcatgcacaggaggagcaagaaagttcaacgaggatctgcataaacagggttcctgagctcactgaaaagactattgtgccttaggaaaagcatttgctgtgtttcgttagcatctggctccaggacagaccttcaacttccaaattggatactgctgccaagaagttgctctgaagtcagtttctatcattctgctctttgattcaaagcactgtttctctcactgggcctccaaccatgttcccttcttcttagcaccacaaataatcaaaacccaacatgactgtttgttttcctttaaaaatatgcaccaaatcatctctcatcacttttctctgagggttttagtagacagtaggagttaataaagaagttcattttggtttaaacataggaaagaagagaaccatgaaaatggggatatgttaactattgtataatggggcctgttacacatgacactcttctgaattgactgtatttcagtgagctgcccccaaatcaagtttagtgccctcatccatttatgtctcagaccactattcttaactattcaatggtgagcagactgcaaatctgcctgataggacccatattcccacagcactaattcaacatataccttactgagagcatgttttatcattaccattaagaagttaaatgaacatcagaatttaaaatcataaatataatctaatacacttt

SEQ ID NO: 1651 - DNA, 1241 bp, Homo Sapiens
  NM_002123
tttttattctttctgccaggtacatcagatccatcaggtccgagctgtgttgactaccactgcttttcccttcgtctcagttatgtcttggaagaaggctttgcggatccccggagaccttcgggtagcaactgtcaccttgatgctggcgatgctgagctccctactggctgagggcagagactctcccgaggatttcgtgttccagtttaagggcatgtgctacttcaccaacgggacggagcgcgtgcgtcttgtgaccagatacatctataaccgagaggagtacgcgcgcttcgacagcgacgtgggggtgtaccgcgcggtgacgccgcaggggcggcctgatgccgagtactggaacagccagaaggaagtcctggaggggacccgggcggagttggacacggtgtgcagacacaactacgaggtggcgttccgcgggatcttgcagaggagagtggagcccacagtgaccatctccccatccaggacagaggccctcaaccaccacaacctgctggtctgctcggtgacagatttctatccaggccagatcaaagtccggtggtttcggaatgatcaggaggagacagccggcgttgtgtccaccccccttattaggaatggtgactggactttccagatcctggtgatgctggaaatgactccccagcgtggagatgtctacacctgccacgtggagcaccccagcctccagagccccatcaccgtggagtggcgggctcagtctgaatctgcccagagcaagatgctgagtggcgttggaggcttcgtgctggggctgatcttccttgggctgggccttatcatccgtcaaaggagtcagaaagggcttctgcactgactcctgagactattttaactaggattggttatcactcttctgtgatgcctgcttatgcctgcccagaattcccagctgcctgtgtcagcttgtccccctgagatcaaagtcctacagtggctgtcacgcagccaccaggtcatctcctttcatccccaccccaaggcgctggctgtgactctgcttcctgcactgacccagagcctctgcctgtgcatggccagctgcgtctactcaggtcccaaggggtttctgtttctattctttcctcagactgctcaagagaagcacatgaaaaacattacctgactttagagcttttttacataattaaacatgatcctgagttatctgtaaaaaaaaaaaaaaaaaa

SEQ ID NO: 1652 - DNA, 1527 bp, Homo Sapiens
  NM_002129
ggggatgtggcccgtggcctagctcgtcaagttgccgtggcgcggagaactctgcaaaacaagaggctgaggattgcgttagagataaaccagttcacgccggagccccgtgagggaagcgtctccgttgggtccggccgctctgcgggactctgaggaaaagctcgcaccaggtggacgcggatctgtcaacatgggtaaaggagaccccaacaagccgcggggcaaaatgtcctcgtacgccttcttcgtgcagacctgccgggaagagcacaagaagaaacacccggactcttccgtcaatttcgcggaattctccaagaagtgttcggagagatggaagaccatgtctgcaaaggagaagtcgaagtttgaagatatggcaaaaagtgacaaagctcgctatgacagggagatgaaaaattacgttcctcccaaaggtgataagaaggggaagaaaaaggaccccaatgctcctaaaaggccaccatctgccttcttcctgttttgctctgaacatcgcccaaagatcaaaagtgaacaccctggcctatccattggggatactgcaaagaaattgggtgaaatgtggtctgagcagtcagccaaagataaacaaccatatgaacagaaagcagctaagctaaaggagaaatatgaaaaggatattgctgcatatcgtgccaagggcaaaagtgaagcaggaaagaagggccctggcaggccaacaggctcaaagaagaagaacgaaccagaagatgaggaggaggaggaggaagaagaagatgaagatgaggaggaagaggatgaagatgaagaataaatggctatcctttaatgatgcgtgtggaatgtgtgtgtgtgctcaggcaattattttgctaagaatgtgaattcaagtgcagctcaatactagcttcagtataaaaactgtacagatttttgtatagctgataagattctctgtagagaaaatacttttaaaaaatgcaggttgtagctttttgatgggctactcatacagttagattttacagcttctgatgttgaatgttcctaaatatttaatggtttttttaatttcttgtgtatggtagcacagcaaacttgtaggaattagtatcaatagtaaattttgggttttttaggatgttgcatttcgtttttttaaaaaaaattttgtaataaaattatgtatattatttctattgtctttgtcttaatatgctaagttaattttcactttaaaaaagccatttgaagaccagagctatgttgatttttttcggtatttctgcctagtagttcttagacacagttgacctagtaaaatgtttgagaattaaaaccaaacatgctcatatttgcaaaatgttctttaaaagttacatgttgaactcagtgaactttataagaatttatgcagttttacagaacgttaagttttgtacttgacgtttctgtttattagctaaattgttcctcaggtgtgtgtatatatatatacatatatatatatatatatat

SEQ ID NO: 1653 - DNA, 2110 bp, Homo Sapiens
  NM_002138
cttccgtcggccattttaggtggtccgcggcggcgccattaaagcgaggaggaggcgagagcggccgccgctggtgcttattcttttttagtgcagcgggagagagcgggagtgtgcgccgcgcgagagtgggaggcgaagggggcaggccagggagaggcgcaggagcctttgcagccacgcgcgcgccttccctgtcttgtgtgcttcgcgaggtagagcgggcgcgcggcagcggcggggattactttgctgctagtttcggttcgcggcagcggcgggtgtagtctcggcggcagcggcggagacactagcactatgtcggaggagcagttcggcggggacggggcggcggcagcggcaacggcggcggtaggcggctcggcgggcgagcaggagggagccatggtggcggcgacacagggggcagcggcggcggcgggaagcggagccgggaccgggggcggaaccgcgtctggaggcaccgaagggggcagcgccgagtcggagggggcgaagattgacgccagtaagaacgaggaggatgaaggccattcaaactcctccccacgacactctgaagcagcgacggcacagcgggaagaatggaaaatgtttataggaggccttagctgggacactacaaagaaagatctgaaggactacttttccaaatttggtgaagttgtagactgcactctgaagttagatcctatcacagggcgatcaaggggttttggctttgtgctatttaaagaatcggagagtgtagataaggtcatggatcaaaaagaacataaattgaatgggaaggtgattgatcctaaaagggccaaagccatgaaaacaaaagagccggttaaaaaaatttttgttggtggcctttctccagatacacctgaagagaaaataagggagtactttggtggttttggtgaggtggaatccatagagctccccatggacaacaagaccaataagaggcgtgggttctgctttattacctttaaggaagaagaaccagtgaagaagataatggaaaagaaataccacaatgttggtcttagtaaatgtgaaataaaagtagccatgtcgaaggaacaatatcagcaacagcaacagtggggatctagaggaggatttgcaggaagagctcgtggaagaggtggtgaccagcagagtggttatgggaaggtatccaggcgaggtggtcatcaaaatagctacaaaccatactaaattattccatttgcaacttatccccaacaggtggtgaagcagtattttccaatttgaagattcatttgaaggtggctcctgccacctgctaatagcagttcaaactaaattttttgtatcaagtccctgaatggaagtatgacgttgggtccctctgaagtttaattctgagttctcattaaaagaaatttgctttcattgttttatttcttaattgctatgcttcagaatcaatttgtgttttatgccctttcccccagtattgtagagcaagtcttgtgttaaaagcccagtgtgacagtgtcatgatgtagtagtgtcttactggttttttaataaatccttttgtataaaaatgtattggctcttttatcatcagaataggaaaaattgtcatggattcaagttattaaaagcataagtttggaagacaggcttgccgaaattgaggacatgattaaaattgcagtgaagtttgaaatgtttttagcaaaatctaatttttgccataatgtgtcctccctgtccaaattgggaatgacttaatgtcaatttgtttgttggttgttttaataatacttccttatgtagccattaagatttatatgaatattttcccaaatgcccagtttttgcttaatatgtattgtgctttttagaacaaatctggataaatgtgcaaaagtacccctttgcacagatagttaatgttttatgcttccattaaataaaaaggacttaaaatctgttaattataatagaaatgcggctagttcagagagatttttagagctgtggtggacttcatagatgaattcaagtgttgagggaggattaaagaaatatataccgtgtttatgtgtgtgtgctt

SEQ ID NO: 1654 - DNA, 2097 bp, Homo Sapiens
  NM_002139
ggtccttcagcctcgttcccgggcagtataaagtttgctgtctcctttgttcgccctcgttgcgcagtagtgctagcggcttcgcggttcggtcctcgcacccggcagccgccactggtgctgagctgctaggaagcccctatcgccgagctcgttggagcttgaacccattgtcacccctccgactcaccggcccaaaaaaaaaaaaacatggttgaagcagatcgcccaggaaagctcttcattggtgggcttaatacggaaacaaatgagaaagctcttgaagcagtatttggcaaatatggacgaatagtggaagtactcttgatgaaagaccgtgaaaccaacaaatcaagaggatttgcttttgtcacctttgaaagcccagcagacgctaaggatgcagccagagacatgaatggaaagtcattagatggaaaagccatcaaggtggaacaagccaccaaaccatcatttgaaagtggtagacgtggaccgcctccacctccaagaagtagaggccctccaagaggtcttagaggtggaagaggaggaagtggaggaaccaggggacctccctcacggggaggacacatggatgacggtggatattccatgaattttaacatgagttcttccaggggaccactcccagtaaaaagaggaccaccaccaagaagtgggggtcctcctcctaagagatctgcaccttcaggaccagttcgcagtagcagtggaatgggaggaagagctcctgtatcacgtggaagagatagttatggaggtccacctcgaagggaaccgctgccctctcgtagagatgtttatttgtccccaagagatgatgggtattctactaaagacagctattcaagcagagattacccaagttctcgtgatactagagattatgcaccaccaccacgagattatacttaccgtgattatggtcattccagttcacgtgatgactatccatcaagaggatatagcgatagagatggatatggtcgtgatcgtgactattcagatcatccaagtggaggttcctacagagattcatatgagagttatggtaactcacgtagtgctccacctacacgagggcccccgccatcttatggtggaagcagtcgctatgatgattacagcagctcacgtgacggatatggtggaagtcgagacagttactcaagcagccgaagtgatctctactcaagtggtcgtgatcgggttggcagacaagaaagagggcttcccccttctatggaaagggggtaccctcctccacgtgattcctacagcagttcaagccgcggagcaccaagaggtggtggccgtggaggaagccgatctgatagagggggaggcagaagcagatactagaaacaaacaaaactttggaccaaaatcccagttcaaagaaacaaaaagtggaaactattctatcataactacccaaggactactaaaaggaaaaattgtgttactttttttaaattccctgttaagttcccctccataatttttatgttcttgtgaggaaaaaagtaaaacatgtttaattttatttgactttcgcattgcttttcaacaagcaaatgttaaatgtgttaagacttgtactagtgttgtaactttccaagtaaaagtatcccctaaaggccacttcctatctgatttttcccagcaaatgaggcaggcaattctaagatcttccacaaaacatctagccatctaaaatggagagatgaatcattctacctatacaaacaagctagctattagagggtggttggggtatgctactcataagatttcagggtgtcttccaactgaaatctcaatgttctcagtacgaaaaacctgaaatcacatgcctatgtaaggaaagtgctattcacccagtaaacccaaaaaagcaaatggataatgctggccattttgcctttctgacatttccttgggaatctgcaagaacctcccctttcccttcccccaataagaccatttaagtgtgtgttaaacaactacagaatactaaataaaaagtttggccaaaaccaaccatgaagctgcaaaaaaaaaaaaaaaaaa

SEQ ID NO: 1655 - DNA, 1014 bp, Homo Sapiens
  NM_002144
tgacgcatggactataataggatgaactccttcttagagtacccactctgtaaccggggacccagcgcctacagcgcccacagcgccccaacctcctttcccccaagctcggctcaggcggttgacagctatgcaagcgagggccgctacggtggggggctgtccagccctgcgtttcagcagaactccggctatcccgcccagcagccgccttcgaccctgggggtgcccttccccagctccgcgccctcggggtatgctcctgccgcctgcagccccagctacgggccttctcagtactaccctctgggtcaatcagaaggagacggaggctattttcatccctcgagctacggggcccagctagggggcttgtccgatggctacggagcaggtggagccggtccggggccatatcctccgcagcatcccccttatgggaacgagcagaccgcgagctttgcaccggcctatgctgatctcctctccgaggacaaggaaacaccctgcccttcagaacctaacacccccacggcccggaccttcgactggatgaaggttaagagaaacccacccaagacagcgaaggtgtcagagccaggcctgggctcgcccagtggcctccgcaccaacttcaccacaaggcagctgacagaactggaaaaggagttccatttcaacaagtacctgagccgggcccggagggtggagattgccgccaccctggagctcaatgaaacacaggtcaagatttggttccagaaccgacgaatgaagcagaagaagcgcgagcgagaggaaggtcgggtccccccagccccaccaggctgccccaaggaggcagctggagatgcctcagaccagtcgacatgcacctccccggaagcctcacccagctctgtcacctcctgaactgaacctagccaccaatggggcttccaggcactggagcgccccagtccagccctatcccaggctctccccaaccccaggcctgggcttcactggcctggg

SEQ ID NO: 1656 - DNA, 1614 bp, Homo Sapiens
  NM_002145
aatctccccctcccaaaatcgctccattacataaatcggggggggtgcaggaggggggtcccttccgatcctccctcctgacgccccccccagcagccccctcccccaccattgaaagccatgaattttgaatttgagagggagattgggtttataaacagccagccgtcgctcgccgagtgtctgacttccttccccgctgtcttggagacatttcaaacttcatcaatcaaggagtcgacattaattcctcctcctcctcctttcgagcaaaccttccccagcctccagcccggcgcctccacccttcagagacccaggagccaaaagcgagccgaagatgggcctgctctgccgccgccaccgccgccgccactccccgctgcccccccggcccccgagttcccttggatgaaagagaagaaatccgccaagaaacccagccaatccgccacgtctccttctccggccgcctccgccgttccggcctccggggtcggatcgcctgcagatggcctgggactgccggaggctggtggcggcggggcgcgcaggctgcgcacggcttacaccaacacgcagctgctggaactggagaaggaattccactttaataagtacctgtgccggccacgccgcgtcgagatcgcggccttgctggacctcaccgaaaggcaggtcaaagtctggtttcagaaccggcgcatgaagcacaagcggcagacgcagcaccgagagccgccggatggggagcctgcctgcccgggagccctggaggacatctgcgaccctgccgaggaacccgcggccagcccgggcggcccctccgcctcgcgggcggcgtgggaagcctgctgtcacccgccggaggtggtgccgggggccttaagcgcggacccccggcctttagccgttcgcttagagggcgcaggcgcgtcgagtcccggctgcgcgctgcgcggggccggcgggctggagcccgggccattgccagaagacgtcttctcggggcgccaggattcacctttccttcccgacctcaacttcttcgcggccgactcctgtctccagctatccggaggcctctcccctagcctacagggttctctcgacagcccggtccctttttccgaggaagagctggattttttcaccagtacgctctgtgccatcgacctgcagtttccctaacctgtttcctcctcccggtcctttcgacccccgcgctccttggccgtctactggaaaaatcgagcctctcccaccctcagtcgcatagacttatgtgttttgctaaaattcaggtattactgaattagcgtttaatccactccctttcttcttcttctaaaatattgggcactcggttatcttttaaaattcacacagaaaaattccgtttggtagactccttccaatgaaatctcaggaataattaaactctagggggactttcttaaaaataactagagggacctattttcctcttttttatgttttagactgtagattatttattaaaattctttaataataggaaaaggggaaagtatttattgtacattattttcatagattaaataaatgtctttataataccaaaaaaaaaaaaaa

SEQ ID NO: 1657 - DNA, 1440 bp, Homo Sapiens
  NM_002150
aggcctctagtcccagtaggaggtttgactaagatcaatcatgacgacttacagtgacaaaggggcaaagcctgagagaggccgattcctccacttccactctgtgaccttctgggttggcaacgccaagcaggccgcgtcattctactgcagcaagatgggctttgaacctctagcctacaggggcctggagaccggttcccgggaggtggtcagccatgtaatcaaacaagggaagattgtgtttgtcctctcctcagcgctcaacccctggaacaaagagatgggcgatcacctggtgaaacacggtgacggagtgaaggacattgcgttcgaggtggaagattgtgactacatcgtgcagaaagcacgggaacggggcgccaaaatcatgcgggagccctgggtagagcaagacaagtttgggaaggtgaagtttgctgtgctgcagacgtatggggacaccacacacaccctggtggagaagatgaactacatcggccaattcttgcctggatatgaggccccagcgttcatggaccccctacttcctaaactgcccaaatgcagtctggagatgatcgaccacattgtgggaaaccagcctgatcaggagatggtgtccgcctccgaatggtacctgaaaaacctgcagttccaccgcttctggtccgtggatgacacgcaggtgcacacggaatatagctctctgcgatccattgtggtggccaactatgaagagtccatcaagatgcccatcaatgagccagcgcctggcaagaagaagtcccagatccaggaatatgtggactataacgggggcgctggggtccagcacatcgctctcaagaccgaagacatcatcacagcgattcgccacttgagagagagaggcctggagttcttatctgttccctccacgtactacaaacaactgcgggagaagctgaagacggccaagatcaaggtgaaggagaacattgatgccctggaggagctgaaaatcctggtggactacgacgagaaaggctacctcctgcagatcttcaccaaaccggtgcaggaccggcccacgctcttcctggaagtcatccagcgccacaaccaccagggttttggagccggcaacttcaactcactgttcaaggctttcgaggaggagcagaacctgcggggtaacctcaccaacatggagaccaatggggtggtgcccggcatgtaagccccgcccaccccacggaggccacagccacacagccacgccccctgattctggaactcgcccaacttccctactggctgctccccttgggtcccgcccaccagcggactcggcccccaaggctccgcccacactgaccacgcccctcggcggggccgccctctgctccagccctcccgattaaagcgtgccccggtccaaaaaaaaaaaaaaaaaaa

SEQ ID NO: 1658 - DNA, 2339 bp, Homo Sapiens
  NM_002156
acgcggtgccgcggggcgggagtagaggcggagggaggggacacgggctcattgcggtgtgcgccctgcactctgtccctcactcgccgccgacgacctgtctcgccgagcgcacgccttgccgccgccccgcagaaatgcttcggttacccacagtctttcgccagatgagaccggtgtccagggtactggctcctcatctcactcgggcttatgccaaagatgtaaaatttggtgcagatgcccgagccttaatgcttcaaggtgtagaccttttagccgatgctgtggccgttacaatggggccaaagggaagaacagtgattattgagcagagttggggaagtcccaaagtaacaaaagatggtgtgactgttgcaaagtcaattgacttaaaagataaatacaaaaacattggagctaaacttgttcaagatgttgccaataacacaaatgaagaagctggggatggcactaccactgctactgtactggcacgctctatagccaaggaaggcttcgagaagattagcaaaggtgctaatccagtggaaatcaggagaggtgtgatgttagctgttgatgctgtaattgctgaacttaaaaagcagtctaaacctgtgaccacccctgaagaaattgcacaggttgctacgatttctgcaaacggagacaaagaaattggcaatatcatctctgatgcaatgaaaaaagttggaagaaagggtgtcatcacagtaaaggatggaaaaacactgaatgatgaattagaaattattgaaggcatgaagtttgatcgaggctatatttctccatactttattaatacatcaaaaggtcagaaatgtgaattccaggatgcctatgttctgttgagtgaaaagaaaatttctagtatccagtccattgtacctgctcttgaaattgccaatgctcaccgtaagcctttggtcataatcgctgaagatgttgatggagaagctctaagtacactcgtcttgaataggctaaaggttggtcttcaggttgtggcagtcaaggctccagggtttggtgacaatagaaagaaccagcttaaagatatggctattgctactggtggtgcagtgtttggagaagagggattgaccctgaatcttgaagacgttcagcctcatgacttaggaaaagttggagaggtcattgtgaccaaagacgatgccatgctcttaaaaggaaaaggtgacaaggctcaaattgaaaaacgtattcaagaaatcattgagcagttagatgtcacaactagtgaatatgaaaaggaaaaactgaatgaacggcttgcaaaactttcagatggagtggctgtgctgaaggttggtgggacaagtgatgttgaagtgaatgaaaagaaagacagagttacagatgcccttaatgctacaagagctgctgttgaagaaggcattgttttgggagggggttgtgccctccttcgatgcattccagccttggactcattgactccagctaatgaagatcaaaaaattggtatagaaattattaaaagaacactcaaaattccagcaatgaccattgctaagaatgcaggtgttgaaggatctttgatagttgagaaaattatgcaaagttcctcagaagttggttatgatgctatggctggagattttgtgaatatggtggaaaaaggaatcattgacccaacaaaggttgtgagaactgctttattggatgctgctggtgtggcctctctgttaactacagcagaagttgtagtcacagaaattcctaaagaagagaaggaccctggaatgggtgcaatgggtggaatgggaggtggtatgggaggtggcatgttctaactcctagactagtgctttacctttattaatgaactgtgacaggaagcccaaggcagtgttcctcaccaataacttcagagaagtcagttggagaaaatgaagaaaaaggctggctgaaaatcactataaccatcagttactggtttcagttgacaaaatatataatggtttactgctgtcattgtccatgcctacagataatttattttgtatttttgaataaaaaacatttgtacattcctgatactgggtacaagagccatgtaccagtgtactgctttcaacttaaatcactgaggcatttttactactattctgttaaaatcaggattttagtgcttgccaccaccagatgagaagttaagcagcctttctgtggagagtgagaataattgtgtacaaagtagagaagtatccaattatgtgacaacctttgtgtaataaaaatttgtttaaagttaaaaaaaaaaaaaaaaaaaa

SEQ ID NO: 1659 - DNA, 5472 bp, Homo Sapiens
  NM_002158
ggggatgtggtgctgccggggccgccactgcagctgctgctgcctgctggttgccgcgtcttcccggaggcgactgctggaagctgcagggaacagctgcggtgctctgccatattgtgtcttccccggccggtccctcgcctcccggccgagctgacgttggttgaagccatggataacagaacccacagatgcagagggctgactgtacaagtctgtcaaaaaaccaaactgctggttggctaataattggtcactgtatgacttatagtacaggtgatattacttctgattctagatgaactgtaagagtaaatgggtccagtaattggaatgactccagataagagagctgaaaccccaggagctgaaaagattgcaggattaagccagatttacaaaatgggaagcttgcctgaagctgttgatgctgccaggccgaaggccactctagtggacagtgagtcagcagatgatgaactcacaaacttgaactggcttcatgaaagcactaatcttctaacaaacttcagcctcggaagtgagggtcttccaattgttagtccattgtatgacatagagggagatgatgtgccatcctttggaccagcttgctaccagaacccagaaaaaaaatcagcgacttcaaagcccccatactcctttagtcttctcatttatatggccattgagcactctccaaataaatgtttgcctgtcaaagaaatttatagctggattctggaccattttccatattttgctactgcaccaacaggctggaagaattctgttcgacataatctgtccctgaataaatgttttcagaaagtggaaagaagccatggcaaggttaatggaaaaggttccttatggtgtgttgatccggaatataaacccaatcttatccaggcactgaagaagcaacctttttcttcagcatcttcacaaaatggttctttatcacctcactatttaagctctgtaatcaagcagaaccaggtgcgaaacctcaaagaatctgatattgatgctgctgctgcaatgatgcttttaaatacttctatagaacaaggaattttagaatgtgagaagcctcttcctcttaaaacagcattgcaaaaaaagaggagttacggcaatgcatttcatcatcccagtgctgtacgattacaagagagtgattctttagccaccagcattgatccaaaagaagatcacaattacagtgcaagtagcatggcagcacagcgttgtgcatccaggtctagcgtgtcttccctgtcttctgtggatgaggtatatgaatttatcccaaagaatagtcacgtgggaagtgatggcagtgaaggatttcacagtgaagaagatacagacgttgattatgaagatgatcctcttggagacagtggctatgcatcacagccttgtgcaaaaatctctgaaaaagggcagtcaggcaaaaagatgcgaaaacagacatgtcaagaaattgatgaggagctcaaagaggcagctggatctctgctccaccttgctggaattcgtacatgtttaggttccctaataagtactgcaaagacacaaaatcaaaagcaacggaaaaaatagaaatacttaaagtgtggcaatactctttcacttaattctttacaagggatatcaaagccataatggacttcattagttttagggtagggaagggatactaattacttatttctttcaaaacatttttggtttttggtttttaaaatttttattaaacaattgctgttaggatcatgcctgatcagaaatacatgatgtgaagtcctaaaagcataatttttgtgataaatgtgtccaagatttgaaaatttttatataagaaaatccccagcctctgtcttaaacttgtgggacaaaaatcctttcttctgttaatatgtcagaatgtaagatttggcaactcgataaatttttttcattttcttttccaatctgtaactatagttactgaaccagctaaaaattttgctgatgtatttttcatatacttctctcctgacacgcaatccggtaacataagattgaaatttttttactttgtcttaatttgtttctaattttttttttgttgtcgtgtgagcaaagacaaacataaattgaaaaacatcctgatgtttagaaagtttcttttggttacgtaggtagagaatacaacaaagagttctaagacttagaaaagacaattttgtggtgtcatttcatccaagaacactcccaattcctattagaatggtagctttgaagtgtttttacttcagagatcctgcatagcatttattggggccttttattctttcccaaagtgctttgcaaacattaagttttagccactagctgcctttgttgagtataagttatccagtgagaggatatagccaattaagtgtgttatggagtacacccattttgacacacttgtaataagagaatctttcatttgcctgccatgtgtactgtattatgagaatcttataatcggaatggagtgaaatgaaacattttgagtactgatggcatgttatcatacataaagtaggtcatttaggaaaaaacttctgtccaagctttgtatgaattaaattcataagtataccaaattaaatcttaatagatttaatgcaattttacagacacaataccttcatgaatttcaaaattcatataaaatttgatcttatgcaatacacctttttgaggaggcagtgtaacaacctatagtgccattgatccatgagaaaaagattttctggtactactccaaaagtgctttgactaagtatcttaactatttgaacagtctgcttatatgagacagtttttcatagtatcatttgtataatttgattagattattcagaaacaataggatgctaaactaattcattgtatcttttttttacaatggtggaagcaactttctgaaagttcagtcttatgctacatcctaagtcatagacaatgaccttgttttcattattctgatagattgtatacatatgtacacatacatatacacatatgcacagtcaaggtcatgatgttgatttgctttcagctgtttctgtgattataaagcattttttaagagacaaattttaacttttaatttttattttggcaaaactgtcaaatgagaaaaatgattttaaaaacttttttttcaattgacaagactttaagtcagggataacagtattaatgttctctgttctgtttccatgttaaatttaatttaacctggatagccacattaatgaattggtgctgtcaaaatatagtaatttttaaatttgttaataatgaaaacccttaagcatgcaggatgaggtatttgggttttttttttagatcgatcacatctacagaaaatggctaaaccaagttaacttttattatagacagtgaataaaacaccaaaaacccaaaaatgctttaaccacagtataaataatagattatacacatcatcttaataactatttttaagttatttaccatagcctctgtatagaccttaggaacagtgtttcagtgatctggcaccagtttattttgttctgctgaaattctgtatcacaaatgtgctacctggtttttgtccattagataattactctttataaggaaaggaaagagaagcagagttagttccagctctaatagggatcttcaaagttattttgtcttgatgtatgtaacagtaattctttacatcttttgatttttctcttcctttttattcactcttcccacgaatttaaatgtttaagttatattcatcactagcaaggatgataaacacttgtgcactgaaagctaacagggagaggttacacaatattttacagtttcttaaacataatttaatgcatcaccttccacttgctaacataccaagtcagttattttcaagggaagaaccttttaaattatggtcctccatttactacttccactgagagtatgctctcattcctcaggtgttttgagaaacatgactaataaccacacaattaagtagagtcattccaagtcctatggcctggaaattgtattccctataatatacaaattttcctgtaataaagtcaacttagaaactccaaggaggttacatgttttccaacatatcctaaaaactgtgatataagctaacatataatttgccttacgtcaaaagaatatgttttgttgcagctgattccagtttataatagatccctagtaaaaagctttgattcaacacaattgttcatcttcacatcccaaacagaatcactgtttcttgaatatatatttttgaagtttttttgtgcaatatattactaaatcagttattattttacttttccaaattcagagaaagaaaacagattacctgaattcatggaaaaggtggatcacctccctttttccaccttcaagcctttcctgtcctcatagccagcatgacttcttttaacttggattcctttgtatatagtaaagtttagtatatatatatttttttctttttgctactttctgaggcattatgtaaagggctcatactagatgttcagttaaatatactttagcacaaagtcaaactagagaatgtgttaaggagggaatgtatatgtcttggtagaccaggaggcctttgccagcaatttaagcaacagatgtgaatacttcacaaagctgtaaagaccattgtcttaaatactacaacaacttaacacccttttgtgaagatcacagcatttatctaagaaactgtgaggctttctggtttacatatatcttacaggtgtttttttgtatttttttttttttttagtttgaaatgtgtaagctttgatttaaaccaagtttacttcagtatgttaatgatgtagtaaaaatatttattgaaaggtgaattcgagtattttaatgttatacctgccattttttttcttaaagcatattctttgcatctaactgccagtgccattgtcaaaacttattttttaaatcgttgtacatttcttattaaactaagtgcttaattttaaagtattatgttgccatcatatagtgtataaaaatgtataattgccaattgattgtaactattatttatttttaaatgaaagtgtaagaatgctttctgattcaacaaatttgttatcaaactgtttccttatcctcttttctgatgtagcataaaaattgtcccggtttgagttataactgccagtagatgaccagtcacaagtgaaccacttctcagttgccaatctttgctcatattaaaaacaacttacaaatacttagtttttgtatctaatctctgattattaaaatgtttataaagtttatttttaccaaagagatgcaattcattatgagaaagtattgcataataaattttgttttataacttttaaaaaaaaa

SEQ ID NO: 1660 - DNA, 4406 bp, Homo Sapiens
  NM_002161
cggtgcggagcctgtctccttcactggatcccgcattttcagcgcgttgcatcacctccgtgcgcccggttgcagcgtggacgccggatgagttgcttttaggcttgctggcccgcggggctgtccaggcacgcgaggcccctcagcaacaaaatgcttcaacaagttccagaaaacataaattttcctgctgaagaagagaaaatcttggagttttggactgaatttaattgttttcaggaatgcttaaagcaatcaaaacataaaccaaaatttaccttctatgatggtcctccttttgcaactggactgcctcactatggacatatacttgcgggtacaattaaagatatagttacaagatatgctcaccagagtgggtttcatgttgacagaagatttggatgggattgccatggcttacctgtggaatatgaaattgataagacactgggaatcagaggaccagaggatgtggccaaaatggggattacagagtataacaatcagtgccgagcaattgtgatgagatattctgctgagtggaagtctactgttagcagacttggccgatggattgactttgacaatgactataaaactctgtatccacaattcatggaatcagtctggtgggtcttcaaacaactctatgataaaggccttgtttatagaggtgtgaaagtcatgcccttctctacggcatgtaacactccactttccaacttcgagtcacaccagaattataaggatgttcaagatccttcagtatttgtaactttccctttggaagaagatgaaactgtatctttagttgcttggacaaccactccctggactctacctagtaaccttgctgtgtgtgttaatccagaaatgcaatatgtgaaaattaaagatgttgccagaggacgattactcattttaatggaagccagattgtcagccctctataaattggagagtgactatgagatccttgaaagatttcctggtgcctatcttaaaggcaagaagtacaggcccctgtttgactatttcctgaagtgtaaagagaatggcgctttcactgtgcttgttgacaactatgtgaaggaagaagaaggcacaggggttgtccaccaagctccttacttcggtgctgaggactatcgggtctgtatggactttaacattattcggaaagactcactccctgtttgccctgtggatgcttcaggctgcttcacaacggaggtgacagatttcgcaggacagtatgtgaaggatgctgacaaaagtatcatcaggactttgaaggaacaaggccgacttctggttgccaccaccttcactcacagctaccctttttgctggagatcagacactcctctaatttacaaagcagtgcccagctggtttgtgcgagtggagaacatggtggaccagctcctaaggaacaatgacctgtgctactgggtcccagagttggtacgagaaaaacgatttggaaattggctgaaagatgcacgtgactggacaatttccagaaacagatactggggcacccccatcccactgtgggtcagcgatgactttgaggaggtggtatgcattgggtcagtggcggaacttgaagaactgtcaggagcaaagatctcagatctccacagagagagtgttgaccacctgaccattccttcacgctgtgggaagggatccttgcaccgcatctctgaagtgtttgactgttggtttgagagtggcagcatgccctatgctcaggttcattacccgtttgaaaacaagagggagtttgaggatgcttttcctgcagatttcattgccgagggcatcgaccaaaccagaggatggttttataccctgctggtgctggccacggccctctttggacaaccgcctttcaagaacgtaattgtgaatgggcttgtcctggcaagtgatggccaaaaaatgagcaaacggaaaaagaattatccagatccagtttccatcatccagaagtatggtgctgatgccctcagattatatctgattaactcccctgtggtgagagcagaaaacctccgctttaaagaagagggtgtgcgggacgtccttaaggatgtactgctcccatggtacaatgcctatcgcttcttaatccagaacgttctgaggctccagaaggaggaagaaatagaatttctctacaatgagaacacggttagagaaagccccaacattacagaccggtggatcctgtccttcatgcagtctctcattggcttctttgagactgaaatggcagcttataggctttatactgtggtgcctcgcctggtcaagtttgtagatattctgaccaattggtatgttagaatgaaccgcagaagattaaagggtgaaaatgggatggaggattgtgtcatggccctagaaaccttgtttagtgttctgctttctctttgcagacttatggctccctacacaccttttctcactgaattgatgtaccagaatctaaaggtgctgattgaccctgtttctgttcaggacaaggacacactcagcattcactacctcatgctgccccgtgttcgagaagaattgattgacaagaaaacagagagtgcagtatctcagatgcagtctgtgattgaacttggaagagtgatcagagaccgaaaaactattcccataaagtatcctttgaaagaaattgtggttatccatcaagatccagaagctcttaaagatatcaagtctttggagaagtatatcattgaggaactcaatgttcgaaaagttacactgtctacagataaaaacaagtatggcattcggctaagggcagaaccagatcacatggtcctggggaagcgtctgaagggagcctttaaggcagtgatgacgtccatcaagcagttgagcagtgaggagctggagcagttccagaagactgggaccattgttgtggaaggccatgaattgcacgatgaagacatccgcctcatgtacacctttgatcaggccacaggtgggactgcgcaatttgaagcacactcagatgctcaggctttggtcctcttagatgtcactcctgaccagtcaatggtagatgaaggaatggctcgggaagtcatcaatcgcatacagaaacttcgcaaaaagtgcaatctggttccaactgatgaaatcacagtgtactataaagcaaagtctgaaggaacatatctgaatagtgttattgaaagccacacagagttcatatttaccaccataaaggctcccttgaaaccatatccagtttctccatcggataaagtccttattcaagaaaaaacacagttgaagggatctgaactggaaattacactcaccagaggatcttcccttcctggtcctgcttgtgcatatgtcaatcttaacatttgtgcaaatggcagtgaacaaggtggagtattgctcctggaaaatccaaaaggtgacaataggttggaccttttaaagctgaagagtgttgtcactagcatttttggtgtgaaaaatacagagctggctgtcttccatgatgaaacagaaatacaaaaccaaactgacttactgagtcttagtggaaaaacactttgtgtgactgcaggatcggctccctctctgatcaacagttctagtactcttctttgtcagtatatcaacctacagctcctgaatgcaaagccacaagagtgtttaatggggacagtgggcactctcctgcttgaaaacccacttgggcagaatggactcacccaccaaggtcttctgtatgaagcagccaaggtgtttggccttcggagcaggaagctaaagctgtttctgaatgagacccaaacgcaggaaattacagaagacatccccgtgaagactttgaatatgaagactgtgtatgtttctgtgttaccaacaacagcagacttctagcatgtacttatcaatgttgttcggtcagcccttccctaattacacctatcccctacacatacatgcacatagacacacacatgaacacactgaagatatttccttcaggtgtgtgtaaaatatgctgcttggattgaaattcaaatgggattgattagtcaagtaacttgagacctcacagtaatcttcacacttaaccttagacacctatgcagtcatgttgggagcaggttacaatgttacttcagcccacagtttatttctatacttgagttcttaagtacagaagatagaagtgatttaaatggcatagtatatatatcattttctggccttttaaaatttatttgagacctcttgatgaaatggacatattatatatttctgccacctggattttcctggataatttgatggaatattttaagtttcagtaaatcagaacaataaacaaactcagatat

SEQ ID NO: 1661 - DNA, 2678 bp, Homo Sapiens
  NM_002163
agcgcggcagcaagcgtgggaacgcgggcggcgagacggcggcaggacggcggcaggatgtgtgaccggaatggtggtcggcggcttcgacagtggctgatcgagcagattgacagtagcatgtatccaggactgatttgggagaatgaggagaagagcatgttccggatcccttggaaacacgctggcaagcaagattataatcaggaagtggatgcctccatttttaaggcctgggcagtttttaaagggaagtttaaagaaggggacaaagctgaaccagccacttggaagacgaggttacgctgtgctttgaataagagcccagattttgaggaagtgacggaccggtcccaactggacatttccgagccatacaaagtttaccgaattgttcctgaggaagagcaaaaatgcaaactaggcgtggcaactgctggctgcgtgaatgaagttacagagatggagtgcggtcgctctgaaatcgacgagctgatcaaggagccttctgtggacgattacatggggatgatcaaaaggagcccttccccgccggaggcctgtcggagtcagctccttccagactggtgggcgcagcagcccagcacaggcgtgccgctggtgacggggtacaccacctacgacgcgcaccattcagcattctcccagatggtgatcagcttctactatgggggcaagctggtgggccaggccaccaccacctgccccgagggctgccgcctgtccctgagccagcctgggctgcccggcaccaagctgtatgggcccgagggcctggagctggtgcgcttcccgccggccgacgccatccccagcgagcgacagaggcaggtgacgcggaagctgttcgggcacctggagcgcggggtgctgctgcacagcagccggcagggcgtgttcgtcaagcggctgtgccagggccgcgtgttctgcagcggcaacgccgtggtgtgcaaaggcaggcccaacaagctggagcgtgatgaggtggtccaggtcttcgacaccagccagttcttccgagagctgcagcagttctataacagccagggccggcttcctgacggcagggtggtgctgtgctttggggaagagtttccggatatggcccccttgcgctccaaactcattctcgtgcagattgagcagctgtatgtccggcaactggcagaagaggctgggaagagctgtggagccggctctgtgatgcaggcccccgaggagccgccgccagaccaggtcttccggatgtttccagatatttgtgcctcacaccagagatcatttttcagagaaaaccaacagatcaccgtctaagtgcgtcgcttgggcgccccaccccgtctgcgtcctgcatccatctccctgttacagtggcccgcatcatgattaaagaatgtggatccctctgtctggggtgggatgccttactttgcacttaatttaataagggcattctcggaggagtagacgtttaatacgaagtggcggcatagccctgccgagatgtcggtgatggcctggatgctgtaaccacaacctgtggctaaaaattttattttctatcctttacccgtcattatcattagttgctatgattctttctgcattttcggttaactatcatttccaaagacttgtcattcagtaatattagcagatagctgcttcgataaaggaatttggagtttaaaaatcaacttgtgaaaacaaggttgtttttgtctttatcgtttgttagagttatagatttatgatttcataggcttgattctatgtgaaatatctttttacttttatgcattttaataagatttaaaaatatttagattaaagccccctttaatgagtacaagaaaaactcttggcttgttagaagaaagtatattctttctagaatttggtgcaggaatatgtgttcatatccaggcaaacgggtgtgtttttatcttcagacaatgaaaccttctcctctggggctttgttgccaggaagattagaactaaatttatttttttcatttctgtcatgaaatcattccagatacctcttttcttctttccaaatggttttcacatgtgtttgaaatatttgtacttcgaattgtcggattttccatgtcctcctttctcctttgtgcccagcctgagtcagcaccaatcccgcattcagaacctcccagtgaaagggcagccttcattttgagaaggtggaaggtgttagggtttgggagacagctcatccaatctcccaagtctcatggtggatttgtgactgtgagagtttccggtttaaaatctgaaaagccagatatgcctgtttccttttcccagcaccatgcctgtggaggggacagtcagacccagaggtcctttacgtgtggatggagttcacaggcgaatagaggagaggaccaggggacgtggcttgtcccttttgtccaacaaagcattatatttttaagaatggcagacctgtttgctgaagtgttcataagataacaataggcttgaatctccaattcaaatgaatgtcaaagcacatatctttaatatgctgaatgaatatttatttttgtatccattaaaacagtatattgatctcttttattctttattaaaataaaatgctcttttttaaaaaaaaaaaaaaaaaaa

SEQ ID NO: 1662 - DNA, 1572 bp, Homo Sapiens
  NM_002164
aatttctcactgcccctgtgataaactgtggtcactggctgtggcagcaactattataagatgctctgaaaactcttcagacactgaggggcaccagaggagcagactacaagaatggcacacgctatggaaaactcctggacaatcagtaaagagtaccatattgatgaagaagtgggctttgctctgccaaatccacaggaaaatctacctgatttttataatgactggatgttcattgctaaacatctgcctgatctcatagagtctggccagcttcgagaaagagttgagaagttaaacatgctcagcattgatcatctcacagaccacaagtcacagcgccttgcacgtctagttctgggatgcatcaccatggcatatgtgtggggcaaaggtcatggagatgtccgtaaggtcttgccaagaaatattgctgttccttactgccaactctccaagaaactggaactgcctcctattttggtttatgcagactgtgtcttggcaaactggaagaaaaaggatcctaataagcccctgacttatgagaacatggacgttttgttctcatttcgtgatggagactgcagtaaaggattcttcctggtctctctattggtggaaatagcagctgcttctgcaatcaaagtaattcctactgtattcaaggcaatgcaaatgcaagaacgggacactttgctaaaggcgctgttggaaatagcttcttgcttggagaaagcccttcaagtgtttcaccaaatccacgatcatgtgaacccaaaagcatttttcagtgttcttcgcatatatttgtctggctggaaaggcaacccccagctatcagacggtctggtgtatgaagggttctgggaagacccaaaggagtttgcagggggcagtgcaggccaaagcagcgtctttcagtgctttgacgtcctgctgggcatccagcagactgctggtggaggacatgctgctcagttcctccaggacatgagaagatatatgccaccagctcacaggaacttcctgtgctcattagagtcaaatccctcagtccgtgagtttgtcctttcaaaaggtgatgctggcctgcgggaagcttatgacgcctgtgtgaaagctctggtctccctgaggagctaccatctgcaaatcgtgactaagtacatcctgattcctgcaagccagcagccaaaggagaataagacctctgaagacccttcaaaactggaagccaaaggaactggaggcactgatttaatgaatttcctgaagactgtaagaagtacaactgagaaatcccttttgaaggaaggttaatgtaacccaacaagagcacattttatcatagcagagacatctgtatgcattcctgtcattacccattgtaacagagccacaaactaatactatgcaatgttttaccaataatgcaatacaaaagacctcaaaatacctgtgcatttcttgtaggaaaacaacaaaaggtaattatgtgtaattatactagaagttttgtaatctgtatcttatcattggaataaaatgacattcaataaataaaaa

SEQ ID NO: 1663 - DNA, 1402 bp, Homo Sapiens
  NM_002166
ggggacgaagggaagctccagcgtgtggccccggcgagtgcggataaaagccgccccgccgggctcgggcttcattctgagccgagcccggtgccaagcgcagctagctcagcaggcggcagcggcggcctgagcttcagggcagccagctccctcccggtctcgccttccctcgcggtcagcatgaaagccttcagtcccgtgaggtccgttaggaaaaacagcctgtcggaccacagcctgggcatctcccggagcaaaacccctgtggacgacccgatgagcctgctatacaacatgaacgactgctactccaagctcaaggagctggtgcccagcatcccccagaacaagaaggtgagcaagatggaaatcctgcagcacgtcatcgactacatcttggacctgcagatcgccctggactcgcatcccactattgtcagcctgcatcaccagagacccgggcagaaccaggcgtccaggacgccgctgaccaccctcaacacggatatcagcatcctgtccttgcaggcttctgaattcccttctgagttaatgtcaaatgacagcaaagcactgtgtggctgaataagcggtgttcatgatttcttttattctttgcacaacaacaacaacaacaaattcacggaatcttttaagtgctgaacttatttttcaaccatttcacaaggaggacaagttgaatggacctttttaaaaagaaaaaaaaaatggaaggaaaactaagaatgatcatcttcccagggtgttctcttacttggactgtgatattcgttatttatgaaaaagacttttaaatgccctttctgcagttggaaggttttctttatatactattcccaccatggggagcgaaaacgttaaaatcacaaggaattgcccaatctaagcagactttgccttttttcaaaggtggagcgtgaataccagaaggatccagtattcagtcacttaaatgaagtcttttggtcagaaattacctttttgacacaagcctactgaatgctgtgtatatatttatatataaatatatctatttgagtgaaaccttgtgaactctttaattagagttttcttgtatagtggcagagatgtctatttctgcattcaaaagtgtaatgatgtacttattcatgctaaactttttataaaagtttagttgtaaacttaacccttttatacaaaataaatcaagtgtgtttattgaatggtgattgcctgctttatttcagaggaccagtgctttgatttttattatgctatgttataactgaacccaaataaatacaagttcaaatttatgtagactgtataagattataataaaacatgtctgaagtcaaaaaaaaaaaaaaaaaaaaaaaaaaaaaaaaaaaaaaaa

SEQ ID NO: 1664 - DNA, 1288 bp, Homo Sapiens
  NM_002167
gctaaaggcggactggcagggggcagggaagctcaaagatctggggtgctgccaggaaaaagcaaattctggaagttaatggttttgagtgatttttaaatccttgctggcggagaggcccgcctctccccggtatcagcgcttcctcattctttgaatccgcggctccgcggtcttcggcgtcagaccagccggaggaagcctgtttgcaatttaagcgggctgtgaacgcccagggccggcgggggcagggccgaggcgggccattttgaataaagaggcgtgccttccaggcaggctctataagtgaccgccgcggcgagcgtgcgcgcgttgcaggtcactgtagcgggacttcttttggttttctttctctttggggcacctctggactcactccccagcatgaaggcgctgagcccggtgcgcggctgctacgaggcggtgtgctgcctgtcggaacgcagtctggccatcgcccggggccgagggaagggcccggcagctgaggagccgctgagcttgctggacgacatgaaccactgctactcccgcctgcgggaactggtacccggagtcccgagaggcactcagcttagccaggtggaaatcctacagcgcgtcatcgactacattctcgacctgcaggtagtcctggccgagccagcccctggaccccctgatggcccccaccttcccatccagacagccgagctcactccggaacttgtcatctccaacgacaaaaggagcttttgccactgactcggccgtgtcctgacacctccagaacgcaggtgctggcgcccgttctgcctgggaccccgggaacctctcctgccggaagccggacggcagggatgggccccaacttcgccctgcccacttgacttcaccaaatcccttcctggagactaaacctggtgctcaggagcgaaggactgtgaacttgtggcctgaagagccagagctagctctggccaccagctgggcgacgtcaccctgctcccaccccacccccaagttctaaggtctcttcagagcgtggaggtgtggaaggagtggctgctctccaaactatgccaaggcggcggcagagctggtcttctggtctccttggagaaaggttctgttgccctgatttatgaactctataatagagtatataggttttgtaccttttttacaggaaggtgactttctgtaacaatgcgatgtatattaaactttttataaaagttaacattttgcataataaacgatttttaaacacttgtgtatatgatga

SEQ ID NO: 1665 - DNA, 1809 bp, Homo Sapiens
  NM_002185
gtcttcctccctccctcccttcctcttactctcattcatttcatacacactggctcacacatctactctctctctctatctctctcagaatgacaattctaggtacaacttttggcatggttttttctttacttcaagtcgtttctggagaaagtggctatgctcaaaatggagacttggaagatgcagaactggatgactactcattctcatgctatagccagttggaagtgaatggatcgcagcactcactgacctgtgcttttgaggacccagatgtcaacatcaccaatctggaatttgaaatatgtggggccctcgtggaggtaaagtgcctgaatttcaggaaactacaagagatatatttcatcgagacaaagaaattcttactgattggaaagagcaatatatgtgtgaaggttggagaaaagagtctaacctgcaaaaaaatagacctaaccactatagttaaacctgaggctccttttgacctgagtgtcgtctatcgggaaggagccaatgactttgtggtgacatttaatacatcacacttgcaaaagaagtatgtaaaagttttaatgcacgatgtagcttaccgccaggaaaaggatgaaaacaaatggacgcatgtgaatttatccagcacaaagctgacactcctgcagagaaagctccaaccggcagcaatgtatgagattaaagttcgatccatccctgatcactattttaaaggcttctggagtgaatggagtccaagttattacttcagaactccagagatcaataatagctcaggggagatggatcctatcttactaaccatcagcattttgagttttttctctgtcgctctgttggtcatcttggcctgtgtgttatggaaaaaaaggattaagcctatcgtatggcccagtctccccgatcataagaagactctggaacatctttgtaagaaaccaagaaaaaatttaaatgtgagtttcaatcctgaaagtttcctggactgccagattcatagggtggatgacattcaagctagagatgaagtggaaggttttctgcaagatacgtttcctcagcaactagaagaatctgagaagcagaggcttggaggggatgtgcagagccccaactgcccatctgaggatgtagtcatcactccagaaagctttggaagagattcatccctcacatgcctggctgggaatgtcagtgcatgtgacgcccctattctctcctcttccaggtccctagactgcagggagagtggcaagaatgggcctcatgtgtaccaggacctcctgcttagccttgggactacaaacagcacgctgccccctccattttctctccaatctggaatcctgacattgaacccagttgctcagggtcagcccattcttacttccctgggatcaaatcaagaagaagcatatgtcaccatgtccagcttctaccaaaaccagtgaagtgtaagaaacccagactgaacttaccgtgagcgacaaagatgatttaaaagggaagtctagagttcctagtctccctcacagcacagagaagacaaaattagcaaaaccccactacacagtctgcaagattctgaaacattgctttgaccactcttcctgagttcagtggcactcaacatgagtcaagagcatcctgcttctaccatgtggatttggtcacaaggtttaaggtgacccaatgattcagctatttaaaaaaaaaagaggaaagaatgaaagagtaaaggaaatgattgaggagtgaggaaggcaggaagagagcatgagaggaaaaaaa

SEQ ID NO: 1666 - DNA, 3218 bp, Homo Sapiens
  NM_002193
actcggctcgcctcgcggcgggcgccctcgtcgccagcggcgcaccatggacgggctgcccggtcgggcgctgggggccgcctgccttctgctgctggcggccggctggctggggcctgaggcctggggctcacccacgcccccgccgacgcctgccgcgccgccgccacccccgccacccggatccccgggtggctcgcaggacacctgtacgtcgtgcggcggcttccggcggccagaggagctcggccgagtggacggcgacttcctggaggcggtgaagcggcacatcttgagccgcctgcagatgcggggccggcccaacatcacgcacgccgtgcctaaggccgccatggtcacggccctgcgcaagctgcacgcgggcaaggtgcgcgaggacggccgcgtggagatcccgcacctcgacggccacgccagcccgggcgccgacggccaggagcgcgtttccgaaatcatcagcttcgccgagacagatggcctcgcctcctcccgggtccgcctatacttcttcatctccaacgaaggcaaccagaacctgtttgtggtccaggccagcctgtggctttacctgaaactcctgccctacgtcctggagaagggcagccggcggaaggtgcgggtcaaagtgtacttccaggagcagggccacggtgacaggtggaacatggtggagaagagggtggacctcaagcgcagcggctggcataccttcccactcacggaggccatccaggccttgtttgagcggggcgagcggcgactcaacctagacgtgcagtgtgacagctgccaggagctggccgtggtgccggtgttcgtggacccaggcgaagagtcgcaccggccctttgtggtggtgcaggctcggctgggcgacagcaggcaccgcattcgcaagcgaggcctggagtgcgatggccggaccaacctctgttgcaggcaacagttcttcattgacttccgcctcatcggctggaacgactggatcatagcacccaccggctactacgggaactactgtgagggcagctgcccagcctacctggcaggggtccccggctctgcctcctccttccacacggctgtggtgaaccagtaccgcatgcggggtctgaaccccggcacggtgaactcctgctgcattcccaccaagctgagcaccatgtccatgctgtacttcgatgatgagtacaacatcgtcaagcgggacgtgcccaacatgattgtggaggagtgcggctgcgcctgacagtgcaaggcaggggcacggtggtggggcacggagggcagtcccgggtgggcttcttccagcccccgcgggaacgggggtacacggtgggctgagtacagtcattctgttgggctgtggagatagtgccagggtgcggcctgagatatttttctacagcttcatagagcaaccagtcaaaaccagagcgagaaccctcaactgacatgaaatactttaaaatgcacacgtagccacgcacagccagacgcatcctgccacccacacagcagcctccaggataccagcaaatggatgcggtgacaaatggcagcttagctacaaatgcctgtcagtcggagagaatggggtgagcagccaccattcccaccagctggcccggccactctgaattgcgccttccgagcacacataaaagcacaaagacagagacgcagagagagagagagagccacggagaggaaaagcagatgcaggggtggggagcgcagctcggcggaggctgcgtgtgccccgtggcttttaccaggcctgctctgcctggctcgatgtctgcttcttccccagcctgggatccttcgtgcttcaaggcctggggagcctgtccttccatgcccttgtcgagggaaagagacccagaaaggacacaacccgtcagagacctgggagcaggggcaatgaccgtttgactgtttgtggcttgggcctctgacatgacttatgtgtgtgtgtgtttttggggtggggagggagggagagaagagggggctaaatttgatgctttaactgatctccaacagttgacaggtcatccttgccagttgtataactgaaaaaggacttttctaccaggtatgaccttttaagtgaaaatctgaattgttctaaatggaaagaaaaaaagttgcaatctgtgcccttcattggggacattcctctaggactggtttggggacgggtgggaatgacccctaggcaaggggatgagaccgcaggaggaaatggcggggaggaggcattcttgaactgctgaggatggggggtgtcccctcagcggaggccaagggaggggagcagcctagttggtcttggagagatggggaaggctttcagctgatttgcagaagttgcccatgtgggccccagccatcagggctggccgtggacgtggcccctgcccactcacctgcccgcctgcccgcccgcccgcatagcacttgcagacctgcctgaacgcacatgacatagcacttgccgatctgcgtgtgtccagaagtggcccttggccgagcgccgaactcgctcgccctctagatgtccaagtgccacgtgaactatgcaatttaaagggttgacccacactagacgaaactggactcgtacgactctttttatattttttatacttgaaatgaaatcctttgcttcttttttaagcgaatgattgcttttaatgtttgcactgatttagttgcatgattagtcagaaactgccatttgaaaaaaagttatttttatagcagcaaaaaaaaaaaaaaaagaatacagttaaatgtattatacataattttggaaccaaagaggccaacagatcagttttaattttattagacggtgaggccatctgagatgaggtggacgttctgagcagtcccttgagtggcctgccaacgtttcagggtatgaatggattttgtttattcggtttgatgtgtcttttccatccttacacacccagaaggtagagtaaaaatgactatgatagaatgcaggtgtgtatccttaaatcctcatctttatgtttatttaataaagctccccttagattctgtttcataataatttaaaaccaaacaattttcccatagacttgctgttaaagtattgtacgtttgtgtacagtttaagaaaataaaagattgagtgccacgggaaaaaaaaaaaaaaa

SEQ ID NO: 1667 - DNA, 3561 bp, Homo Sapiens
  NM_002197
atcgcgcggcggccccgggggcgagagggggcggagcgtggaggcggcagctggaaccgcgcagcgcacgggaacgcgtcccgctgcttgggtcaggttcgccggtcgcgggagccccgccgtgcagtcggaggaacacgtggccatcagtaatcatgagcaacccattcgcacaccttgctgagccattggatcctgtacaaccaggaaagaaattcttcaatttgaataaattggaggattcaagatatgggcgcttaccattttcgatcagagttcttctggaagcagccattcggaattgtgatgagtttttggtgaagaaacaggatattgaaaatattctacattggaatgtcacgcagcacaagaacatagaagtgccatttaagcctgctcgtgtcatcctgcaggactttacgggtgtgcccgctgtggttgactttgctgcaatgcgtgatgctgtgaaaaagttaggaggagatccagagaaaataaaccctgtctgccctgctgatcttgtaatagatcattccatccaggttgatttcaacagaagggcagacagtttacagaagaatcaagacctggaatttgaaagaaatagagagcgatttgaatttttaaagtggggttcccaggcttttcacaacatgcggattattccccctggctcaggaatcatccaccaggtgaatttggaatatttggcaagagtggtatttgatcaggatggatattattacccagacagcctcgtgggcacagactcgcacactaccatgattgatggcttgggcattcttggttggggtgtcggtggtattgaagcagaagctgtcatgctgggtcagccaatcagtatggtgcttcctcaggtgattggctacaggctgatggggaagccccaccctctggtaacatccactgacatcgtgctcaccattaccaagcacctccgccaggttggggtagtgggcaaatttgtcgagttcttcgggcctggagtagcccagttgtccattgctgaccgagctacgattgctaacatgtgtccagagtacggagcaactgctgcctttttcccagttgatgaagttagtatcacgtacctggtgcaaacaggtcgtgatgaagaaaaattaaagtatattaaaaaatatcttcaggctgtaggaatgtttcgagatttcaatgacccttctcaagacccagacttcacccaggttgtggaattagatttgaaaacagtagtgccttgctgtagtggacccaaaaggcctcaggacaaagttgctgtgtccgacatgaaaaaggactttgagagctgccttggagccaagcaaggatttaaaggattccaagttgctcctgaacatcataatgaccataagacctttatctatgataacactgaattcacccttgctcatggttctgtggtcattgctgccattactagctgcacaaacaccagtaatccgtctgtgatgttaggggcaggattgttagcaaagaaagctgtggatgctggcctgaacgtgatgccttacatcaaaactagcctgtctcctgggagtggcgtggtcacctactacctacaagaaagcggagtcatgccttatctgtctcagcttgggtttgacgtggtgggctatggctgcatgacctgcattggcaacagtgggcctttacctgaacctgtggtagaagccatcacacagggagaccttgtagctgttggagtactatctggaaacaggaattttgaaggtcgagttcaccccaacacccgggccaactatttagcctctccccccttagtaatagcatatgcaattgctggaaccatcagaatcgactttgagaaagagccattgggagtaaatgcaaagggacagcaggtatttctgaaagatatctggccgactagagacgagatccaggcagtggagcgtcagtatgtcatcccggggatgtttaaggaagtctatcagaaaatagagactgtgaatgaaagctggaatgccttagcaaccccatcagataagctgtttttctggaattccaaatctacgtatatcaaatcaccaccattctttgaaaacctgactttggatcttcagccccctaaatctatagtggatgcctatgtgctgctaaatttgggagattcggtaacaactgaccacatctccccagctggaaatattgcaagaaacagtcctgctgctcgctacttaactaacagaggcctaactccacgagaattcaactcctatggctcccgccgaggtaatgacgccgtcatggcacggggaacatttgccaacattcgcttgttaaacagatttttgaacaagcaggcaccacagactatccatctgccttctggggaaatccttgatgtgtttgatgctgctgagcggtaccagcaggcaggccttcccctgatcgttctggctggcaaagagtacggtgcaggcagctcccgagactgggcagctaagggccctttcctgctgggaatcaaagccgtcctggccgagagctacgagcgcattcaccgcagtaacctggttgggatgggtgtgatcccacttgaatatctccctggtgagaatgcagatgccctggggctcacagggcaagaacgatacactatcattattccagaaaacctcaaaccacaaatgaaagtccaggtcaagctggatactggcaagaccttccaggctgtcatgaggtttgacactgatgtggagctcacttatttcctcaacgggggcatcctcaactacatgatccgcaagatggccaagtaggagacgtgcacttggtgctgcgcccagggaggaagccgcaccaccagccagcgcaggccctggtggagaggcctccctggctgcctctgggaggggtgctgccttgtagatggagcaagtgagcactgagggtctggtgccaatcctgtaggcacaaaaccagaagtttctacattctctatttttgttaatcatcttctctttttccagaatttggaagctagaatggtgggaatgtcagtagtgccagaaagagagaaccaagcttgtctttaaagttactgatcacaggacgttgctttttcactgtttcctattaatcttcagctgaacacaagcaaaccttctcaggaggtgtctcctaccctcttattgttcctcttacgctctgctcaatgaaaccttcctcttgagggtcattttcctttctgtattaattataccagtgttaagtgacatagataagaactttgcacacttcaaatcagagcagtgattctctcttctctccccttttccttcagagtgaatcatccagactcctcatggataggtcgggtgttaaagttgttttgattatgtaccttttgatagatccacataaaaagaaatgtgaagttttcttttactatcttttcatttatcaagcagagacctttgttgggaggcggtttgggagaacacatttctaatttgaatgaaatgaaatctattttcagtgaaaaaaaaaaaaaaa

SEQ ID NO: 1668 - DNA, 2302 bp, Homo Sapiens
  NM_002199
agccgcggctcttcgcagtttcctctccttgttttgctttcgatctggactgttctcaggcaagccggggagtaacttttagttttgctcctgcgattattcaactgacgggctttcatttccatttcacataccctagcaacacttataccttgcggaattgtattggtagcgtgaaaaaagcacactgagagggcaccatgccggtggaaaggatgcgcatgcgcccgtggctggaggagcagataaactccaacacgatcccggggctcaagtggcttaacaaggaaaagaagatttttcagatcccctggatgcatgcggctagacatgggtgggatgtggaaaaagatgcaccactctttagaaactgggcaatccatacaggaaagcatcaaccaggagtagataaacctgatcccaaaacatggaaggcgaatttcagatgcgccatgaattccttgcctgatattgaagaagtcaaggataaaagcataaagaaaggaaataatgccttcagggtctaccgaatgctgcccctatcagaacggccttctaagaaaggaaagaaaccaaagacagaaaaagaagacaaagttaagcacatcaagcaagaaccagttgagtcatctctggggcttagtaatggagtaagtgatctttctcctgagtatgcggtcctgacttcaactataaaaaatgaagtggatagtacggtgaacatcatagttgtaggacagtcccatctggacagcaacattgagaatcaagagattgtcaccaatccgccagacatttgccaagttgtagaggtgaccactgagagcgacgagcagccggtcagcatgagcgagctctaccctctgcagatctcccccgtgtcttcctatgcagaaagcgaaacgactgatagtgtgcccagcgatgaagagagtgccgaggggcggccacactggcggaagaggaatattgaaggcaaacagtacctcagcaacatggggactcgaggctcctacctgctgcccggcatggcgtccttcgtcacttccaacaaaccggacctccaggtcaccatcaaagaggagagcaatccggtgccttacaacagctcctggcccccttttcaagacctccccctttcttcctccatgaccccagcatccagcagcagtcggccagaccgggagacccgggccagcgtcatcaagaaaacatcggatatcacccaggcccgcgtcaagagctgttaagcctctgactctccgcggtggttgttggggcttcttggctttgttttgttgtttgtttgtattttatttttttctctctgacacctattttagacaaatctaagggaaaaagccttgacaatagaacattgattgctgtgtccaactccagtactggagcttctctttaactcaggactccagcccattggtagacgtgtgtttctagagcctgctggatctcccagggctactcactcaagttcaaggaccaacaagggcagtggaggtgctgcattgcctgcggtcaaggccagcaaggtggagtggatgcctcagaacggacgagataatgtgaactagctggaattttttattcttgtgaatatgtacataggcagcactagcgacattgcagtctgcttctgcaccttatcttaaagcacttacagataggccttcttgtgatcttgctctatctcacagcacactcagcacccccttctctgcccattccccagcctctcttcctatcccatcccatcccatcccatcccatcccatcccatcccgctcttttcctacttttccttccctcaaagcttccattccacatccggaggagaagaaggaaatgaatttctctacagatgtcccattttcagactgctttaaaaaaaatccttctaatctgctatgcttgaatgccacgcggtacaaaggaaaaagtatcatggaaatattatgcaaattcccagatttgaagacaaaaatactctaattctaaccagagcaagcttttttattttttatacaggggaatattttattcaaggtaaaattctaaataaaatataattgttttttatcttttctacagcaaatttataattttaagattccttttcttgtttatcagcagttgttattacatccttgtggcacatttttttttttaattttgtaaaggtgaaaaaagcttttatgagctcatgtagcaatcagattttcctgtggattgataataaatgaatatgatatatagttaaatttttaaaaaaaaaaaaaaaaaa

SEQ ID NO: 1669 - DNA, 5044 bp, Homo Sapiens
  NM_002204
tttccccggaaggaaagcgcagcccgggctgggctcgcaaggtggggaggtgcgggactgggcgtggggaggcggggcgcgcgccgggggacccctccctcctgtcctccttgcggtcgaccggtgcgcttgccagatccgccgcgaagccgggatcgaaggcgacagcgcggccaagggggcgcggccgggacaagctgggggccggttgcccggggcagggacggcggcgacccggccgctggggaggcaggaagatagacccacggatcttaggaagggatccgagagcgcagctgtgaaactggctggggctgggggcacgaaaccgatcagcgctacggagcgcagcggccggcgggttccagtgtcctccggcggcgcggggagcaggtgaacaggtcctcacgcccagctccgcgccctcacgcgctctcgccgggaccccgcttccgctggcagccatgggccccggccccagccgcgcgccccgcgccccacgcctgatgctctgtgcgctcgccttgatggtggcggccggcggctgcgtcgtctccgccttcaacctggatacccgattcctggtagtgaaggaggccgggaacccgggcagcctcttcggctactcggtcgccctccatcggcagacagagcggcagcagcgctacctgctcctggctggtgccccccgggagctcgctgtgcccgatggctacaccaaccggactggtgctgtgtacctgtgcccactcactgcccacaaggatgactgtgagcggatgaacatcacagtgaaaaatgaccctggccatcacattattgaggacatgtggcttggagtgactgtggccagccagggccctgcaggcagagttctggtctgtgcccaccgctacacccaggtgctgtggtcagggtcagaagaccagcggcgcatggtgggcaagtgctacgtgcgaggcaatgacctagagctggactccagtgatgactggcagacctaccacaacgagatgtgcaatagcaacacagactacctggagacgggcatgtgccagctgggcaccagcggtggcttcacccagaacactgtgtacttcggcgcccccggtgcctacaactggaaaggaaacagctacatgattcagcgcaaggagtgggacttatctgagtatagttacaaggacccagaggaccaaggaaacctctatattgggtacacgatgcaggtaggcagcttcatcctgcaccccaaaaacatcaccattgtgacaggtgccccacggcaccgacatatgggcgcggtgttcttgctgagccaggaggcaggcggagacctgcggaggaggcaggtgctggagggctcgcaggtgggcgcctattttggcagcgccattgccctggcagacctgaacaatgatgggtggcaggacctcctggtgggcgccccctactacttcgagaggaaagaggaagtagggggtgccatctatgtcttcatgaaccaggcgggaacctccttccctgctcacccctcactccttcttcatggccccagtggctctgcctttggtttatctgtggccagcattggtgacatcaaccaggatggatttcaggatattgctgtgggagctccgtttgaaggcttgggcaaagtgtacatctatcacagtagctctaaggggctccttagacagccccagcaggtaatccatggagagaagctgggactgcctgggttggccaccttcggctattccctcagtgggcagatggatgtggatgagaacttctacccagaccttctagtgggaagcctgtcagaccacattgtgctgctgcgggcccggcccgtcatcaacatcgtccacaagaccttggtgcccaggccagctgtgctggaccctgcactttgcacggccacctcttgtgtgcaagtggagctgtgctttgcttacaaccagagtgccgggaaccccaactacaggcgaaacatcaccctggcctacactctggaggctgacagggaccgccggccgccccggctccgctttgccggcagtgagtccgctgtcttccacggcttcttctccatgcccgagatgcgctgccagaagctggagctgctcctgatggacaacctccgtgacaaactccgccccatcatcatctccatgaactactctttacctttgcggatgcccgatcgcccccggctggggctgcggtccctggacgcctacccgatcctcaaccaggcacaggctctggagaaccacactgaggtccagttccagaaggagtgcgggcctgacaacaagtgtgagagcaacttgcagatgcgggcagccttcgtgtcagagcagcagcagaagctgagcaggctccagtacagcagagacgtccggaaattgctcctgagcatcaacgtgacgaacacccggacctcggagcgctccggggaggacgcccacgaggcgctgctcaccctggtggtgcctcccgccctgctgctgtcctcagtgcgcccccccggggcctgccaagctaatgagaccatcttttgcgagctggggaaccccttcaaacggaaccagaggatggagctgctcatcgcctttgaggtcatcggggtgaccctgcacacaagggaccttcaggtgcagctgcagctctccacgtcgagtcaccaggacaacctgtggcccatgatcctcactctgctggtggactatacactccagacctcgcttagcatggtaaatcaccggctacaaagcttctttggggggacagtgatgggtgagtctggcatgaaaactgtggaggatgtaggaagccccctcaagtatgaattccaggtgggcccaatgggggaggggctggtgggcctggggaccctggtcctaggtctggagtggccctacgaagtcagcaatggcaagtggctgctgtatcccacggagatcaccgtccatggcaatgggtcctggccctgccgaccacctggagaccttatcaaccctctcaacctcactctttctgaccctggggacaggccatcatccccacagcgcaggcggcgacagctggatccagggggaggccagggccccccacctgtcactctggctgctgccaaaaaagccaagtctgagactgtgctgacctgtgccacagggcgtgcccactgtgtgtggctagagtgccccatccctgatgcccccgttgtcaccaacgtgactgtgaaggcacgagtgtggaacagcaccttcatcgaggattacagagactttgaccgagtccgggtaaatggctgggctaccctattcctccgaaccagcatccccaccatcaacatggagaacaagaccacgtggttctctgtggacattgactcggagctggtggaggagctgccggccgaaatcgagctgtggctggtgctggtggccgtgggtgcagggctgctgctgctggggctgatcatcctcctgctgtggaagtgcggcttcttcaagcgagcccgcactcgcgccctgtatgaagctaagaggcagaaggcggagatgaagagccagccgtcagagacagagaggctgaccgacgactactgagggggcagccccccgcccccggcccacctggtgtgacttctttaagcggacccgctattatcagatcatgcccaagtaccacgcagtgcggatccgggaggaggagcgctacccacctccagggagcaccctgcccaccaagaagcactgggtgaccagctggcagactcgggaccaatactactgacgtcctccctgatcccaccccctcctcccccagtgtcccctttcttcctatttatcataagttatgcctctgacagtccacaggggccaccacctttggctggtagcagcaggctcaggcacatacacctcgtcaagagcatgcacatgctgtctggccctggggatcttcccacaggagggccagcgctgtggaccttacaacgccgagtgcactgcattcctgtgccctagatgcacgtggggcccactgctcgtggactgtgctggtgcatcacggatggtgcatgggctcgccgtgtctcagcctctgccagcgccaaaacaagccaaagagcctcccaccagagccgggaggaaaaggcccctgcaatgtggtgacacctccccctttcacactggatccatcttgagccacagtcactggattgactttgctgtcaaaactactgacagggagcagcccccgggccgctggctggtgggcccccaatgacacccatgccagagaggtggggatcctgcctaaggttgtctacgggggcacttggaggacctggcgtgctcagacccaacagcaaaggaactagaaagaaggacccagaacggcttgctttcctgcatctctgtgaagcctctctccttggccacagactgaactcgcagggaatgcagcaggaaggaacaaagacaggcaaacggcaacgtagcctgggctcactgtgctggggcacggcgggatcctccacagagaggaggggaccaattctggacagacagatgttgggaggatacagaggagatgccacttctcactcaccactaccagccagcctcagaaggccccagagagaccctgcaagaccacggagggagcgacacttgaatgtagaataggcagggggccctgccccaccccatccagccagaccccacgctgaccatgcgtcaggggcctagaggtggagttcttagctatccttggctttcagagccagcctggctctgccccctcccccatgggctgtgtcctaaggcccatttgagaagctgaggctagttccagaaaacctctcctgacccctgcctgttggcaggcccactccccagccccagccccttccatggtactgtagcaggggaattccctccccctccttgtgccttctttgtatataggcttctcacggcgaccaataaacagctcccagtttgtatgcaaaaaaaaaaaaaaaaaa

SEQ ID NO: 1670 - DNA, 4267 bp, Homo Sapiens
  NM_002205
attcgcctctgggaggtttaggaagcggctccgggtcggtggccccaggacagggaagagcgggcgctatggggagccggacgccagagtcccctctccacgccgtgcagctgcgctggggcccccggcgccgacccccgctgctgccgctgctgttgctgctgctgccgccgccacccagggtcgggggcttcaacttagacgcggaggccccagcagtactctcggggcccccgggctccttcttcggattctcagtggagttttaccggccgggaacagacggggtcagtgtgctggtgggagcacccaaggctaataccagccagccaggagtgctgcagggtggtgctgtctacctctgtccttggggtgccagccccacacagtgcacccccattgaatttgacagcaaaggctctcggctcctggagtcctcactgtccagctcagagggagaggagcctgtggagtacaagtccttgcagtggttcggggcaacagttcgagcccatggctcctccatcttggcatgcgctccactgtacagctggcgcacagagaaggagccactgagcgaccccgtgggcacctgctacctctccacagataacttcacccgaattctggagtatgcaccctgccgctcagatttcagctgggcagcaggacagggttactgccaaggaggcttcagtgccgagttcaccaagactggccgtgtggttttaggtggaccaggaagctatttctggcaaggccagatcctgtctgccactcaggagcagattgcagaatcttattaccccgagtacctgatcaacctggttcaggggcagctgcagactcgccaggccagttccatctatgatgacagctacctaggatactctgtggctgttggtgaattcagtggtgatgacacagaagactttgttgctggtgtgcccaaagggaacctcacttacggctatgtcaccatccttaatggctcagacattcgatccctctacaacttctcaggggaacagatggcctcctactttggctatgcagtggccgccacagacgtcaatggggacgggctggatgacttgctggtgggggcacccctgctcatggatcggacccctgacgggcggcctcaggaggtgggcagggtctacgtctacctgcagcacccagccggcatagagcccacgcccacccttaccctcactggccatgatgagtttggccgatttggcagctccttgacccccctgggggacctggaccaggatggctacaatgatgtggccatcggggctccctttggtggggagacccagcagggagtagtgtttgtatttcctgggggcccaggagggctgggctctaagccttcccaggttctgcagcccctgtgggcagccagccacaccccagacttctttggctctgcccttcgaggaggccgagacctggatggcaatggatatcctgatctgattgtggggtcctttggtgtggacaaggctgtggtatacaggggccgccccatcgtgtccgctagtgcctccctcaccatcttccccgccatgttcaacccagaggagcggagctgcagcttagaggggaaccctgtggcctgcatcaaccttagcttctgcctcaatgcttctggaaaacacgttgctgactccattggtttcacagtggaacttcagctggactggcagaagcagaagggaggggtacggcgggcactgttcctggcctccaggcaggcaaccctgacccagaccctgctcatccagaatggggctcgagaggattgcagagagatgaagatctacctcaggaacgagtcagaatttcgagacaaactctcgccgattcacatcgctctcaacttctccttggacccccaagccccagtggacagccacggcctcaggccagccctacattatcagagcaagagccggatagaggacaaggctcagatcttgctggactgtggagaagacaacatctgtgtgcctgacctgcagctggaagtgtttggggagcagaaccatgtgtacctgggtgacaagaatgccctgaacctcactttccatgcccagaatgtgggtgagggtggcgcctatgaggctgagcttcgggtcaccgcccctccagaggctgagtactcaggactcgtcagacacccagggaacttctccagcctgagctgtgactactttgccgtgaaccagagccgcctgctggtgtgtgacctgggcaaccccatgaaggcaggagccagtctgtggggtggccttcggtttacagtccctcatctccgggacactaagaaaaccatccagtttgacttccagatcctcagcaagaatctcaacaactcgcaaagcgacgtggtttcctttcggctctccgtggaggctcaggcccaggtcaccctgaacggtgtctccaagcctgaggcagtgctattcccagtaagcgactggcatccccgagaccagcctcagaaggaggaggacctgggacctgctgtccaccatgtctatgagctcatcaaccaaggccccagctccattagccagggtgtgctggaactcagctgtccccaggctctggaaggtcagcagctcctatatgtgaccagagttacgggactcaactgcaccaccaatcaccccattaacccaaagggcctggagttggatcccgagggttccctgcaccaccagcaaaaacgggaagctccaagccgcagctctgcttcctcgggacctcagatcctgaaatgcccggaggctgagtgtttcaggctgcgctgtgagctcgggcccctgcaccaacaagagagccaaagtctgcagttgcatttccgagtctgggccaagactttcttgcagcgggagcaccagccatttagcctgcagtgtgaggctgtgtacaaagccctgaagatgccctaccgaatcctgcctcggcagctgccccaaaaagagcgtcaggtggccacagctgtgcaatggaccaaggcagaaggcagctatggcgtcccactgtggatcatcatcctagccatcctgtttggcctcctgctcctaggtctactcatctacatcctctacaagcttggattcttcaaacgctccctcccatatggcaccgccatggaaaaagctcagctcaagcctccagccacctctgatgcctgagtcctcccaatttcagactcccattcctgaagaaccagtccccccaccctcattctactgaaaaggaggggtctgggtacttcttgaaggtgctgacggccagggagaagctcctctccccagcccagagacatacttgaagggccagagccaggggggtgaggagctggggatccctcccccccatgcactgtgaaggacccttgtttacacataccctcttcatggatgggggaactcagatccagggacagaggccccagcctccctgaagcctttgcattttggagagtttcctgaaacaacttggaaagataactaggaaatccattcacagttctttgggccagacatgccacaaggacttcctgtccagctccaacctgcaaagatctgtcctcagccttgccagagatccaaaagaagcccccagctaagaacctggaacttggggagttaagacctggcagctctggacagccccaccctggtgggccaacaaagaacactaactatgcatggtgccccaggaccagctcaggacagatgccacacaaggatagatgctggcccagggcccagagcccagctccaaggggaatcagaactcaaatggggccagatccagcctggggtctggagttgatctggaacccagactcagacattggcacctaatccaggcagatccaggactatatttgggcctgctccagacctgatcctggaggcccagttcaccctgatttaggagaagccaggaatttcccaggaccctgaaggggccatgatggcaacagatctggaacctcagcctggccagacacaggccctccctgttccccagagaaaggggagcccactgtcctgggcctgcagaatttgggttctgcctgccagctgcactgatgctgcccctcatctctctgcccaacccttccctcaccttggcaccagacacccaggacttatttaaactctgttgcaagtgcaataaatctgacccagtgcccccactgaccagaactagaaaaaaaaaaaaaaaaaaa

SEQ ID NO: 1671 - DNA, 4138 bp, Homo Sapiens
  NM_002206
gggcgccggagctgcggctgctgtagttgtcctagccggtgctggggcggcggggtggcggagcggcgggcgggcgggagggctggcggggcgaacgtctgggagacgtctgaaagaccaacgagactttggagaccagagacgcgcctggggggacctggggcttggggcgtgcgagatttcccttgcattcgctgggagctcgcgcagggatcgtcccatggccggggctcggagccgcgacccttggggggcctccgggatttgctacctttttggctccctgctcgtcgaactgctcttctcacgggctgtcgccttcaatctggacgtgatgggtgccttgcgcaaggagggcgagccaggcagcctcttcggcttctctgtggccctgcaccggcagttgcagccccgaccccagagctggctgctggtgggtgctccccaggccctggctcttcctgggcagcaggcgaatcgcactggaggcctcttcgcttgcccgttgagcctggaggagactgactgctacagagtggacatcgaccagggagctgatatgcaaaaggaaagcaaggagaaccagtggttgggagtcagtgttcggagccaggggcctgggggcaagattgttacctgtgcacaccgatatgaggcaaggcagcgagtggaccagatcctggagacgcgggatatgattggtcgctgctttgtgctcagccaggacctggccatccgggatgagttggatggtggggaatggaagttctgtgagggacgcccccaaggccatgaacaatttgggttctgccagcagggcacagctgccgccttctcccctgatagccactacctcctctttggggccccaggaacctataattggaaggggttgctttttgtgaccaacattgatagctcagaccccgaccagctggtgtataaaactttggaccctgctgaccggctcccaggaccagccggagacttggccctcaatagctacttaggcttctctattgactcggggaaaggtctggtgcgtgcagaagagctgagctttgtggctggagccccccgcgccaaccacaagggtgctgtggtcatcctgcgcaaggacagcgccagtcgcctggtgcccgaggttatgctgtctggggagcgcctgacctccggctttggctactcactggctgtggctgacctcaacagtgatggctggccagacctgatagtgggtgccccctacttctttgagcgccaagaagagctggggggtgctgtgtatgtgtacttgaaccaggggggtcactgggctgggatctcccctctccggctctgcggctcccctgactccatgttcgggatcagcctggctgtcctgggggacctcaaccaagatggctttccagatattgcagtgggtgccccctttgatggtgatgggaaagtcttcatctaccatgggagcagcctgggggttgtcgccaaaccttcacaggtgctggagggcgaggctgtgggcatcaagagcttcggctactccctgtcaggcagcttggatatggatgggaaccaataccctgacctgctggtgggctccctggctgacaccgcagtgctcttcagggccagacccatcctccatgtctcccatgaggtctctattgctccacgaagcatcgacctggagcagcccaactgtgctggcggccactcggtctgtgtggacctaagggtctgtttcagctacattgcagtccccagcagctatagccctactgtggccctggactatgtgttagatgcggacacagaccggaggctccggggccaggttccccgtgtgacgttcctgagccgtaacctggaagaacccaagcaccaggcctcgggcaccgtgtggctgaagcaccagcatgaccgagtctgtggagacgccatgttccagctccaggaaaatgtcaaagacaagcttcgggccattgtagtgaccttgtcctacagtctccagacccctcggctccggcgacaggctcctggccaggggctgcctccagtggcccccatcctcaatgcccaccagcccagcacccagcgggcagagatccacttcctgaagcaaggctgtggtgaagacaagatctgccagagcaatctgcagctggtccgcgcccgcttctgtacccgggtcagcgacacggaattccaacctctgcccatggatgtggatggaacaacagccctgtttgcactgagtgggcagccagtcattggcctggagctgatggtcaccaacctgccatcggacccagcccagccccaggctgatggggatgatgcccatgaagcccagctcctggtcatgcttcctgactcactgcactactcaggggtccgggccctggaccctgcggagaagccactctgcctgtccaatgagaatgcctcccatgttgagtgtgagctggggaaccccatgaagagaggtgcccaggtcaccttctacctcatccttagcacctccgggatcagcattgagaccacggaactggaggtagagctgctgttggccacgatcagtgagcaggagctgcatccagtctctgcacgagcccgtgtcttcattgagctgccactgtccattgcaggaatggccattccccagcaactcttcttctctggtgtggtgaggggcgagagagccatgcagtctgagcgggatgtgggcagcaaggtcaagtatgaggtcacggtttccaaccaaggccagtcgctcagaaccctgggctctgccttcctcaacatcatgtggcctcatgagattgccaatgggaagtggttgctgtacccaatgcaggttgagctggagggcgggcaggggcctgggcagaaagggctttgctctcccaggcccaacatcctccacctggatgtggacagtagggataggaggcggcgggagctggagccacctgagcagcaggagcctggtgagcggcaggagcccagcatgtcctggtggccagtgtcctctgctgagaagaagaaaaacatcaccctggactgcgcccggggcacggccaactgtgtggtgttcagctgcccactctacagctttgaccgcgcggctgtgctgcatgtctggggccgtctctggaacagcacctttctggaggagtactcagctgtgaagtccctggaagtgattgtccgggccaacatcacagtgaagtcctccataaagaacttgatgctccgagatgcctccacagtgatcccagtgatggtatacttggaccccatggctgtggtggcagaaggagtgccctggtgggtcatcctcctggctgtactggctgggctgctggtgctagcactgctggtgctgctcctgtggaagatgggattcttcaaacgggcgaagcaccccgaggccaccgtgccccagtaccatgcggtgaagattcctcgggaagaccgacagcagttcaaggaggagaagacgggcaccatcctgaggaacaactggggcagcccccggcgggagggcccggatgcacaccccatcctggctgctgacgggcatcccgagctgggccccgatgggcatccagggccaggcaccgcctaggttcccatgtcccagcctggcctgtggctgccctccatcccttccccagagatggctccttgggatgaagagggtagagtgggctgctggtgtcgcatcaagatttggcaggatcggcttcctcaggggcacagacctctcccacccacaagaactcctcccacccaacttccccttagagtgctgtgagatgagagtgggtaaatcagggacagggccatggggtagggtgagaagggcaggggtgtcctgatgcaaaggtggggagaagggatcctaatcccttcctctcccattcaccctgtgtaacaggaccccaaggacctgcctccccggaagtgccttaacctagagggtcggggaggaggttgtgtcactgactcaggctgctccttctctagtttcccctctcatctgaccttagtttgctgccatcagtctagtggtttcgtggtttcgtctatttattaaaaaatatttgagaacaaaaaaaaaaaaaaaaaa

SEQ ID NO: 1672 - DNA, 3392 bp, Homo Sapiens
  NM_002213
gcggagccagcccctcccctacccggagcagcccgctggggccgtcccgagcggcgacacactaggagtcccggccggccagccagggcagccgcggtcccgggactcggccgtgagtgctgcgggacggatggtggcggcggggcgcgggccagcgcgggcgccgtgagccggagctgcgcgcggggcatgcggctgcggcccccggccctcggcccccgcgctccggccccagccccggccgccggcccccgcggagtgcagcgaccgcgccgccgctgagggaggcgccccaccatgccgcgggccccggcgccgctgtacgcctgcctcctggggctctgcgcgctcctgccccggctcgcaggtctcaacatatgcactagtggaagtgccacctcatgtgaagaatgtctgctaatccacccaaaatgtgcctggtgctccaaagaggacttcggaagcccacggtccatcacctctcggtgtgatctgagggcaaaccttgtcaaaaatggctgtggaggtgagatagagagcccagccagcagcttccatgtcctgaggagcctgcccctcagcagcaagggttcgggctctgcaggctgggacgtcattcagatgacaccacaggagattgccgtgaacctccggcccggtgacaagaccaccttccagctacaggttcgccaggtggaggactatcctgtggacctgtactacctgatggacctctccctgtccatgaaggatgacttggacaatatccggagcctgggcaccaaactcgcggaggagatgaggaagctcaccagcaacttccggttgggatttgggtcttttgttgataaggacatctctcctttctcctacacggcaccgaggtaccagaccaatccgtgcattggttacaagttgtttccaaattgcgtcccctcctttgggttccgccatctgctgcctctcacagacagagtggacagcttcaatgaggaagttcggaaacagagggtgtcccggaaccgagatgcccctgaggggggctttgatgcagtactccaggcagccgtctgcaaggagaagattggctggcgaaaggatgcactgcatttgctggtgttcacaacagatgatgtgccccacatcgcattggatggaaaattgggaggcctggtgcagccacacgatggccagtgccacctgaacgaggccaacgagtacactgcatccaaccagatggactatccatcccttgccttgcttggagagaaattggcagagaacaacatcaacctcatctttgcagtgacaaaaaaccattatatgctgtacaagaattttacagccctgatacctggaacaacggtggagattttagatggagactccaaaaatattattcaactgattattaatgcatacaatagtatccggtctaaagtggagttgtcagtctgggatcagcctgaggatcttaatctcttctttactgctacctgccaagatggggtatcctatcctggtcagaggaagtgtgagggtctgaagattggggacacggcatcttttgaagtatcattggaggcccgaagctgtcccagcagacacacggagcatgtgtttgccctgcggccggtgggattccgggacagcctggaggtgggggtcacctacaactgcacgtgcggctgcagcgtggggctggaacccaacagtgccaggtgcaacgggagcgggacctatgtctgcggcctgtgtgagtgcagccccggctacctgggcaccaggtgcgagtgccaggatggggagaaccagagcgtgtaccagaacctgtgccgggaggcagagggcaagccactgtgcagcgggcgtggggactgcagctgcaaccagtgctcctgcttcgagagcgagttcggcaagatctatgggcctttctgtgagtgcgacaacttctcctgtgccaggaacaagggagtcctctgctcaggccatggcgagtgtcactgcggggaatgcaagtgccatgcaggttacatcggggacaactgtaactgctcgacagacatcagcacatgccggggcagagatggccagatctgcagcgagcgtgggcactgtctctgtgggcagtgccaatgcacggagccgggggcctttggggagatgtgtgagaagtgccccacctgcccggatgcatgcagcaccaagagagattgcgtcgagtgcctgctgctccactctgggaaacctgacaaccagacctgccacagcctatgcagggatgaggtgatcacatgggtggacaccatcgtgaaagatgaccaggaggctgtgctatgtttctacaaaaccgccaaggactgcgtcatgatgttcacctatgtggagctccccagtgggaagtccaacctgaccgtcctcagggagccagagtgtggaaacacccccaacgccatgaccatcctcctggctgtggtcggtagcatcctccttgttgggcttgcactcctggctatctggaagctgcttgtcaccatccacgaccggagggagtttgcaaagtttcagagcgagcgatccagggcccgctatgaaatggcttcaaatccattatacagaaagcctatctccacgcacactgtggacttcaccttcaacaagttcaacaaatcctacaatggcactgtggactgatgtttccttctccgaggggctggagcggggatctgatgaaaaggtcagactgaaacgccttgcacggctgctcggcttgatcacagctccctaggtaggcaccacagagaagaccttctagtgagcctgggccaggagcccacagtgcctgtacaggaaggtgcctggccatgtcacctggctgctaggccagagccatgccaggctgcgtccctccgagcttgggataaagcaaggggaccttggcactctcagctttccctgccacatccagcttgttgtcccaatgaaatactgagatgctgggctgtctctcccttccaggaatgctgggcccccagcctggccagacaagacgactgtcaggaagggtcggagtctgtaaaaccagcatacagtttggcttttttcacattgatcatttttatatgaaataaaaagatcctgcatttatggtgtagttctgagtcctgagacttttccgcgtgatggctatgccttgcacacaggtgttggtgatggggctgttgagatgcctgttgaaggtacatcgtttgcaaatgtcagtttcctctcctgtccgtgtttgtttagtacttttataatgaaaagaaacaagattgtttgggattggaagtaaagattaaaaccaaaagaatttgtgtttgtctgataaaaaaaaaaaaaaaaaaaaa

SEQ ID NO: 1673 - DNA, 6162 bp, Homo Sapiens
  NM_002221
cctcttttttgtcttccatagcttgtgagaaaataatttctgagcatttttacttttaaagccatctcgtccctacgaggtttgcgcctctgggcatgtagtctacacaggacctgagaatctgagaaactgcagccgcacggttgtttatggagctttgggcgggggctgagcccgcggtcgtgcccccagcccgctgcccaggccatgccgccccatctgcgcgcggagccgcggctgccgggcctccggggctgagccgggagcgccgggaggaggaggcgccggcggcggagcaggagcgggagccgcggcggcgggcagcgcgggacccagtactatggctgtgtactgctatgcgctcaatagcctggtgatcatgaatagcgccaacgagatgaagagcggcggcggcccggggcccagtggcagcgagacgcccccgcccccgaggagggcagtgctgagccccggcagcgttttcagccccgggagaggcgcctctttcctcttccccccagccgagtcgctgtcccccgaggagccccggagccccgggggctggcggagcggccggcgcaggctgaatagtagcagcggcagtggcagcggcagcagcggcagtagcgtgagcagcccaagttgggctggtcgcctgcgaggggaccggcagcaggtggtggcagccggtaccctctccccgccagggccggaggaggccaagaggaagctgcggatcttgcagcgcgagttgcagaacgtgcaggtgaaccagaaagtgggcatgtttgaggcgcacatccaggcacagagctccgccattcaagcgccccgcagcccgcgtttgggcagggctcgctcgccctccccgtgccccttccgcagcagcagtcagccccctggaagggtcctggttcagggcgcccggagcgaggaacggaggacaaagtcctggggggagcaatgtccagagacttcaggaaccgactccgggaggaaaggagggcccagcctatgctcctcgcaggtgaagaaaggaatgccacctcttcccggccgggctgcccctacaggatcagaggctcagggtccatccgcttttgtaaggatggagaagggtatccctgccagtccccgctgtggctcacccacagctatggaaattgacaaaaggggctctcctaccccgggaactcggagctgcctagctccctcattggggctgttcggagctagcttaacgatggccacggaagtggcagcgagagttacatccactgggccacaccgtccacaggatcttgccctcactgagccgtctgggagagcccgtgagcttgaggacctgcagcccccagaggccctggtggagaggcaggggcagtttctgggcagtgagacaagcccagccccagaaaggggcgggccccgcgatggagaaccccctgggaagatggggaaaggatatctgccctgtggcatgccgggctctggggagcctgaagtgggcaaaaggccagaggagacgactgtgagcgtgcaaagcgcagagtcctctgattccctgagctggtccaggctgcccagggccctggcctccgtaggccctgaggaggcccgaagtggggcccccgtgggcggggggcgttggcagctctccgacagagtggagggagggtccccaacgctgggcttgcttgggggcagcccctcagcacagccggggaccgggaatgtggaggcgggaattccttctggcagaatgctggagcctttgccctgttgggacgctgcgaaagatctgaaagaacctcagtgccctcctggggacagggtgggtgtgcagcctgggaactccagggtttggcagggcaccatggagaaagccggtttggcttggacgcgtggcacaggggtgcaatcagaggggacttgggaaagccagcggcaggacagtgatgccctcccaagtccggagctgctaccccaagatccggacaagcctttcctgaggaaggcctgcagccccagcaacatacctgctgtcatcattacagacatgggcacccaggaggatggggccttggaggagacgcagggaagccctcggggcaacctgcccctgaggaaactgtcctcttcctcggcctcctccacgggcttctcctcatcctacgaagactcagaggaggacatctccagtgaccctgagcgcaccctggaccccaactcagccttcctgcataccctggaccagcagaaacctagagtgagcaaatcatggaggaagataaaaaacatggtgcactggtctcccttcgtcatgtccttcaagaagaagtacccctggatccagctggcaggacacgcagggagtttcaaggcagctgccaatggcaggatcctgaagaagcactgtgagtcagagcagcgctgcctggaccggctgatggtggatgtgctgaggcccttcgtacctgcctaccatggggatgtggtgaaggacggggagcgctacaaccagatggacgacctgctggccgacttcgactcgccctgtgtgatggactgcaagatgggaatcaggacctacctggaggaggagctcacgaaggcccggaagaagcccagcctgcggaaggacatgtaccagaagatgatcgaggtggaccccgaggcccccaccgaggaggaaaaagcacagcgggctgtgaccaagccacggtacatgcagtggcgggagaccatcagctccacggccaccctggggttcaggatcgagggaatcaagaaagaagacggcaccgtgaaccgggacttcaagaagaccaaaacgagggagcaggtcaccgaggccttcagagagttcactaaaggaaaccataacatcctgatcgcctatcgggaccggctgaaggccattcgaaccactctagaagtttctcccttcttcaagtgccacgaggtcattggcagctccctcctcttcatccacgacaagaaggaacaggccaaagtgtggatgatcgactttgggaaaaccacgcccctgcctgagggccagaccctgcagcatgacgtcccctggcaggaggggaaccgggaggatggctacctctcggggctcaataacctcgtcgacatcctgaccgagatgtcccaggatgccccactcgcctgagctgcccacgccctccctggcccccgcctgggcctcctttcctcctcctgtgcttcctttctcgttcctaacttttccttcacttacacctgactgaccctcctgaactgcactacaagacactttgtagaagaggagatgagagtttctagtcattttcctaacttcagggcttggaggtggtgtttgcactgctttttgtagagagggtcacctactagaagagaaatgcccagtcttagaggtgggtcaggtgtagagctggagggggtccctggctgctgaggggaccctaccagatgagccctgcctctgggagccccctaggaagcaccagcctggacctaccacctgcggaggcctgctgccccctggcggccagtgctgttagagtgctgccaagcacagccttatttctgccggggcctccccaccggagagcccagggggccggccgggttcctggtccctggctgggagcagggctttctggtagttggggcacaaaaccatcggggaaccacatgttgactgtgagcaaagtgtcttccgattagcagcctcagggatgccctggtggcctctccagggctgctcaggcaaggccccccacccatctggtatggaaacctgccggctccaggccagacccaggagccaagagaaggctgaagccagcttggctgtgttctctgatctaggccttcccagaggaggcgagcagaagctgtgccacttggaattgcaacccatgagttcagaaggcacactctgccatgctgagctccaagggtgctaccaggggaagatgggatctatagagtctctgggccctggccccagggaggagcacatttttcttgaccctcacctacctggtgctagttggtcaaccctgcctgcatacatgggctcctgtcatggggcccagagtcccttgcagatatagaaataggggaggagctcaggtctgcgccaggcaggaagaaggcaggcttctggcttccagaggtgccgcggtggcctcctggcatcatttgttattgcctctgaaacaagccttactgcctggagggcttagattcctgcttctccaatgtagtgtgggtatcttgtagggtatgtggtggatgccagggcgtgctccaggcacctcttcctgaagtctctgcatttggagattcgtggagaacctatttaagcccaattttaactgaaagccagtgagtctgatatggaagggaatgtaaaatttgcctgacttcttaagaacaaaacccccagctctgtgccccatgctccttggggcttgccacccactcctttgctgtcagaggtacaggagctgggagagtccaggagctagggacacagagggagactatggaccaaggtgtgtgtgtctggaggaaccactgcccaccccaccaccccggggtctctggggaactgtcaacctgcccacgggacatgtacatttccccttttgtgctggaagtgtgagtgacacttgctgggggtggagggtgggacacatgaggatgtataagtacagattttaaaaaaggaaatcaacttacacttcctggctcttgtttaaaacagtggtgagctcctgtgtgggccgacttgctaaaggtcacacacgcgcccggtggagcacgagagacctcgtggcagcatgtgatctggaaggcaggcaggacgggggcgttggggagccaaagtcaactctgggcctctggagctatagtgacttttgggctagaagggaccctggtggtctgtgcttcagccatttgcagggcaggggcatcattaattcagacgtaaagattctatgaatatggactggccaaaagttatccttactccatctgtgaaagaagtttgctaaagcaaatcatgatatgaacaaaaattacaggggacctgtttaagagaacaaaatgttccaagcactttaggcagacaccagctgtttgcaaacaatgtgctaatatgcaaatgatgtgcttattaaaggaggcccatggggcctcttattggcaatacttggctgtgggttacattaaatatgtgaacatagtatgaagtagcatcattttagggttattctgttacttagggtttttgttttctgttttttttttctctttttttgtatttaccgtgctagttctcttctacacctactctgtctctcaagccattttgccactcgcttccctgccatctggcccttccctttgtctcagtgggatagatggattgtgaaatggaatctcccagaacccctgccctggcagcctggaagaccgtgcctgcccagccctcgtcaccacagggactccttgggtcctggcagtgcatgtgccagcaggcaggacaaactctgtgtacctgtgcccaggtgaatgggcgcagggtcctcttgccctgtcctgcggggggccccacgagttcctggcattcagcactgcttagcattctcggaaggtttcttcaactgcttgcttttcccaggcttgcctttagtgtcatgtaagacatttttaagttatatttattttgttgggttttaaaattgcacagaacactaagaccgaaaggctggactcttgtttctccttgaaagctttgcctttgttttgaacttcctttcccacttggtagaaagagcccagaagcagccctggccctgtaagatggactctttcatccttcagttgtatttagctttgagtttctctgcatctgtccaccccatgtgtatataacccagcccctggctctggggtggtcacctcgtcagtgccttttgttctggaggagaggaccccccccgcctgccgagaggctctcttcctgttctgcacccctctccccatgggaccttggagaaaactgaactgttacaaacccctgcacagtgcctgtcaaacagatgcaaaccttcctgaataaagccttggagacca

SEQ ID NO: 1674 - DNA, 10053 bp, Homo Sapiens
  NM_002222
gcagtaaccatgtggatgtgctgctgaagcgtttcctcaagctcgctggggtgggaggagaggaggaggaggaggtggtggtggaggaggaggcagggggtggagagagagaaagcgcacgccgagaggaggtgtgggtgttccgcttccatcctaacggaacgagctccctcttcgcggacatgggattacccagcggctgctaacccctctcctcgccctgctcccccaaaccggcgtggctccccgggcaccaaggagctgactacagaggagcaggatttgcacccctcgctgggcttgctttggcaacagagtgcctgacccaggtcaggattttcaagaaagacatgtctgacaaaatgtctagcttcctacatattggagacatttgttctctgtacgcggagggatcgacaaatggatttattagcaccttgggcctggttgatgatcgttgtgttgtacagccagaaaccggggaccttaacaatccacctaagaaattcagagactgcctctttaagctatgtcccatgaaccgctactctgcccaaaagcagttctggaaagccgctaagcctggggccaacagcaccacagacgcagtgctactcaacaaactgcaccacgctgcagacttggaaaagaagcagaatgagacagaaaacaggaaattgctggggaccgtaatccagtatggcaatgtgatccagctcctgcatttgaaaagtaataaatacctaacagtgaataagaggcttcctgctctgttggagaagaatgccatgagagtcacattggacgaggctggaaatgaagggtcctggttttatattcagccattctacaagctgcgatccattggagacagcgtggtcataggtgacaaggtggttctgaaccccgtcaatgctggtcagcccctacatgctagcagccatcaactggtagataacccaggctgcaatgaggtcaattccgtcaactgcaatacaagctggaaaatagtccttttcatgaaatggagtgataacaaagacgacatattaaaggggggtgacgtggtgaggctgtttcatgctgagcaggagaagtttctcacctgtgacgaacacaggaagaagcagcacgtcttcctgagaaccacgggccggcagtcggccacatctgccaccagttcaaaagccctgtgggaggtggaggtggtccagcatgacccatgtcggggcggagcagggtattggaacagccttttccgtttcaagcatctggccacggggcattacttggcagcagaggtggaccctgatcaggacgcctctcgaagtaggttgcggaatgcccaagaaaagatggtatactccctggtctctgtgcctgaaggcaatgacatctcctccattttcgagctagatcccaccactctgcgtggaggtgacagccttgtcccaaggaactcttatgttcggctcagacacctatgtactaatacctgggttcacagcacaaatattcctattgacaaggaagaagaaaagcccgtgatgctgaaaattggcacctctcctgtgaaggaggataaggaagcatttgccatagttccggtttctcctgctgaagttcgggacctggactttgccaatgatgccagcaaggtgctgggctccattgctgggaagctagagaagggcaccatcacccagaatgaaaggaggtctgtaaccaagctgctagaagatttggtttacttcgtcactggtggaactaattctggtcaagatgttctcgaagttgtcttctccaagcccaacagagaacggcagaaactgatgagagaacagaatattctcaagcagatcttcaagttgttacaagccccattcacagactgcggtgatggcccaatgcttcggctggaagagctcggggaccagcggcacgctcctttcagacacatctgccggctctgctacagggtgctgagacactcgcagcaagactacaggaagaaccaggagtatatagccaagcagtttggcttcatgcagaagcagattggctatgatgtgttggctgaagacactatcactgccctgctccacaataatcggaaactcctggaaaaacacattaccgcggcagagattgacacatttgtcagcctggtgcgaaagaacagggagcccagattcttagattacctctccgacctctgtgtctccatgaacaaatcaattccagtgacccaggaactgatatgtaaagctgtgctgaaccccaccaacgctgacatcctgattgagaccaagttggttctttctcgttttgaatttgaaggtgtctcttccactggagagaatgctctggaggcaggagaagacgaggaagaggtgtggctgttttggagggacagcaacaaagagattcgcagcaagagtgtgagggaattggctcaggatgctaaagaagggcagaaggaggaccgagacgttctcagctactacagatatcagctgaacctctttgcgaggatgtgtctggaccgccaatacctggccatcaacgaaatctcaggccagctggatgtcgatctcattctccgctgcatgtctgacgagaacctgccctatgacctcagggcgtccttctgccgcctcatgcttcacatgcatgtggaccgagatccccaggaacaagtcacccccgtgaaatatgcccgcctctggtcggagattccctcggagatcgccattgacgactatgatagtagtggagcttccaaagatgaaattaaggagagatttgctcagaccatggagtttgtggaggagtatttaagagatgtggtttgtcagaggttccctttctctgataaagagaagaataagcttacgtttgaggttgtaaatttagctaggaatctcatatactttggtttctacaacttctctgaccttctacgattaactaagatccttctggccatattggactgtgtacatgtgacaacaatcttccccattagcaagatggcgaaaggagaagagaataaaggcagtaacgtgatgagatctattcatggcgtgggagagctgatgacccaggtggtgctccggggaggaggctttttgcccatgactcccatggctgctgcccctgaaggcaatgtgaagcaggcagagcctgagaaggaggacatcatggtcatggacaccaagctgaagatcattgagatactccagtttattttgaatgtgaggttggattataggatctcctgcctcctgtgtatatttaagcgagagtttgatgaaagcaattcccagacttcagaaacatcctccggaaacagcagccaagaagggccaagtaatgtaccaggtgctcttgactttgaacacattgaagaacaagcagaaggcatctttggaggaagtgaggagaacaccccactggacttggatgaccacggcggcagaacctttctccgtgtcctgctccacttgacgatgcatgactacccacccctggtgtcaggggccctgcagctcctcttccggcacttcagccagaggcaggaggtgctccaggccttcaaacaggttcaactgctggttaccagccaagatgtggacaactacaaacagatcaaacaagacttggatcaactgaggtccatcgtggaaaagtcagagctttgggtgtacaaagggcagggccccgatgagactatggatggtgcatctggagaaaatgaacataagaaaacggaggagggaaataacaagccacaaaagcatgaaagcaccagcagctacaactacagagtggtcaaagagattttgattcggcttagcaaactctgtgttcaagagagtgcctcagtgagaaagagcaggaagcagcaacagcgtctgctccggaacatgggcgcgcacgccgtggtgctggagctgctgcagattccctatgagaaggccgaagataccaagatgcaagagataatgaggttggctcatgaatttttgcagaatttctgcgcaggcaaccagcagaatcaagctttgctacataaacacataaacctgtttctcaacccagggatcctggaggcagtaaccatgcagcacatcttcatgaacaatttccagctttgcagtgagatcaacgagagagttgttcagcacttcgttcactgcatagagactcacggtcggaatgtccagtatataaagttcttacagacaattgtcaaggcagaagggaaatttattaaaaaatgccaagacatggttatggccgagctggtcaattcgggagaggatgtcctcgtgttctacaacgacagagcctctttccagactctgatccagatgatgcggtcagaacgggatcggatggatgagaacagccctctcatgtaccacatccacttggtcgagctcctggctgtgtgcacggagggtaagaatgtctacacagagatcaagtgcaactccctgctcccgctggatgacatcgttcgcgtggtgacccacgaggactgcatccctgaggttaaaattgcatacattaacttcctgaatcactgctatgtggatacagaggtggaaatgaaggagatttataccagcaatcacatgtggaaattgtttgagaatttccttgtagacatctgcagggcctgtaacaacactagtgacaggaaacatgcagactcgattttggagaagtatgtcaccgaaatcgtcatgagtattgttactactttcttcagctctcccttctcagaccagagtacgactttgcagactcgccagcctgtctttgtgcaactgctgcaaggcgtgttcagggtttaccactgcaactggttaatgccaagccaaaaagcctccgtggagagctgtattcgggtgctgtctgatgtagccaagagccgggccattgccattcccgtggacctggacagccaagtcaacaacctctttctcaagtcccacagcattgtgcagaaaacagccatgaactggcggctctcagcccgcaatgccgcacgcagggactctgttctggcagcttccagagactaccggaatatcattgagagattgcaggacatcgtctccgcgctggaggaccgtctcaggcccctggtgcaggcagagttatctgtgctcgtggatgttctccacagacccgagctgcttttcccagagaacacagacgccagaaggaaatgtgaaagtggcggtttcatttgcaagttaataaagcatacaaaacagctgctagaagaaaatgaagagaagctctgcattaaggtcctacagaccctgagggaaatgatgaccaaagatagaggctatggagaaaagggtgaggcgctcaggcaagttctggtcaaccgttactatggaaacgtcagaccttcgggacgaagagagagccttaccagctttggcaatggcccactgtcagcaggaggacccggcaagcccgggggaggagggggaggttccggatccagctctatgagcaggggtgagatgagtctggccgaggttcagtgtcaccttgacaaggagggggcttccaatctagttatcgacctcatcatgaacgcatccagtgaccgagtgttccatgaaagcattctcctggccattgcccttctggaaggaggcaacaccaccatccagcactcctttttctgtcgcttgacagaagataagaagtcagagaaattctttaaggtgttttatgaccggatgaaggtggcccagcaagaaatcaaagcaacagtgacagtgaacaccagtgacttgggaaataaaaagaaagacgatgaggtagacagggatgccccatcacggaaaaaagctaaagagcccacaacacagataacagaagaggtccgggatcagctcctggaggcctccgctgccaccaggaaagccttcaccactttcaggagggaggctgatcccgacgaccactaccagcctggagagggcacccaggccactgccgacaaggccaaggacgacctggagatgagcgcggtcatcaccatcatgcagcccatcctccgcttccttcagctcctgtgtgaaaaccacaaccgagacctgcagaacttcctccgttgccaaaataacaagaccaactacaatttggtatgtgagaccctgcagtttctggactgtatttgtggaagcacaactggaggccttggtcttctgggcttgtatataaatgaaaagaacgtagcgcttatcaaccaaaccctggaaagtctgaccgaatactgtcaaggaccttgccatgagaaccagaactgcatagccacccatgaatccaatggcattgacatcatcacagccctgatcctcaatgatatcaatcctttgggaaagaagaggatggaccttgtgttagaactgaagaacaatgcctcgaagttgctcctggccatcatggaaagcaggcacgacagtgaaaacgcagagaggatactttataacatgaggcccaaggaactggtggaagtgatcaagaaagcctacatgcaaggtgaagtggaatttgaggatggagaaaacggtgaggatggggcggcgtcccccaggaacgtggggcacaacatctacatattagcccatcagttggctcggcataacaaagaacttcagagcatgctgaaacctggtggccaagtggacggagatgaagccctggagttttatgccaagcacacggcgcagatagagattgtcagattagaccgaacaatggaacagatagtctttcccgtgcccagcatatgtgaattcctaaccaaggagtcaaaactacgaatttactatactacagagagagacgaacaaggcagcaaaatcaatgatttctttctgcggtctgaagacctcttcaatgaaatgaattggcagaagaaactgagagcccagcccgtgttgtactggtgtgcccgcaacatgtctttctggagcagcatttcgtttaacctggccgtcctgatgaacctgctggtggcgtttttctacccgtttaagggagtccgaggaggaaccctggagccccactggtcgggactcctgtggacagccatgctcatctctctggccatcgtcattgccctccccaagccccatggcatccgggccttaattgcctccacaattctacgactgatattttcagtcgggttacaacccacgttgtttcttctgggcgctttcaatgtatgcaataaaatcatctttctaatgagctttgtgggcaactgtgggacattcacaagaggctaccgagccatggttctggatgttgagttcctctatcatttgttgtatctggtgatctgtgccatggggctctttgtccatgaattcttctacagtctgctgctttttgatttagtgtacagagaagagactttgcttaatgtcattaaaagtgtcactcgcaatggacggtccatcatcctgacagcagttctggctctgatcctcgtttacctgttctcaatagtgggctatcttttcttcaaggatgactttatcttggaagtagataggctgcccaatgaaacagctgttccagaaaccggcgagagtttggcaagcgagttcctgttctccgatgtgtgtagggtggagagtggggagaactgctcctctcctgcacccagagaagagctggtccctgcagaagagacggaacaggataaagagcacacatgtgagacgctgctgatgtgcattgtcactgtgctgagtcacgggctgcggagcgggggtggagtaggagatgtactcaggaagccgtccaaagaggaacccctgtttgctgctagagttatttatgacctcttgttcttcttcatggtcatcatcattgttcttaacctgatttttggggttatcattgacacttttgctgacctgaggagtgagaagcagaagaaggaagagatcttgaagaccacgtgctttatctgtggcttggaaagagacaagtttgacaacaagactgtcacctttgaagagcacatcaaggaagaacacaacatgtggcactatctgtgcttcatcgtcctggtgaaagtaaaggactccaccgaatatactgggcctgagagttacgtggcagaaatgatcaaggaaagaaaccttgactggttccccaggatgagagccatgtcattggtcagcagtgattctgaaggagaacagaatgagctgagaaacctgcaggagaagctggagtccaccatgaaacttgtcacgaacctttctggccagctgtcggaattaaaggatcagatgacagaacaaaggaagcagaaacaaagaattggtcttctaggacatcctcctcacatgaatgtcaacccacaacaaccagcataagcaaatgaaagaaaggaattgtatttaccttttataattattattagtgtgggtatggctaatgagttctgattcacccacgaaggttacatttatgctgaatacatttgtaaatactcagttttatactgtatgtatatgattgctactctaaaggtttggatatatgtattgtaattagaattgttggcatgatgacatttcatttgtgccaaaaatattaaaaatgccttttttggaaggactaacagaaagcacctgatttgcacttgaaccagattatagatttaaaagtatatgacatgtattttgtatttaaaactagaatagccagtatttatgttttttataaaactgtgcaatacgaattatgcaatcacaatacatttgtagctcccgagtgtcctaaagggagtgcacttctttgaagctggtgtgttaatactatgtaataaatggttaactttcaaatgatgctgctgccaaaattatattaatagtgagtttcaggcccctgggcattttgtaccatgtaattatcctctggtgatgctgtttctcgttagtggcagtagtgcctccgtctcctagtgataatgctccaagtctatgaactgttaaatcagcattcattttaagaaaagcaactttagtttcaaagatacttttaagcttctaaattgatcatttaaactatttctttaaataagagagccaaattagaggctcatactttagcttgtgaagaagataatgaattttttaaagggaactttctatgcaatgttcaggataaatgcatactgctggccaatcagtgtcatctcctgggtaaattttgatgtcgcattataaagacatgcataattgatggtttctagattatctagtccaaacaatagagtttattttttcttcatctgaaccaacatgctacagtagctaagaagtattaaaactatatacatccatataaagatgaaatatgaactatctcattagaagtcatagttgaccacagacatgttattcttctgaaagagccacattttggttttatttcttgtcacatgatttcttttcttgatggatgaaaaatatgaaaggaaacttttatatctgttgcctagttttgtacatggatctcattttacaagagaatctctctgcaaaaaaaaaaaaaacagtttaaaaatgcattgaaagcagagttctgaaatgagtaaagtttgtaaatgcatatataaaaatatttaataaatgatgcagaatatacagtgactggttggtggctttcatttggcatttgtgacttaactgctattccatttatgtactttctttaggatcagtttgaagtacagtcggtttgattaccaggttaattcagaaaatgtttacctgattatttaaaaaaacacttgctgttgttatgacagctctgaggagaattattagaacaaacattggggagtatttagtacaacattcattcattcttctggattagtgactgccagccaggctgtcgggagcgccctactaaatctcctgtctcttctgcttttactgggggatctttaatttgctgtgtgccatgtggaagtatcgggaa

SEQ ID NO: 1675 - DNA, 9047 bp, Homo Sapiens
  NM_002224
ggcgggcgcgccaagacgtgggcacctcctcacccggaccccgggccccgccgagccgcctcctggctcccgtggccgccagcccgccccggccgcaccgagcgtcgggatccgaggtgggagcgtacccctccccgctccccggacgcctcagtcctccgcactgagcttggccacgcgcccctaggcgccccccacgccctgggccccggagggccgcagccatgagtgaaatgtccagctttcttcacatcggggacatcgtctccctgtacgccgagggctccgtcaatggcttcatcagcactttggggctggtggatgaccgctgtgtggtggagcccgcggccggggacctggacaacccccctaagaagttccgtgactgcctcttcaaggtgtgccccatgaaccgctactcggcccagaagcagtactggaaggccaagcagactaagcaggacaaggagaagatcgctgatgtggtgttgctgcagaagctgcagcatgcggcgcagatggagcagaagcaaaatgacacggagaacaagaaggtgcatggggatgtcgtgaagtatggcagtgtgatccagctcctgcacatgaagagcaacaagtacctgacagtgaacaagcggcttccggccttgctggagaagaacgccatgcgggtgactctggatgccacaggcaacgagggttcctggctcttcatccagcccttctggaagctgcggagcaacggggacaacgtggtcgtgggggacaaggtgatcctgaatcctgtcaatgccgggcagcctctgcatgccagcaattacgagctcagcgacaacgccggctgcaaggaggtcaattctgtgaactgcaacaccagctggaagatcaacctgtttatgcagtttcgggaccacctggaggaggtgttgaaagggggagacgtggtgcggctgttccatgcggagcaggagaagttcctgacgtgtgacgagtacaagggcaagctgcaggtgttcctgcgaactacactgcgccagtctgccacctcggccaccagctccaatgctctctgggaggtggaggtggtccaccacgacccctgccgtggaggagctgggcactggaatggcttgtaccgcttcaagcacctggctacaggcaactacctggctgctgaggagaaccccagttacaaaggtgatgcctcagatcccaaggcagcaggaatgggggcacagggccgcacaggccgcaggaatgctggggagaagatcaagtactgcctggtggctgtgcctcatggcaatgacatcgcctctctctttgagctggaccccaccaccttgcagaaaaccgactctttcgtgccccggaactcgtacgtccggctgcggcacctctgcaccaacacgtggattcagagcaccaatgtgcccattgacatcgaggaggagcggcccatccggctcatgctgggcacctgccccaccaaggaggacaaggaggcctttgccatcgtgtcagtgcccgtgtctgagatccgagacctggactttgccaatgacgccagctccatgctggccagtgccgtggagaaactcaacgagggcttcatcagccagaatgaccgcaggtttgtcatccagctgctggaagacctggtgttctttgtcagcgatgtccccaacaatgggcagaatgtcctggacatcatggtcactaagcccaaccgggaacggcagaagctgatgagggagcagaacatcctcaaacaggtctttggcattctgaaggccccgttccgtgagaaggggggtgaaggtcccctggtgcggctggaggagctgtcagaccagaagaacgccccctaccagcacatgttccgcctgtgctaccgcgtgttgcggcattcccaggaggactaccgcaagaaccaggagcacattgccaagcagtttgggatgatgcagtcccagattggctacgacatcctggccgaggacaccatcactgccctgctgcacaacaaccgcaagctcctggaaaagcacatcaccaagaccgaggtggagaccttcgtcagccttgtgcgcaagaaccgggagcccaggttcctggactacctctctgacctgtgtgtgtccaaccacatcgccatccccgtcacccaagagctcatctgcaagtgtgtgctggaccccaagaacagtgacattctcatccggaccgagcttcggcccgtgaaggagatggcccaatcccacgagtacctgagcatcgagtactcagaagaggaagtgtggctcacgtggactgacaagaataacgagcatcatgagaagagtgtgaggcagctggcccaggaggcgcgggccggcaacgcccacgacgagaatgtgctcagctactacaggtaccagctgaagctctttgcccgcatgtgcttggaccgccagtacttggccatcgacgagatctcccagcagctgggcgtggacctgattttcctgtgcatggcagacgagatgctgccctttgacctgcgcgcctccttctgccacctgatgctgcacgtgcacgtggaccgtgacccccaggagctggtcacgccggtcaagtttgcccgtctctggactgagatccccacagccatcaccatcaaggactatgattccaacctcaacgcgtcccgagatgacaagaagaacaagtttgccaacaccatggagttcgtggaggactacctcaacaatgtagtcagcgaggccgtgccctttgccaacgaggagaagaacaagctcacttttgaggtggtcagcctggcgcacaatctcatctacttcggcttctacagcttcagcgagctgctgcggctcactcgcacactgctgggcatcatcgactgtgtgcaggggcccccggccatgctgcaggcctatgaggaccccggtggcaagaatgtgcggcggtccatccagggcgtggggcacatgatgtccaccatggtgctgagccgcaagcagtccgtcttcagtgcccccagcctgtctgctggggccagtgctgctgagccgctggacagaagcaagtttgaggagaatgaggacattgtggtgatggagaccaagctgaagatcctggaaatccttcagttcatcctcaatgtccgcctggattaccgcatatcctacctgctgtctgtcttcaagaaggagtttgtggaggtgtttcccatgcaggacagtggggctgatggcacagcccctgccttcgactctaccactgccaacatgaacctggatcgcatcggggagcaggcggaggccatgtttggagtggggaagacaagcagcatgctggaggtggatgacgagggcggccgcatgttcctgcgcgtgctcatccacctcaccatgcacgactatgcgccgctggtctcgggtgccctgcagctgctcttcaagcacttcagccagcgccaggaggccatgcacaccttcaagcaggttcagctgctgatctcagcgcaggacgtggagaactacaaggtgatcaagtcggagctggaccggctgcggaccatggtggagaagtcagagctgtgggtggacaagaagggcagtggcaagggtgaggaggtggaggcaggcgccgccaaggacaagaaagagcgtcccacggacgaggagggctttctgcacccaccaggggagaaaagcagtgagaactaccagatcgtcaagggcatcctggaaaggctgaacaagatgtgcggggttggggagcaaatgaggaagaagcagcaacggctgctgaagaacatggatgcccacaaggtcatgctggacctgctgcagatcccctatgacaagggtgatgccaagatgatggagatcctgcgctacacgcaccagttcctgcagaagttctgtgcagggaaccccggcaaccaggccctgctgcacaaacacctgcacctcttcctcacgccagggctcctggaggcagagaccatgcagcacatcttcctgaacaactatcagctctgctccgagatcagcgagcctgtgttgcagcacttcgtgcacctgctggccacgcacgggcgccatgtgcagtacctggacttcctgcacaccgtcattaaggccgagggcaagtacgtcaagaagtgccaggacatgatcatgactgagctgaccaatgcaggtgacgatgtggtcgtgttctacaatgataaggcatcgctggcccacctgctggacatgatgaaggccgcccgcgacggcgtggaggaccacagccccctcatgtaccacatttccctggtggacctgctggccgcctgtgccgagggcaaaaacgtctacactgagatcaagtgcacctccctgctgccgctggaggacgtggtgtctgtggtgacgcatgaggactgcatcactgaggtgaaaatggcctatgtgaacttcgtgaaccactgctacgtggacacggaggtggagatgaaggagatctacaccagcaaccacatctggacgctctttgagaacttcaccctggacatggctcgggtctgcagcaagcgtgagaagcgcgtggctgaccccaccttggagaagtacgtgctgagcgttgtgctggacaccatcaacgccttcttcagctccccattctctgagaacagcacttccctgcagacacaccagacgattgtggtgcagctgctgcagtctaccacacgcctcctcgagtgtccgtggctacagcagcagcacaagggctccgtggaggcctgcatccggaccctcgccatggtggccaagggccgggccatcttgctgcccatggacctggatgcccacatcagctcgatgctcagcagtggagccagctgtgcagctgccgcccagcggaacgcctccagctacaaggcaaccacgcgggccttcccccgcgtcacccccaccgccaaccagtgggactacaagaacatcattgagaagctgcaggacatcatcacagccctggaggagcggctgaagcccctggtacaggctgagctgtccgtgctggtggatgtcctgcactggcctgagctgctcttcctggagggcagtgaggcctaccagcgctgcgagagtgggggcttcctgtccaagctgatccagcacaccaaggacctcatggagtcggaggagaagctgtgcatcaaggtgctgcggaccctgcagcagatgctgctcaagaagaccaagtacggggaccggggcaaccagctgcgcaagatgctgctgcaaaactacctccagaaccggaagtccacctcgcggggggaccttcccgaccccataggcactggcctggacccagactggtcggcaatcgcagccacccagtgccggctggacaaggagggggccaccaagttggtatgcgacctcatcaccagcaccaagaacgagaagatcttccaggagagcatcggcctggccatccacctgctggatggtggcaacacagagatccagaaatccttccacaacctgatgatgagtgacaagaagtcagagcgcttcttcaaggtgctgcacgaccgcatgaagcgggcccagcaggagaccaagtccacggtggcagtcaacatgaatgacctgggcagccagccacatgaggaccgcgagccagtcgaccccaccaccaaaggccgcgtggcctccttctcgatacctggctcctcatcccgctactcgctgggccccagcctgcgccgggggcacgaggtgagcgaacgtgtgcagagcagtgagatgggcacatccgtgctcatcatgcagcccatcctgcgctttctgcagctgctgtgtgagaaccacaaccgggacctgcagaacttcctgcgctgtcagaacaacaaaaccaactacaacttggtatgcgagacgctgcagttcctggacatcatgtgcggcagcaccacgggcggcctggggctgctggggctctacatcaatgaggacaacgtgggcctcgtcatccagaccttggagaccctcactgagtactgccagggcccctgccatgagaaccagacttgcattgtgactcacgagtccaatggcatagacatcatcaccgcactgatcctcaatgacatcagccccctgtgcaagtaccgcatggatctggtgctgcagctcaaggacaatgcctccaagctgctcctggctctgatggagagccggcatgacagtgaaaatgctgagcgaatcctcatcagcctgcggccccaggagctggtggacgtcatcaagaaggcctacctgcaggaggaagagcgtgagaactcggaggtgagcccacgtgaagtgggccataacatctatatcctggcgctgcagctctccaggcacaataaacagctgcagcacctgctgaagccggtgaagcgcattcaagaggaggaggccgagggtatctcttccatgctcagcctcaacaacaagcagctgtcacagatgctcaagtcctcagcgccagcacaggaggaggaggaagaccccctggcctactatgagaaccacacgtcccagatcgagattgtgcggcaggaccgcagcatggagcagatcgtgttcccagtgcccggcatctgccagttcctgacggaggaaaccaagcaccggctcttcaccactactgagcaggacgagcagggcagcaaagtgagcgacttcttcgaccagtcctccttcctgcacaacgagatggagtggcagcgcaagctccgcagcatgccgctgatctactggttctcccgccgcatgaccctgtggggcagcatctccttcaacctggccgtgtttatcaacatcatcattgccttcttctacccttacatggagggcgcgtccacaggcgtgctggactcccctctcatctcattgctcttctggatcctcatctgcttctccatcgcggccctgttcaccaagcgctacagcatccgccccctcatcgtggcgctcatcctgcgctccatctactatctgggcatcgggcccacactcaacatcctgggtgccctcaatctgaccaacaagatcgtgtttgtggtgagcttcgtgggcaaccgtggcaccttcatccggggctataaggccatggtcatggacatggaattcctctaccacgtgggctacatcctgaccagtgtcctgggcctctttgctcatgagctgttctacagcatcctgctctttgacctcatctaccgcgaggagacgctgttcaacgtcatcaagagtgtgacccgcaatggccgctccatcctgctgacagccctgctggccctcatcctggtctacctcttctccatcgtcggcttcctcttcctcaaggatgacttcattctcgaggtcgaccggctgcccaacaaccactccacagccagccccctggggatgccacatggagctgctgcatttgtggacacctgcagtggggacaagatggactgtgtctcagggctctcggtgcctgaggtcctggaagaggacagggagctggacagcacagagcgggcctgtgacactctgttgatgtgcatcgtcactgtcatgaaccatgggctacgcaacggtggtggcgtgggcgacattctccgcaagccctccaaagatgagtctctcttcccagcccgagtggtctatgacctcctgttcttcttcatcgtcatcatcattgtgctgaacctcatctttggggtaatcatcgacaccttcgctgacctgcgtagtgagaagcagaagaaggaggagattcttaagacgacatgcttcatctgtggtctggagagggacaagtttgataacaagacagtgtcatttgaggaacacatcaagctggagcacaacatgtggaactacttgtacttcattgtgctggtccgcgtgaagaacaagaccgactacacgggccctgagagctacgtggcccagatgatcaagaacaagaacctggactggttcccccggatgcgggccatgtcccttgtcagcaatgagggcgagggggagcagaatgagattcggattctccaggacaagctcaactccaccatgaagctggtgtcccacctcactgcccagctcaacgagctcaaggagcagatgacggagcagcggaaacgcaggcaacgcctaggctttgtggatgtccagaactgcattagccgctgaggagagccaccgaaggccccaacaggggatgctcatcactggagactgcgactgggaagaacactgccccctccctcgggttgggtggcccagccagctggccagcctccactcccactctgccagacaccctgacacccacccaggctttgaagagcatggagggggagcctcagagctgacagtcctgcttagagcccttaaaaagacttgaaagttcactgggactcagtttaccttaatgccttagcagaagataaatcctacctagagacctttgttccttaaagcaataactgacaactctttgtagtcctccttgtgggtagttaagagtggggtcacccctttaactccaagcactacattttggcggctgccggcctctgggggaggtggcagttatgctgttactagtgattttagggctttgttatttaacttatttcaagggtgctgtgctcagccctgcccatggctgtgcagctccctccgtgcctcagatctgctgtagccagtgcagacctcactgtcgtgtccatgccacccccggcatggctccaggtggcctggtgactccatgatggacgatcttgctcccaggacctgcctcttcccaggcttcctggggaagagttgtacgcccaggcaacaagggctgagctgcgcttgcgtggctgtttcatgaccgcttgtttttctccttttggtgtaatgttttacaaatcctttggcctgagaactaatatgttaattgccttaaataaattaatagaaatctagtccgttaaaaaaaaaaaaaaaaaa

SEQ ID NO: 1676 - DNA, 4673 bp, Homo Sapiens
  NM_002225
tttccgcagttaggggctgctatttcaacgcagggagataaaaagaaaaaaacacttgctcttctaccccgctaaaaacactcatcctagggagcacgccagcatttgcagcgttcggggcagggccactcggcctgcggccgttgcactggctggaagctggcaggcgatcacggttgattggctcgggtgcggtccaagggcagcaacgccttcggcgggccgcctagggtgattggctgctgcagcccaccccctagccggtttggtgggcggcgaagcctggattggtggagctaagagctggctcagtttcagcgctggctcttcgtgcatggcagagatggcgactgcgactcggctgctggggtggcgtgtggcgagctggaggctgcggccgccgcttgccggcttcgtttcccagcgggcccactcgcttttgcccgtggacgatgcaatcaatgggctaagcgaggagcagaggcagcttcgtcagaccatggctaagttccttcaggagcacctggcccccaaggcccaggagatcgatcgcagcaatgagttcaagaacctgcgagaattttggaagcagctggggaacctgggcgtattgggcatcacagcccctgttcagtatggcggctccggcctgggctacctggagcatgtgctggtgatggaggagatatcccgagcttccggagcagtggggctcagttacggtgcccactccaacctctgcatcaaccagcttgtacgcaatgggaatgaggcccagaaagagaagtatctcccgaagctgatcagtggtgagtacatcggagccctggccatgagtgagcccaatgcaggctctgatgttgtctctatgaagctcaaagcggaaaagaaaggaaatcactacatcctgaatggcaacaagttctggatcactaatggccctgatgctgacgtcctgattgtctatgccaagacagatctggctgctgtgccagcttctcggggcatcacagccttcattgtggagaagggtatgcctggctttagcacctctaagaagctggacaagctggggatgaggggctctaacacctgtgagctaatctttgaagactgcaagattcctgctgccaacatcctgggccatgagaataagggtgtctacgtgctgatgagtgggctggacctggagcggctggtgctggccggggggcctcttgggctcatgcaagcggtcctggaccacaccattccctacctgcacgtgagggaagcctttggccagaagatcggccacttccagttgatgcaggggaagatggctgacatgtacacccgcctcatggcgtgtcggcagtatgtctacaatgtcgccaaggcctgcgatgagggccattgcactgctaaggactgtgcaggtgtgattctttactcagctgagtgtgccacacaggtagccctggacggcattcagtgttttggtggcaatggctacatcaatgactttcccatgggccgctttcttcgagatgccaagctgtatgagataggggctgggaccagcgaggtgaggcggctggtcatcggcagagccttcaatgcagactttcactagtcctgagacccttcgcccccttttcctgcacctagtggcctttcttgggaagtagagatgtggcggctttcccaccctgcccacagcaggccctcctgcccagctgctcttgtcagccctctggcctctggatgaggttgagttctccacaacagctcccaagcatcatgggcctcgcagccgggcctgtgccacggctagtgttgtgtgatttaaaatggactcagcaggaagcatattgtctggggattgttgggacaggttttggtgactctgtgcccttgctctctaacttctgagcccacctcccagggtaggcacctgggggcatgcaggtgcccacctcccagggtaggcacctgggggcatgcaggtacccacctctttctcttgggtgaggctctggcaaggagatctctctgctcaagcacagcagaatcatggcccctctccatgaattggaacttggtacaggttaagtatccctaatcctgaaatctgaaacacttgtggttccaagcattttggataaggcaaattcaactttcagtctcttttctgggggaaaaaaataataaacctagcctagccaggcgtggtggctcatgcttgtaatcccagcacttcaggaggctgagatgggtggatcacctgaggtcaggagttcaagaccagcctggccaacatgtggaaacctcgcctcaactaaaaatagaaaaaaattagttgggcatggtggtgggcacctgtaatcccagctacttcaggaggctgaggcaggagaattacttgaacccaggaggcggacgttgcagtgagccgagcttgtgccattgcactccagcctgggcgacaagagcaaaactcttcaaaaaacaaaacaaaacaaaaaaaccctggcccttgtttcttccagtttctagaggtatcagctcctagcagcttatgaacacatatgcttgcttggccaggcaaggtggtgtgtgcctgtaatcccagcactttgggaggccaaggcaggtggatcacttgcagtcaggagttcaagaccagcctgtccaacgtggtgaaaccccatctctactaaaaatacaaaaattagccaggggtggtggtgcacgtctgtaatcccagctactcaggaggctgaggcaggagaatcacttgaacccgggaggtggaggttgcaatgagccaatatgacaccgctgcagtccagcctgggccatagagtgagactctgtctcaaaaaaggaaagaaaaataggctgggcacagtgactcatgcctgtaatcccaacactttgggaggccgaggcaggtggatcacgaggtcaggagttcaagaccagcctggccaagatggtaaaacctcgtctctactaaaaatacaaaaattagccaggtgtggtggcaggctcctgtaatcccagctactcaggaggctgaggcagagaattgcttgaacccgggaggcagagtttgcagtgagccaagatcacaccactgcactccagcttggacgacagagcgagactctgtctcaaaaaataataggccaggcatggtggctcaacgtctgtaatcccagcactttgggaggccgaggcgggcagatcacaaggtcaggagttcgagaccagcctgacgaccaacatggtgaaacctcgtctctactaaaaatacaaaaattagccaggcctggtggcacgcgcctgtaatcccagttacacagaagactgaggcaggagaatcgcttgaacgcaggaggcagaggttgcaggagctgagatcgcgccattgcactccagcctgggcaacagagtgagactctgtctcaaaaaataataataaaataaatgaacacacatgctgctgagtccgcagggggggcagagcagaggacagcgtgcttttgtgtactgttggaagactggctcctcctgtacagcacctctgagcccttgtgcaccgccctgccacgggcaccatccagtcctggccgtgtgaccacccacagctgactgggcagcaggcacaggccctacccgagcaggccggagttggctcgcatgactccagctgaggctgcctgtgtacatttctccagataccctatggctaattttgttataactgcacagtggctgctgccattttgtattaaatatattgtgaaacaaacctatctggggagaagcaatctacttgccgctgcttcctgtctggatccagcttgtgtccttggagagtggctggcccaggtcctattcctgtcctccagcccgttctttcatgagggacaggaaggtaaaatcagcccttaggagagaggtctcagcctccctttcccagatctcccagtgagttttaaaggaagcagggagcccagagtgctaagttcttacagccagaaggaagcttatagatttctgaaaaccgcccctttgtttttaaaaagatcaacacaatttgactttctcaaggtcaaaacgaactagaatccagatctgctcatggcaaaaatgggggtgttctgagaattccagctttgggccgcactgtacagcagtctggatagagtgtgatctgagaagggaatgggtctgggttgttccaccccttccgagttccaaaaagagggaactggttttcttggttctcagcccagcagcacctatcctggctcttggtcctggcctgcagccaagtgctgttcctagcctgaggcttgagacaggtggggttggctcctcaccaaccccagttccgtcccatcctgagggcaagatcctgggctcataggcagtccctttcacttccttgtcttgctccctgctatgttggagatgaatgtgactaaaagggccatcttgctggcttaatgtgtggctggagagaccagcctggagacaatgtggcaaaatggggcgcttcatccagtctgtctaagccctgtcgacttggggaggtgatttctttcctggttctatatgtgaagcaaaataaatgttttaaaattaaaagcaaaaaaaacaaaatgaaccatgaaaaaaaa

SEQ ID NO: 1677 - DNA, 5053 bp, Homo Sapiens
  NM_002227
tgcagacagtgcgggcctgcgcccagtcccggctgtcctcgccgcgacccctcctcagccctgggcgcgcgcacgctggggccccgcggggctggccgcctagcgagcctgccggtcgaccccagccagcgcagcgacggggcgctgcctggcccaggcgcacacggaagtgcgcttctctgaagtagctttggaaagtagagaagaaaatccagtttgcttcttggagaacactggacagctgaataaatgcagtatctaaatataaaagaggactgcaatgccatggctttctgtgctaaaatgaggagctccaagaagactgaggtgaacctggaggcccctgagccaggggtggaagtgatcttctatctgtcggacagggagcccctccggctgggcagtggagagtacacagcagaggaactgtgcatcagggctgcacaggcatgccgtatctctcctctttgtcacaacctctttgccctgtatgacgagaacaccaagctctggtatgctccaaatcgcaccatcaccgttgatgacaagatgtccctccggctccactaccggatgaggttctatttcaccaattggcatggaaccaacgacaatgagcagtcagtgtggcgtcattctccaaagaagcagaaaaatggctacgagaaaaaaaagattccagatgcaacccctctccttgatgccagctcactggagtatctgtttgctcagggacagtatgatttggtgaaatgcctggctcctattcgagaccccaagaccgagcaggatggacatgatattgagaacgagtgtctagggatggctgtcctggccatctcacactatgccatgatgaagaagatgcagttgccagaactgcccaaggacatcagctacaagcgatatattccagaaacattgaataagtccatcagacagaggaaccttctcaccaggatgcggataaataatgttttcaaggatttcctaaaggaatttaacaacaagaccatttgtgacagcagcgtgtccacgcatgacctgaaggtgaaatacttggctaccttggaaactttgacaaaacattacggtgctgaaatatttgagacttccatgttactgatttcatcagaaaatgagatgaattggtttcattcgaatgacggtggaaacgttctctactacgaagtgatggtgactgggaatcttggaatccagtggaggcataaaccaaatgttgtttctgttgaaaaggaaaaaaataaactgaagcggaaaaaactggaaaataaacacaagaaggatgaggagaaaaacaagatccgggaagagtggaacaatttttcttacttccctgaaatcactcacattgtaataaaggagtctgtggtcagcattaacaagcaggacaacaagaaaatggaactgaagctctcttcccacgaggaggccttgtcctttgtgtccctggtagatggctacttccggctcacagcagatgcccatcattacctctgcaccgacgtggcccccccgttgatcgtccacaacatacagaatggctgtcatggtccaatctgtacagaatacgccatcaataaattgcggcaagaaggaagcgaggaggggatgtacgtgctgaggtggagctgcaccgactttgacaacatcctcatgaccgtcacctgctttgagaagtctgagcaggtgcagggtgcccagaagcagttcaagaactttcagatcgaggtgcagaagggccgctacagtctgcacggttcggaccgcagcttccccagcttgggagacctcatgagccacctcaagaagcagatcctgcgcacggataacatcagcttcatgctaaaacgctgctgccagcccaagccccgagaaatctccaacctgctggtggctactaagaaagcccaggagtggcagcccgtctaccccatgagccagctgagtttcgatcggatcctcaagaaggatctggtgcagggcgagcaccttgggagaggcacgagaacacacatctattctgggaccctgatggattacaaggatgacgaaggaacttctgaagagaagaagataaaagtgatcctcaaagtcttagaccccagccacagggatatttccctggccttcttcgaggcagccagcatgatgagacaggtctcccacaaacacatcgtgtacctctatggcgtctgtgtccgcgacgtggagaatatcatggtggaagagtttgtggaagggggtcctctggatctcttcatgcaccggaaaagcgatgtccttaccacaccatggaaattcaaagttgccaaacagctggccagtgccctgagctacttggaggataaagacctggtccatggaaatgtgtgtactaaaaacctcctcctggcccgtgagggcatcgacagtgagtgtggcccattcatcaagctcagtgaccccggcatccccattacggtgctgtctaggcaagaatgcattgaacgaatcccatggattgctcctgagtgtgttgaggactccaagaacctgagtgtggctgctgacaagtggagctttggaaccacgctctgggaaatctgctacaatggcgagatccccttgaaagacaagacgctgattgagaaagagagattctatgaaagccggtgcaggccagtgacaccatcatgtaaggagctggctgacctcatgacccgctgcatgaactatgaccccaatcagaggcctttcttccgagccatcatgagagacattaataagcttgaagagcagaatccagatattgtttcagaaaaaaaaccagcaactgaagtggaccccacacattttgaaaagcgcttcctaaagaggatccgtgacttgggagagggccactttgggaaggttgagctctgcaggtatgaccccgaaggggacaatacaggggagcaggtggctgttaaatctctgaagcctgagagtggaggtaaccacatagctgatctgaaaaaggaaatcgagatcttaaggaacctctatcatgagaacattgtgaagtacaaaggaatctgcacagaagacggaggaaatggtattaagctcatcatggaatttctgccttcgggaagccttaaggaatatcttccaaagaataagaacaaaataaacctcaaacagcagctaaaatatgccgttcagatttgtaaggggatggactatttgggttctcggcaatacgttcaccgggacttggcagcaagaaatgtccttgttgagagtgaacaccaagtgaaaattggagacttcggtttaaccaaagcaattgaaaccgataaggagtattacaccgtcaaggatgaccgggacagccctgtgttttggtatgctccagaatgtttaatgcaatctaaattttatattgcctctgacgtctggtcttttggagtcactctgcatgagctgctgacttactgtgattcagattctagtcccatggctttgttcctgaaaatgataggcccaacccatggccagatgacagtcacaagacttgtgaatacgttaaaagaaggaaaacgcctgccgtgcccacctaactgtccagatgaggtttatcaacttatgaggaaatgctgggaattccaaccatccaatcggacaagctttcagaaccttattgaaggatttgaagcacttttaaaataagaagcatgaataacatttaaattccacagattatcaagtccttctcctgcaacaaatgcccaagtcattttttaaaaatttctaatgaaagaagtttgtgttctgtccaaaaagtcactgaactcatacttcagtacatatacatgtataaggcacactgtagtgcttaatatgtgtaaggacttcctctttaaatttggtaccagtaacttagtgacacataatgacaaccaaaatatttgaaagcacttaagcactcctccttgtggaaagaatataccaccatttcatctggctagttcaccatcacaactgcattaccaaaaggggatttttgaaaacgaggagttgaccaaaataatatctgaagatgattgcttttccctgctgccagctgatctgaaatgttttgctggcacattaatcatagataaagaaagattgatggacttagccctcaaatttcagtatctatacagtactagaccatgcattcttaaaatattagataccaggtagtatatattgtttctgtacaaaaatgactgtattctctcaccagtaggacttaaactttgtttctccagtggcttagctcctgttcctttgggtgatcactagcacccatttttgagaaagctggttctacatggggggatagctgtggaatagataatttgctgcatgttaattctcaagaactaagcctgtgccagtgctttcctaagcagtatacctttaatcagaactcattcccagaacctggatgctattacacatgcttttaagaaacgtcaatgtatatccttttataactctaccactttggggcaagctattccagcactggttttgaatgctgtatgcaaccagtctgaataccacatacgctgcactgttcttagagggtttccatacttaccaccgatctacaagggttgatccctgtttttaccatcaatcatcaccctgtggtgcaacacttgaaagacccggctagaggcactatggacttcaggatccactagacagttttcagtttgcttggaggtagctgggtaatcaaaaatgtttagtcattgattcaatgtgaacgattacggtctttatgaccaagagtctgaaaatctttttgttatgctgtttagtattcgtttgatattgttacttttcacctgttgagcccaaattcaggattggttcagtggcagcaatgaagttgccatttaaatttgttcatagcctacatcaccaaggtctctgtgtcaaacctgtggccactctatatgcactttgtttactctttatacaaataaatatactaaagactttacatgca

SEQ ID NO: 1678 - DNA, 1832 bp, Homo Sapiens
  NM_002229
gagcggccaggccagcctcggagccagcagggagctgggagctgggggaaacgacgccaggaaagctatcgcgccagagagggcgacgggggctcgggaagcctgacagggcttttgcgcacagctgccggctggctgctacccgcccgcgccagcccccgagaacgcgcgaccaggcacccagtccggtcaccgcagcggagagctcgccgctcgctgcagcgaggcccggagcggccccgcagggaccctccccagaccgcctgggccgcccggatgtgcactaaaatggaacagcccttctaccacgacgactcatacacagctacgggatacggccgggcccctggtggcctctctctacacgactacaaactcctgaaaccgagcctggcggtcaacctggccgacccctaccggagtctcaaagcgcctggggctcgcggacccggcccagagggcggcggtggcggcagctacttttctggtcagggctcggacaccggcgcgtctctcaagctcgcctcttcggagctggaacgcctgattgtccccaacagcaacggcgtgatcacgacgacgcctacacccccgggacagtacttttacccccgcgggggtggcagcggtggaggtgcagggggcgcagggggcggcgtcaccgaggagcaggagggcttcgccgacggctttgtcaaagccctggacgatctgcacaagatgaaccacgtgacaccccccaacgtgtccctgggcgctaccggggggcccccggctgggcccgggggcgtctacgccggcccggagccacctcccgtttacaccaacctcagcagctactccccagcctctgcgtcctcgggaggcgccggggctgccgtcgggaccgggagctcgtacccgacgaccaccatcagctacctcccacacgcgccgcccttcgccggtggccacccggcgcagctgggcttgggccgcggcgcctccaccttcaaggaggaaccgcagaccgtgccggaggcgcgcagccgggacgccacgccgccggtgtcccccatcaacatggaagaccaagagcgcatcaaagtggagcgcaagcggctgcggaaccggctggcggccaccaagtgccggaagcggaagctggagcgcatcgcgcgcctggaggacaaggtgaagacgctcaaggccgagaacgcggggctgtcgagtaccgccggcctcctccgggagcaggtggcccagctcaaacagaaggtcatgacccacgtcagcaacggctgtcagctgctgcttggggtcaagggacacgccttctgaacgtcccctgcccctttacggacaccccctcgcttggacggctgggcacacgcctcccactggggtccagggagcaggcggtgggcacccaccctgggacctaggggcgccgcaaaccacactggactccggccctcctaccctgcgcccagtccttccacctcgacgtttacaagcccccccttccacttttttttgtatgttttttttctgctggaaacagactcgattcatattgaatataatatatttgtgtatttaacagggaggggaagagggggcgatcgcggcggagctggccccgccgcctggtactcaagcccgcggggacattgggaaggggacccccgccccctgccctcccctctctgcaccgtactgtggaaaagaaacacgcacttagtctctaaagagtttattttaagacgtgtttgtgtttgtgtgtgtttgttctttttattgaatctatttaagtaaaaaaaaaattggttctttaaaaaaaaaaaaaaaaa

SEQ ID NO: 1679 - DNA, 3508 bp, Homo Sapiens
  NM_002230
tgagttgctgccttggccagagtccggagcagccgccgcccgaccacgccgagctcagttcgctgtccgcgccggctcccaccccggcccgaccccgacccggcccggtcaggccccatactcagtagccacgatggaggtgatgaacctgatggagcagcctatcaaggtgactgagtggcagcagacatacacctacgactcgggtatccactcgggcgccaacacctgcgtgccctccgtcagcagcaagggcatcatggaggaggatgaggcctgcgggcgccagtacacgctcaagaaaaccaccacttacacccagggggtgccccccagccaaggtgatctggagtaccagatgtccacaacagccagggccaaacgggtgcgggaggccatgtgccctggtgtgtcaggcgaggacagctcgcttctgctggccacccaggtggaggggcaggccaccaacctgcagcgactggccgagccgtcccagctgctcaagtcggccattgtgcatctcatcaactaccaggacgatgccgagctggccactcgcgccctgcccgagctcaccaaactgctcaacgacgaggacccggtggtggtgaccaaggcggccatgattgtgaaccagctgtcgaagaaggaggcgtcgcggcgggccctgatgggctcgccccagctggtggccgctgtcgtgcgtaccatgcagaataccagcgacctggacacagcccgctgcaccaccagcatcctgcacaacctctcccaccaccgggaggggctgctcgccatcttcaagtcgggtggcatccctgctctggtccgcatgctcagctcccctgtggagtcggtcctgttctatgccatcaccacgctgcacaacctgctcctgtaccaggagggcgccaagatggccgtgcgcctggccgacgggctgcaaaagatggtgcccctgctcaacaagaacaaccccaagttcctggccatcaccaccgactgcctgcagctcctggcctacggcaaccaggagagcaagctgatcatcctggccaatggtgggccccaggccctcgtgcagatcatgcgtaactacagttatgaaaagctgctctggaccaccagtcgtgtgctcaaggtgctatccgtgtgtcccagcaataagcctgccattgtggaggctggtgggatgcaggccctgggcaagcacctgaccagcaacagcccccgcctggtgcagaactgcctgtggaccctgcgcaacctctcagatgtggccaccaagcaggagggcctggagagtgtgctgaagattctggtgaatcagctgagtgtggatgacgtcaacgtcctcacctgtgccacgggcacactctccaacctgacatgcaacaacagcaagaacaagacgctggtgacacagaacagcggtgtggaggctctcatccatgccatcctgcgtgctggtgacaaggacgacatcacggagcctgccgtctgcgctctgcgccacctcactagccgccaccctgaggccgagatggcccagaactctgtgcgtctcaactatggcatcccagccatcgtgaagctgctcaaccagcccaaccagtggccactggtcaaggcaaccatcggcttgatcaggaatctggccctgtgcccagccaaccatgccccgctgcaggaggcagcggtcatcccccgcctcgtccaactgctggtgaaggcccaccaggatgcccagcgccacgtagctgcaggcacacagcagccctacacggatggtgtgaggatggaggagattgtggagggctgcaccggagcactgcacatcctcgcccgggaccccatgaaccgcatggagatcttccggctcaacaccattcccctgtttgtgcagctcctgtactcgtcggtggagaacatccagcgcgtggctgccggggtgctgtgtgagctggcccaggacaaggaggcggccgacgccattgatgcagagggggcctcggccccactcatggagttgctgcactcccgcaacgagggcactgccacctacgctgctgccgtcctgttccgcatctccgaggacaagaacccagactaccggaagcgcgtgtccgtggagctcaccaactccctcttcaagcatgacccggctgcctgggaggctgcccagagcatgattcccatcaatgagccctatggagatgacatggatgccacctaccgccccatgtactccagcgatgtgccccttgacccgctggagatgcacatggacatggatggagactaccccatcgacacctacagcgacggcctcaggcccccgtaccccactgcagaccacatgctggcctaggcggcctggccccagtacggccccctctttgcaggcttttcctcctctctagaacctccttctgttggaggccctcccatctccccgctgaaacctgcgctccttttttggggggatcctttgctgctgagcttccccaagcacggtgtgccctggcctgccttcttcttgtgtctttggtggggatggggaggcctattcctgctggccccttctgggggtggtgggcaggtgacacggagtggcttgagcttctggggatgcaggtccaccgagcccctgacccctgtctgtccccgctcccctaacaggtgcggttcctcatctgagaggctctccgtgcaggcgatggggcaagacagaaaagtgcctgagctggggaagccggggtgtaacttcctgctgcaccctgcgcctccagaggtcctccgtagggtctttcttgggatagtgttctgctcctgcttttctgtcctgggcatgggtccagggcctgacaccccctccccgcccctgtggccctggccactaaagcttcagactcaagtacccattctgttttcccccagcaacgcccctccaaacctccagcctccctgtctccagctgcctgggcccggaagggctttggttccttctctgggtctgattttctcactgaactccaccgaccaactgccctaagcccccagggcctccagggcccaggttcgagacccaaacccccaaaatccaaaacttctcttgaaaagttcagggaccgtccaggggagatggggaggagatatggagtgagtcacctgctccagaagatgccagcttctctctccagggtgcttagttggctttgcccacccctcactccccagggagctctggggacagcttcctcacacccctgtcccacccacacagctgccctagctgaccccgagaagtgctcttggctgacccctctggtgtgtggtgaggggctttctcttccccttcctgtttcagacccccccatttcccgcacatggtgtggggggctgggggaggtccaagcagagtgttttattattatcgctttatgtttttggttattggtttttttgtatagaccaaagcaaagaaaataaaaataacacagatgcg

SEQ ID NO: 1680 - DNA, 1715 bp, Homo Sapiens
  NM_002231
ggcctgccgagtccgcggcgttccccggctgcagccgggagggggccgaggagtgactgagccccgggctgtgcagtccgacgccgactgaggcacgagcgggtgacgctgggcctgcagcgcggagcagaaagcagaacccgcagagtcctccctgctgctgtgtggacgacacgtgggcacaggcagaagtgggccctgtgaccagctgcactggtttcgtggaaggaagctccaggactggcgggatgggctcagcctgtatcaaagtcaccaaatactttctcttcctcttcaacttgatcttctttatcctgggcgcagtgatcctgggcttcggggtgtggatcctggccgacaagagcagtttcatctctgtcctgcaaacctcctccagctcgcttaggatgggggcctatgtcttcatcggcgtgggggcagtcactatgctcatgggcttcctgggctgcatcggcgccgtcaacgaggtccgctgcctgctggggctgtactttgctttcctgctcctgatcctcattgcccaggtgacggccggggccctcttctacttcaacatgggcaagctgaagcaggagatgggcggcatcgtgactgagctcattcgagactacaacagcagtcgcgaggacagcctgcaggatgcctgggactacgtgcaggctcaggtgaagtgctgcggctgggtcagcttctacaactggacagacaacgctgagctcatgaatcgccctgaggtcacctacccctgttcctgcgaagtcaagggggaagaggacaacagcctttctgtgaggaagggcttctgcgaggcccccggcaacaggacccagagtggcaaccaccctgaggactggcctgtgtaccaggagggctgcatggagaaggtgcaggcgtggctgcaggagaacctgggcatcatcctcggcgtgggcgtgggtgtggccatcatcgagctcctggggatggtcctgtccatctgcttgtgccggcacgtccattccgaagactacagcaaggtccccaagtactgaggcagctgctatccccatctccctgcctggcccccaacctcagggctcccaggggtctccctggctccctcctccaggcctgcctcccacttcactgcgaagaccctcttgcccatcctgactgaaagtagggggctttctggggcctagcgatctctcctggcctatccgctgccagccttgagccctggctgttctgtggttcctctgctcaccgcccatcagggttctcttagcaactcagagaaaaatgctccccacagcgtccctggcgcaggtgggctggacttctacctgccctcaagggtgtgtatattgtataggggcaactgtatgaaaaattggggaggagggggccgggcgcggtggctcacgcctgtaatcccagcactttgggaggccgaggcgggtggatcacgaggtcaggagatcgagaccatcctggctaacatggtgaaaccccgtctctactaaaaatacaaaaaaaatttagccgggcgcggtggcgggcacctgtagtcccagctacttgggaggctgaggcaggagaatggtgtgaacccgggagcggaggttgcagtgagctgagatcgtgctactgcactccagcctgggggacagaaagagactccgtctcaaaaaaaaaaaaaaaaaaaaaaaaaa

SEQ ID NO: 1681 - DNA, 2237 bp, Homo Sapiens
  NM_002237
ccctcggcggctgctgcgccgcgctcccggcgcactcggagcccggcggggaccgggaggcagagacggggcggccgtggctccgagggcgggagctgagccgggccccgggaccgaagtttggcggcggctccgggaggcagagcgggctccccgggcgacttccaggcccctctcgcgtcctcgccccggacccgtgggcagccggggggaacggaagccgcggccgggccaactccgaggcggggacgccgcgacgggaacttgaggcccgagagggatgtgaaggcccaaaatgaccctcttaccgggagacaattctgactacgactacagcgcgctgagctgcacctcggacgcctccttccacccggccttcctcccgcagcgccaggccatcaagggcgcgttctaccgccgggcgcagcggctgcggccgcaggatgagccccgccagggctgtcagcccgaggaccgccgccgtcggatcatcatcaacgtaggcggcatcaagtactcgctgccctggaccacgctggacgagttcccgctgacgcgcctgggccagctcaaggcctgcaccaacttcgacgacatcctcaacgtgtgcgatgactacgacgtcacctgcaacgagttcttcttcgaccgcaacccgggggccttcggcactatcctgaccttcctgcgcgcgggcaagctgcggctgctgcgcgagatgtgcgcgctgtccttccaggaggagctgctgtactggggcatcgcggaggaccacctggacggctgctgcaagcgccgctacctgcagaagattgaggagttcgcggagatggtggagcgggaggaagaggacgacgcgctggacagcgagggccgcgacagcgagggcccggccgagggcgagggccgcctggggcgctgcatgcggcgactgcgcgacatggtggagaggccgcactcggggctgcctggcaaggtgttcgcctgcctgtcggtgctcttcgtgaccgtcaccgccgtcaacctctccgtcagcaccttgcccagcctgagggaggaggaggagcagggccactgttcccagatgtgccacaacgtcttcatcgtggagtcggtgtgcgtgggctggttctccctggagttcctcctgcggctcattcaggcgcccagcaagttcgccttcctgcggagcccgctgacgctgatcgacctggtggccatcctgccctactacatcacgctgctggtggacggcgccgccgcaggccgtcgcaagcccggcgcgggcaacagctacctggacaaggtggggctggtgctgcgcgtgctgcgggcgctgcgcatcctgtacgtgatgcgcctggcgcgccactccctggggctgcagacgctggggctcacggcccgccgctgcacccgcgagttcgggctcctgctgctcttcctctgcgtggccatcgccctcttcgcgcccctgctctacgtcatcgagaacgagatggccgacagccccgagttcaccagcatccctgcctgctactggtgggctgtcatcaccatgacgacggtgggctatggcgacatggtccccaggagcaccccgggccaggtagtggccctgagcagcatcctgagcggcatcctgctcatggccttcccagtcacctccatcttccacaccttctcccgctcctacctggagctcaagcaggagcaagagagggtgatgttccggagggcgcagttcctcatcaaaaccaagtcgcagctgagcgtgtcccaggacagtgacatcttgttcggaagtgcctcctcggacaccagagacaataactgagcgcggaggacacgcctgccctgcctgccatctgtggcccgaagccattgccatccactgcagacgcctggagagggacaggccgcttccgagtgcagtcctggcgcagcaccgactcccacgcacccggggaaggacaccctcactcccacaccccgggaagaacactagaacatcagcagaggggccctgcccctccgcctgcagccgtgaaaggaagctgggtcatcagcccagccccgcccaccccagcccctatgtgtgtttccctcaataaggagatgccttgttcttttcaccatgcaaataacatgcccagcaaaaacttgctttatgggtctgcctggagaaaaaaaaaaaaaatacaaacagcagaaacagcaaaaaaaaaaaaaaaaaa

SEQ ID NO: 1682 - DNA, 6120 bp, Homo Sapiens
  NM_002247
cgccaggtcgcgcacagcgccccgagcccaggcgcctccccgcccccctcccgcgctccgcggcggcggcggcggcggcagcagtagcagcaatatggctgttgatgggtgtttggggtggcgctggcggcgggaggagctcccccgagcccctgcgccggctgcccgttgctagctatggcaaatggtggcggcggcggcggcggcagcagcggcggcggcggcggcggcggaggcagcagtcttagaatgagtagcaatatccacgcgaaccatctcagcctagacgcgtcctcctcctcctcctcctcctcttcctcttcttcttcttcctcctcctcttcctcctcgtcctcggtccacgagcccaagatggatgcgctcatcatcccggtgaccatggaggtgccgtgcgacagccggggccaacgcatgtggtgggctttcctggcctcctccatggtgactttcttcgggggcctcttcatcatcttgctctggcggacgctcaagtacctgtggaccgtgtgctgccactgcgggggcaagacgaaggaggcccagaagattaacaatggctcaagccaggcggatggcactctcaaaccagtggatgaaaaagaggaggcagtggccgccgaggtcggctggatgacctccgtgaaggactgggcgggggtgatgatatccgcccagacactgactggcagagtcctggttgtcttagtctttgctctcagcatcggtgcacttgtaatatacttcatagattcatcaaacccaatagaatcctgccagaatttctacaaagatttcacattacagatcgacatggctttcaacgtgttcttccttctctacttcggcttgcggtttattgcagccaacgataaattgtggttctggctggaagtgaactctgtagtggatttcttcacggtgccccccgtgtttgtgtctgtgtacttaaacagaagttggcttggtttgagatttttaagagctctgagactgatacagttttcagaaattttgcagtttctgaatattcttaaaacaagtaattccatcaagctggtgaatctgctctccatatttatcagcacgtggctgactgcagccgggttcatccatttggtggagaattcaggggacccatgggaaaatttccaaaacaaccaggctctcacctactgggaatgtgtctatttactcatggtcacaatgtccaccgttggttatggggatgtttatgcaaaaaccacacttgggcgcctcttcatggtcttcttcatcctcgggggactggccatgtttgccagctacgtccctgaaatcatagagttaataggaaaccgcaagaaatacgggggctcctatagtgcggttagtggaagaaagcacattgtggtctgcggacacatcactctggagagtgtttccaacttcctgaaggactttctgcacaaggaccgggatgacgtcaatgtggagatcgtttttcttcacaacatctcccccaacctggagcttgaagctctgttcaaacgacattttactcaggtggaattttatcagggttccgtcctcaatccacatgatcttgcaagagtcaagatagagtcagcagatgcatgcctgatccttgccaacaagtactgcgctgacccggatgcggaggatgcctcgaatatcatgagagtaatctccataaagaactaccatccgaagataagaatcatcactcaaatgctgcagtatcacaacaaggcccatctgctaaacatcccgagctggaattggaaagaaggtgatgacgcaatctgcctcgcagagttgaagttgggcttcatagcccagagctgcctggctcaaggcctctccaccatgcttgccaacctcttctccatgaggtcattcataaagattgaggaagacacatggcagaaatactacttggaaggagtctcaaatgaaatgtacacagaatatctctccagtgccttcgtgggtctgtccttccctactgtttgtgagctgtgttttgtgaagctcaagctcctaatgatagccattgagtacaagtctgccaaccgagagagccgtatattaattaatcctggaaaccatcttaagatccaagaaggtactttaggatttttcatcgcaagtgatgccaaagaagttaaaagggcatttttttactgcaaggcctgtcatgatgacatcacagatcccaaaagaataaaaaaatgtggctgcaaacggcttgaagatgagcagccgtcaacactatcaccaaaaaaaaagcaacggaatggaggcatgcggaactcacccaacacctcgcctaagctgatgaggcatgaccccttgttaattcctggcaatgatcagattgacaacatggactccaatgtgaagaagtacgactctactgggatgtttcactggtgtgcacccaaggagatagagaaagtcatcctgactcgaagtgaagctgccatgaccgtcctgagtggccatgtcgtggtctgcatctttggcgacgtcagctcagccctgatcggcctccggaacctggtgatgccgctccgtgccagcaactttcattaccatgagctcaagcacattgtgtttgtgggctctattgagtacctcaagcgggaatgggagacgcttcataacttccccaaagtgtccatattgcctggtacgccattaagtcgggctgatttaagggctgtcaacatcaacctctgtgacatgtgcgttatcctgtcagccaatcagaataatattgatgatacttcgctgcaggacaaggaatgcatcttggcgtcactcaacatcaaatctatgcagtttgatgacagcatcggagtcttgcaggctaattcccaagggttcacacctccaggaatggatagatcctctccagataacagcccagtgcacgggatgttacgtcaaccatccatcacaactggggtcaacatccccatcatcactgaactagtgaacgatactaatgttcagtttttggaccaagacgatgatgatgaccctgatacagaactgtacctcacgcagccctttgcctgtgggacagcatttgccgtcagtgtcctggactcactcatgagcgcgacgtacttcaatgacaatatcctcaccctgatacggaccctggtgaccggaggagccacgccggagctggaggctctgattgctgaggaaaacgcccttagaggtggctacagcaccccgcagacactggccaatagggaccgctgccgcgtggcccagttagctctgctcgatgggccatttgcggacttaggggatggtggttgttatggtgatctgttctgcaaagctctgaaaacatataatatgctttgttttggaatttaccggctgagagatgctcacctcagcacccccagtcagtgcacaaagaggtatgtcatcaccaacccgccctatgagtttgagctcgtgccgacggacctgatcttctgcttaatgcagtttgaccacaatgccggccagtcccgggccagcctgtcccattcctcccactcgtcgcagtcctccagcaagaagagctcctctgttcactccatcccatccacagcaaaccgacagaaccggcccaagtccagggagtcccgggacaaacagaagtacgtgcaggaagagcggctttgatatgtgtatccaccgccactgtgtgaaactgtatctgccactcatttccccagttggtgtttccaacaaagtaactttccctgttttcccctgtagtccccccctttttttttacacatatttgcatatgtatgatagtgtgcatgtggttgtcatttttatttcaccaccataaaacccttgagcacaacagcaaataagcagacggaccaaaagttatttatgattctgggggaaaaataacccaaaggcatgctccagacataaatagctcactgcaggaacgagttcacagattagaagggagcacttgtgatcaacgtcagttaggcagagcaagtttatttaatgtaaaagaaaagttgattctgatttatcaggattatcagggtgctttgggttttgattttgttgttgttgttgttttcctttctttctttttttatacacacaataagttagcacatgtttatttgaaacaagcaaccaaacagcaatgaaaacatattgattgtttccagtctctgggccgaagtattgcgaagcatttgaaaagctttcacgatttgtgtagatgattatgaaggacctgcttgttgcaagagaacatcagtgatttttttagttactcaccaaggccttttgtcccagagccagttccctctgggagttcttatgaacatttctcaccttaatatggaggagagaatagtattccaatcatggatgtatcaaattctagtcatttagtttaagtgaaaagaggtttgattgcatattaaattgttattctgtctccttatgttgccatatgaatagctattttttttctttcacttttgacatttgggatgaaaagccatatgtatcataaatatcagatgtaagtcattaaaaactgccttcctgggacttttacatcttttaaaaggtgaattacttaccttatgtacagaataaataatgctcaggaaagagcaagtatttttccatgcattctcaggggatctttttactcccctttgtttgattagttagggccccaatgccaggtaggaggaagggctggggcaatggtagagtgagaggaagacaaacccagctgcagatcatgcttttctaggagccgacatgctaaataaattagaatgtaggaggatcagccacagttgactcaacaaagacaaaagccagccaccaccttcaactgttggcacagctgtgcggtgctggctgtcccaatgcagaaagctggtgggaaggaattcctcatcatcactttctttaatgtagccaatttaggcagggtaatgacggcaatagagagctgctccttgtcattatgagacgtgggataagaagagtgcaacagtgagccaaacacattttggtatagttatttttttcttcttttgttttctttcttttttaacacttagtaagcatgagaggagaggtagaaaaatacccttttttcaacatatagttgtcagatgctttgtgcatgcaaatcatgctttaggcagtgcggtatttcttaaaaactggccaattcaccataaccaatttcccttatggatggactaggctggtatatacatatttgaaaagttttacttcaaagaattccatcgaatagaataggggtaaaagggaggaggaaaacatgtcacagctgtaccatctctaaaaaggtgtttttatggtgaatgttttggatttagattttggatcccccgtcccctcaagcatgatagttttggatatttgcttgctgtgtgaattgacaagcacttttactgacaaatggtgaggctcagtcagaacctccaccctcccccacaccaaagacaggggcagcgtagtattcaaaccagtattgtggtggggaataattgtatacatgtaaattatcaagccctatgagtggaagaattttttcaaattatttttgtccctctatatattgatttatattatgtataactatctctttatataaactatatataattatatatatataactatataattatatatatataactatatatataactatatatatgtatcccctagtattggatcatgaagagctcttcatgcattctttgcaaaggaggttataaagttacgccctcagaacatttataactataagaatgtgccagttaaagtgctcaacaggaaatatgacagtttaaaagcattgtaaaactcacatagcttacttctctctctaaagtgcaacaaggatgaatagaatgggccaaggtatgacaattaatggttctgcatgacctagccactgctgggggttttcttctataacgttgtccttgtgaaaacttttgtgaaattaaaaaaaaaggagttacaaattttaaaaaaaaaaaaaaaaaa

SEQ ID NO: 1683 - DNA, 2240 bp, Homo Sapiens
  NM_002250
gtccttcggtgtctgggtgtggtgagtagaggtgtgtgtcacaaagtacagaccattgtgtgtgacaaagcccatcgtgtgtctgtgtgtgtctttatccacgtggatggacgtctctttcttgctctgccccaagacacaccctagcccctccttattctcaaaagggggagctggggagcctccccctaccctggggcctcccctgcccctccccgccctgcctggccgtcaccactccccagagggcacagggctctgctgtgcctcagagcaaaagtcccagagccagcagagcaggctgacgacctgcaagccacagtggctgccctgtgcgtgctgcgaggtgggggaccctgggcaggaagctggctgagccccaagaccccgggggccatgggcggggatctggtgcttggcctgggggccttgagacgccgaaagcgcttgctggagcaggagaagtctctggccggctgggcactggtgctggcaggaactggcattggactcatggtgctgcatgcagagatgctgtggttcggggggtgctcgtgggcgctctacctgttcctggttaaatgcacgatcagcatttccaccttcttactcctctgcctcatcgtggcctttcatgccaaagaggtccagctgttcatgaccgacaacgggctgcgggactggcgcgtggcgctgaccgggcggcaggcggcgcagatcgtgctggagctggtggtgtgtgggctgcacccggcgcccgtgcggggcccgccgtgcgtgcaggatttaggggcgccgctgacctccccgcagccctggccgggattcctgggccaaggggaagcgctgctgtccctggccatgctgctgcgtctctacctggtgccccgcgccgtgctcctgcgcagcggcgtcctgctcaacgcttcctaccgcagcatcggcgctctcaatcaagtccgcttccgccactggttcgtggccaagctttacatgaacacgcaccctggccgcctgctgctcggcctcacgcttggcctctggctgaccaccgcctgggtgctgtccgtggccgagaggcaggctgttaatgccactgggcacctttcagacacactttggctgatccccatcacattcctgaccatcggctatggtgacgtggtgccgggcaccatgtggggcaagatcgtctgcctgtgcactggagtcatgggtgtctgctgcacagccctgctggtggccgtggtggcccggaagctggagtttaacaaggcagagaagcacgtgcacaacttcatgatggatatccagtataccaaagagatgaaggagtccgctgcccgagtgctacaagaagcctggatgttctacaaacatactcgcaggaaggagtctcatgctgcccgcaggcatcagcgcaagctgctggccgccatcaacgcgttccgccaggtgcggctgaaacaccggaagctccgggaacaagtgaactccatggtggacatctccaagatgcacatgatcctgtatgacctgcagcagaatctgagcagctcacaccgggccctggagaaacagattgacacgctggcggggaagctggatgccctgactgagctgcttagcactgccctggggccgaggcagcttccagaacccagccagcagtccaagtagctggacccacgaggaggaaccaggctactttccccagtactgaggtggtggacatcgtctctgccactcctgacccagccctgaacaaagcacctcaagtgcaaggaccaaagggggccctggcttggagtgggttggcttgctgatggctgctggaggggacgctggctaaagtgggtaggccttggcccacctgaggccccaggtgggaacatggtcacccccactctgcataccctcatcaaaaacactctcactatgctgctatggacgacctccagctctcagttacaagtgcaggcgactggaggcaggactcctgggtccctgggaaagagggtactaggggcccggatccaggattctgggaggcttcagttaccgctggccgagctgaagaactgggtatgaggctggggcggggctggaggtggcgccccctggtgggacaacaaagaggacaccatttttccagagctgcagagagcacctggtggggaggaagaagtgtaactcaccagcctctgctcttatctttgtaataaatgttaaagccagaa

SEQ ID NO: 1684 - DNA, 5431 bp, Homo Sapiens
  NM_002254
agtcgggaggcttagctggggccgcagcgcggcggcaacatcactctcgctgccgctgctccgccccatccccttctgtttttctctctcattctccagtggcggcggcggggaaggcggaggcagaggcagcagcagccgcgctggctgcaatgaatgatcccccagcttggggggaggactccaggtgagcctctgccctcgggaggcccgggacccccggccgcccacgaccggcagcccacgctatggatccctagaggaaggaggagaagacagctcgccgcccacccccatcccattttcctcttcctttatctcattgttgccgaagctgtttacggcagcgctccctctgctccagcatggggcgggctccgggcacggctgctcggcaggcgctgctcccgcggcgactgggggattctgcctaattcacctcccagccggtgcagagaggaccggagagcggtggaggcccggactgcagcagcgttggggccacctcccagcgtccccaccctaggaggctgcatgcggattgaagagctgcgcctgggggctgggccggccccgctgatcccgacctagcgagcaggatagcaggaccgcccaggctgcggaggggctcgggggcaggaaggtcagagcagcaagatggccagtaagaccaaggccagcgaggccctcaaggtggtggcccggtgccgccccctcagcaggaaggaggaggctgctggtcacgagcagatcctgaccatggacgtgaaactgggccaggtgaccctgcggaacccccgcgccgccccgggggagctgcccaagaccttcacctttgacgccgtgtatgatgccagctccaagcaggccgacctgtatgacgaaaccgtgaggcccctgatagactccgtgctccagggtttcaatggcacggtgtttgcctatggccagacgggcactggcaagacctataccatgcaggggacctgggtggagcccgagctgcgcggggtcatcccgaatgcctttgagcacatcttcacccacatctcccgctcccagaaccaacagtacctggtccgggcctcctatttggagatctaccaggaagagattcgagacctgctctccaaggagccgggcaagaggctagagctgaaagagaaccccgagactggcgtctacatcaaggacctctcctccttcgtcaccaagaatgtcaaggagattgagcatgtgatgaacctggggaaccagacccgggctgtgggcagcacccacatgaatgaggtcagctcccgctcccatgccatcttcatcatcactgtggagtgcagcgaacgtggctctgatggccaggaccacatccgagtgggcaagctcaacctcgtggacctggctggcagcgagaggcagaacaaggcaggccccaacacagcgggaggggcagccacaccatcctcgggtggcggtggtggcggtggaggcagtggtggtggtgctggtggagagaggcctaaggaagcctccaaaatcaacctctcattatctgccctgggcaacgtgattgctgccctggcgggcaacaggagcacccacattccctaccgggactccaagctgacccggctgctccaggactccctgggggggaatgccaagaccatcatggtagccacactggggccagcttctcacagctacgatgagagcctctccaccttgcgctttgccaaccgagccaagaacatcaagaacaagccccgggtgaacgaggaccccaaggacacactgctgcgggaattccaagaggagattgcccgcctgaaggcccagctggagaagagggggatgctggggaagcggccccggaggaagagcagccgcaggaagaaggccgtgtccgccccgcctgggtaccctgagggcccagtgattgaggcctgggtggcagaagaggaggatgacaacaacaacaaccaccgcccgccccagcccatcctggagtcagccttggagaagaacatggagaattacctgcaggaacagaaggagcggctggaggaggagaaggcagccatccaggatgaccgcagcctggtgagcgaggagaagcagaagctgctggaggagaaggagaagatgctggaggacctgcggcgggaacagcaggccacagagctgcttgcggccaagtacaaggccatggagagcaagctcctcatcgggggcaggaacatcatggatcacaccaacgaacagcagaagatgttggaactgaagaggcaggagattgccgagcagaaacgtcgtgagcgggagatgcagcaggagatgatgctccgggacgaggagactatggagctccggggcacctacacatccctgcagcaggaggtggaggtcaaaaccaagaaactcaagaagctctacgccaagctgcaggcggtgaaggcggagatccaggaccagcatgatgagtatatccgcgtgcggcaggacctggaggaggcgcagaacgagcagacccgcgaactcaagctcaagtacctaatcatcgagaacttcatcccgccggaggagaagaacaagatcatgaaccggcttttcctggactgtgaggaggagcagtggaagttccagccactggtgccagccggcgtcagtagcagccagatgaagaagcggccaacatctgcagtgggctacaagaggcctatcagccagtatgctcgggttgccatggcaatggggtcccaccccaggtacagggctgaaaacataatgtttctggagttggatgtgtcccctccagctgtctttgagatggaattctctcacgaccaagaacaagaccctcgtgcgctacacatggagaggctcatgcgattggacagctttctggaaagaccttccacgtctaaagtccgaaagtccagatcctggtgccagagtcctcagcggcctccaccttccaccacacatgcctccctggcctctgcttctctgcgccctgcaacagtggcggaccatgagtgacaaccatcacgtcaggctgcccatccaatagactcctgggatggggcagccaaccctggctcatctcatctgccgcttggtgcgtgtgcgtgtgcgtgcatgtgcgtgtgcgtgtgtgcaggggtgagaatctggcagatggtgcctctgcctgctcttcttcgcctcctttatttaattcatgttatttattcgcggagctctgttcgtgttggggagatgccctcgcctgagccgtctgggcctaccgtggtcactgcgtagcctctttttcttctgacttgagagctcccccagtcagatctcaggcttgtccccctgtcagctgcctccagaagggaaggtagccagtgcctgagaagacagtcccttttctacccaccgcactccataacctccatcttctcccacactgatggcgagcagcccctgagcactttctgggactgggagactgcttggtgttccctgaggacaagagacatcctgacagtgttgggcatctgctccccgtggacacagccccactctccactttctgagcctcagacaacctcattcagcctcttgggctccttttcaaggacattaataacctcaccaacatagctcatgcccttcagctttgacaagaactcacagcttcccaaactctgctttctgcccaccttggatgggaactgtggaccaagcaattaccatcgccttggaacctgcaggaaatggaacagcaattgagacaacttgaacagtcatcaacggaagtccctccactggattcctttgtttctgtcccctccgaggagtcattttggtcgacaggctctcaaggcaactccccattttcaagaggctgctcctgcctgcttcgatcatttctccctgcagctgcctagaccccgttcacagtgggaggagtcaatgtcattctacccctcgctaaacgaagatattaacatctattgctttttcccttcatctgtcacaggaaacagaagcccaggcacaatcttttccagctttgcctgttacccctgtttctgaattgcatctttaaggtattattttgttgacaatagatcctttattcactagttacgcaaattggttcctagggggatactccttaccttcctttgtgatggcccaaaatgtctctaggtatctcaagtgataagtaaatttctacaaaaaaaaatggttaatgttcattgactggctttttaagtgtatattttggaggacgggtgaagaggtcataacgaaagcaagcgagtgaattaggatttcaaagtgccctaatagtgtgagtctccagttcctagaatatgaagagtgctgtcgttggggtgaaaccatgagactgacagatctgcctgaaatggggggtgtgggaggtggtggcgggggttattctctttccttcaggaaatgaacccttcttacatcattcaagttctgctctgaggatcaagcttgggtctgatttaactcagcgacactgtcatttctgcttcattactggactagagggttgagccacccacttgccatttgctcctgtccttccaggaaatcacaattttcatcagagcccaagagattatttgagactcaggattcagatcagaggttcgactgtggctgggacaggagttgtgtgtagaaattcaccaggtggcctgagcgcagggggacctccagggctgcgttgagcagcctctcccactgacctctttctcgtttgtggacaaagcagcacgtatcacctcattcatcacttggacacatcgcctttgcattgtcttgtcacacctccctcacagtcttatagcacaatatacccaaatcagcccccccagtccgagggctgggcccaaggtatggtcggaggaggagctcctgcctgcggttttgtgtatgtgtgtatgtgtgtgcgtgtttgtgtgcgtgtttacctccacaggggacactctacactcagtgtaagatctgctgggaacagggccaccaggagtggctggatctcagtctctctgtctctctttctctccttttccttttggtgtatcaaatatttgattgacaaagtaagggccttgattaggaccaaattctcgtgtgttgctatggtctttatttaggacaacaattaacaatgcagtggcccattcttgtcactctacacatatgactatacgggacatatgtaatatataaatatatatataaaacattcccctctgtccccttggcttcggatggaggcctttctgttgagctgaaatgcacctgcagctgggtgctgccagcagcttgcaggccccagccctgttccaatcaatgcagttgacaataaaggaatgagtatcgtcacggagttgactgcctt

SEQ ID NO: 1685 - DNA, 740 bp, Homo Sapiens
  NM_002258
gcctcacagaattgagagtttgttcttacacacaagtttaatgccaccttcctctgtctgccatggaccaacaagcaatatatgctgagttaaacttacccacagactcaggcccagaaagttcttcaccttcatctcttcctcgggatgtctgtcagggttcaccttggcatcaatttgccctgaaacttagctgtgctgggattattctccttgtcttggttgttactgggttgagtgtttcagtgacatccttaatacagaaatcatcaatagaaaaatgcagtgtggacattcaacagagcaggaataaaacaacagagagaccgggtctcttaaactgcccaatatattggcagcaactccgagagaaatgcttgttattttctcacactgtcaacccttggaataacagtctagctgattgttccaccaaagaatccagcctgctgcttattcgagataaggatgaattgatacacacacagaacctgatacgtgacaaagcaattctgttttggattggattaaatttttcattatcagaaaagaactggaagtggataaacggctcttttttaaattctaatgacttagaaattagaggtgatgctaaagaaaacagctgtatttccatctcacagacatctgtgtattctgagtactgtagtacagaaatcagatggatctgccaaaaagaactaacacctgtgagaaataaagtgtatcctgactcttga

SEQ ID NO: 1686 - DNA, 1223 bp, Homo Sapiens
  NM_002260
tgcagagatgaataaacaaagaggaaccttctcagaagtgagtctggcccaggacccaaagcggcagcaaaggaaacctaaaggcaataaaagctccatttcaggaaccgaacaggaaatattccaagtagaattaaatcttcaaaatccttccctgaatcatcaagggattgataaaatatatgactgccaaggtttactgccacctccagagaagctcactgccgaggtcctaggaatcatttgcattgtcctgatggccactgtgttaaaaacaatagttcttattcctttcctggagcagaacaatttttccccgaatacaagaacgcagaaagcacgtcattgtggccattgtcctgaggagtggattacatattccaacagttgttattacattggtaaggaaagaagaacttgggaagagagtttgctggcctgtacttcgaagaactccagtctgctttctatagataatgaagaagaaatgaaatttctggccagcattttaccttcctcatggattggtgtgtttcgtaacagcagtcatcatccatgggtgacaataaatggtttggctttcaaacataagataaaagactcagataatgctgaacttaactgtgcagtgctacaagtaaatcgacttaaatcagcccagtgtggatcttcaatgatatatcattgtaagcataagctttagaagtaaagcatttgcgtttgcagtgcatcagatacattttatatttcttaaaatagaaatattatgattgcataaatctgaaaatgaattatgttatttgctctgatacaaaaattctaaatcaattattgaaataggatgcacacaattactaaagtacagacatcctagcatttgtgtcgggctcattttgctcaacatggtatttgtggttttcagcctttctaaaagttgcatgttatgtgagtcagcttataggaagtaccaagaacagtcaaacccatggagacagaaagtagaatagtggttgccaatgtctcagggaggttgaaataggagatgaccactaattgatagaacgtttctttgtgtcgtgatgaaaactttctaaatttcagtagtggtgatggttgtaactctgcgaatatactaaacatcattgatttttaatcattttaagtgcatgaaatgtatgctttgtacatgacacttcaataaagctatccagaaaaaaaaaaaa

SEQ ID NO: 1687 - DNA, 1042 bp, Homo Sapiens
  NM_002261
gcagttatcatagagcacagtccctcacatcacacagctgcagagatgagtaaacaaagaggaaccttctcagaagtgagtctggcccaggacccaaagtggcagcaaaggaaacctaaaggcaataaaagctccatttcaggaaccgaacaggaaatattccaagtagaattaaaccttcaaaatgcttctctgaatcatcaagggattgataaaatatatgactgccaaggtttactgccacctccagaaaagctcactgccgaggtcctaggaatcatttgcattgtcctgatggccactgtgttaaaaacaatagttcttattcctttcctggagcagaacaattcttccccgaatgcaagaacccagaaagcacgtcattgtggccattgtcctgaggagtggattacatattccaacagttgttattacattggtaaggaaagaagaacttgggaagagagtttgcaggcctgtgcttcaaagaactcttctagtctgctttgtatagataatgaagaagaaatgaaatttctggccagcattttaccttcctcatggattggtgtgtttcgtaacagcagtcatcatccatgggtgacaataaatggtttggctttcaaacatgagataaaagactcagatcatgctgaacgtaactgtgcaatgctacatgtacgtggacttatatcagaccagtgtggatcttcaagaatcattagacggggtttcatcatgttgaccaggctggtcttgaactcctgagctcaagaaatcaacacatcttggcctcccaagttgctgggattactgacacaagccaccgcccctgagtgctcatgtaccatttagcttgtgttttaaaaatctactttttctgccctccctatttttaactagatgatgttttaaaaattacttttccctctctatatagtttgatttaagcattagtcatttacaacaaatattaatattaaaatgcagaccgttatgattggaaaataaatcaatgaacaataaaaaaaaaaaaaaaaaa

SEQ ID NO: 1688 - DNA, 3258 bp, Homo Sapiens
  NM_002262
ctgtattgtggttcctggaacacttcagaggcttgtgattctactgcttcttattcacactataatacatgtctcaccaatagatgattcaagaacatcatttaaatacacaatttttcattctctatttttgctaaatttcttcatactcaactttcagattctttaatctccagctcagcttcaacaattcaacgctgttctttctgaaaaagtacacatcgtgccttctctacttcgctcttggaacataatttctcatggcagtgtttaagaccactctgtggaggttaatttctgggaccttagggataatatgcctttcgttgatggctacgttgggaattttgttgaaaaattcttttactaaactgagtattgagccagcatttactccaggacccaacatagaactccagaaagactctgactgctgttcttgccaagaaaaatgggttgggtaccggtgcaactgttacttcatttccagtgaacagaaaacttggaacgaaagtcggcatctctgtgcttctcagaaatccagcctgcttcagcttcaaaacacagatgaactggattttatgagctccagtcaacaattttactggattggactctcttacagtgaggagcacaccgcctggttgtgggagaatggctctgcactctcccagtatctatttccatcatttgaaacttttaatacaaagaactgcatagcgtataatccaaatggaaatgctttagatgaatcctgtgaagataaaaatcgttatatctgtaagcaacagctcatttaaatgtttcttggggcagagaaggtggagagtaaagacccaacattactaacaatgatacagttgcatgttatattattactaattgtctacttctggagtctataaaatgtttttaaacagtgtcatatacaattgtcatgtatgtgaaacaatgtgttttaaaattgatgaaattcgttcacctacatttgagaattataaaattaacataaagaattttgtattttcatttaatgtatatatttaatgttaaattcaatgtagttttattacacatttatgtaattttatttacattcttgctaattctcagcagaaatttaaataagatttaattcacatcaaataaaatttagaaaataaaatttaactcacactgcccaggctggagcatagtggcaagatcatagctcattgcaagctcaagtgatcctcctgactcagcctcccaagtagctaggactgcaggcaccatgtcactatgcccgactaatttttaatttttaattttttgtcaagacaaggtcttgctatgttgcccaggctggtcttgaactcctggcctcaagggattctcccaccttggattcccaaagtgctgggattataggtgtgaaccaccatccctggccctcttcacattcttgtatgaagattgatttgggaaaaatgcatttcaggtaactgacaaaagatataggatgaaaaataatatctttcaaatgtttaatttgaactaagagagcttatgcattgcactttctggagatttgtaatgttttggttttgttgtccatgtgactacaaaataatatattttttaattaaaaaatttaaaataatacaggcaagcatgtaatgattatcaatatttttttccaccaactatcctatacccctgacctcctttcattaggcattatcttctgttttgattttaacacttagagtggttttctctgttatgaatcaaagctgatctattttcatcatttttgtgatgaaaaaattaattttgattgacttaggatggaaggatttggactgggtgtggtggtttatgcctgtaatcgcagcactttgggaggccaaggcgggtggatcacttgaggtcaggagtttgagaccagcctggccaacatggtgaaaccctgtctctactaaaaatacaaaaattggctgggtgtggtagtgcacacctgtaatcccagctatttgggaggctgagtcgagaggatcgcttgaacctaggaggtggaggttgcagtgagtcgagattgcaccactgcactccagcctgggtgacagagccagactcctctccaaaaaaaaaaaaaaaaaaaaaagatgaaaggatttggaaccttaattgcatctgaaaaactgcctcacctttgttatttagtgtactccaaccacggagtaacatcccatcataatcccaaatcctactcaaacaaaaggggaagggattatgcaggtgtacactaggccactggtgtaccaattagaaaccactttagagttatgcctactgtacccacataatcctaaaaatatgttacaactgctacttcatagtttatgccacttattttattttttacttttattatttttttttctgagacacggtttcattcccattgcccaggctgtagtgcaatgatgcaatcatggttcactgcagcttcaacttcccaggctcaagggatcctcccacctcagccttctgagtacttgggactcaggtgcgagccatcatgctcagctaattttttgtatcatttgtagaaatggggttttgtattgttgcccaggctgatcttgaactcctggggtcaaggattctgcccgccttggcctcctaaagggctggaattacaggcataagccactgtgcccggccagtttatataatttaaacactgccttttggttccttgattcccatatgctaggacaagtaattattattttattttattttactttaagttctgggttacatgtgcagaacctgcaggtttgttacataggtatacatgttccaaggtggtttgctgcacctattgacccatcatctaggttttaagtcccacatgcattaggtatttgtcctaatgctcttcctccccttgccccccaccccccgacaggccttggtctgtgatgttcacctccctgtgtccatgtgttctcattgttcaactcccacttattagtaagaacatgtggtgtttggttttctgttcctgtgttagtttgctgagaatgatggtttccagcttcatccatgtcgctgcaaaggacatgaactcattctttttatggctgcatagtattccatggtgtatatgtgccatattttctttatccagtctatcactgatgggcatttgggttggttccaagtctttgctatggtaaatagtgctgcaataaacatacgtgtgca

SEQ ID NO: 1689 - DNA, 2721 bp, Homo Sapiens
  NM_002263
gcggcgacgtccacgcattttctgacgtagcgagcgacggcggggagccgagcggaagtccagcactattgccgctagaggaggggaggggtgagaagcataagtggcaccggaagtggaattaatccgcctacctctcctgcgcctgcgaaacagaaaagacaaggcgcctgtcgggcggggtgtggcttcgggtggcggagaacgctgcgattggccctcggctgtggcgacagcgacgattggtccctgcgtgcagagcgcggtgagagtgggtggtggccgttggaattcaaaagtggcgggtgtggcgcggggctggtagcggccggagccgtgcgagttctctaccctgcttcgcgagcgggcgagagaacgcgagtcccaggatccccggcacccagttctcttccactgcattcccccggcgcgtgtgggaccgaggtggacatggatccgcagaggtcccccctattggaagtaaaggggaacatagaactgaagagacctctgattaaggccccttcccagctgcctctctcaggaagcagactcaagaggaggcctgaccagatggaagatggcctggagcctgagaagaaacggacaagaggcctgggtgcaacgaccaaaattaccacatcccacccaagagttccatccctcactacagtgccacagacacaaggccagaccacagctcaaaaagtttccaagaagacaggaccccggtgttccacagctattgccacagggttgaagaaccagaagccagttcctgctgttcctgtccagaagtctggcacatcaggtgttcctcccatggcaggagggaagaaacccagcaaacgtccagcctgggacttaaagggtcagttatgtgacctaaatgcagaactaaaacggtgccgtgagaggactcaaacgttggaccaagagaaccagcagcttcaggaccagctcagagatgcccagcagcaggtcaaggccctggggacagagcgcacaacactggaggggcatttagccaaggtacaggcccaggctgagcagggccaacaggagctgaagaacttgcgtgcttgtgtcctggagctggaagagcggctgagcacgcaggagggcttggtgcaagagcttcagaaaaaacaggtggaattgcaggaagaacggaggggactgatgtcccaactagaggagaaggagaggaggctgcagacatcagaagcagccctgtcaagcagccaagcagaggtggcatctctgcggcaggagactgtggcccaggcagccttactgactgagcgggaagaacgtcttcatgggctagaaatggagcgccggcgactgcacaaccagctgcaggaactcaagggcaacatccgtgtattctgccgggtccgccctgtcctgccgggggagcccactccaccccctggcctcctcctgtttccctctggccctggtgggccctctgatcctccaacccgccttagcctctcccggtctgacgagcggcgtgggaccctgagtggggcaccagctcccccaactcgccatgatttttcctttgaccgggtattcccaccaggaagtggacaggatgaagtgtttgaagagattgccatgcttgtccagtcagccctggatggctatccagtatgcatctttgcctatggccagacaggcagtggcaagaccttcacaatggagggtgggcctgggggagacccccagttggaggggctgatccctcgggccctgcggcacctcttctctgtggctcaggagctgagtggtcagggctggacctacagctttgtagcaagctacgtagagatctacaatgagactgtccgggacctgctggccactggaacccggaagggtcaagggggcgagtgtgagattcgccgtgcagggccagggagtgaggagctcactgtcaccaatgctcgatatgtccctgtctcctgtgagaaagaagtggacgccctgcttcatctggcccgccagaatcgggctgtggcccgcacagcccagaatgaacggtcatcacgcagccacagtgtattccagctacagatttctggggagcactccagccgaggcctgcagtgtggggcccccctcagtcttgtggacctggccgggagtgagcgacttgaccccggcttagccctcggccccggggagcgggaacgccttcgggaaacacaggccattaacagcagcctgtccacgctggggctggttatcatggccctgagcaacaaggagtcccacgtgccttaccggaacagcaaactgacctacctgctgcagaactctctgggtggtagtgctaagatgctcatgtttgtgaacatttctccactggaagagaacgtctccgagtccctcaactctctacgctttgcctccaaggtgaaccagtgtgttattggtactgctcaggccaacaggaagtgaagacggatccagatctgtgtgtgtgtgtgtgtgtgtgtgtgtgtgtgtgtgtgtgtgtgtgtgtccctatgtctatgtatcgggtgaggggtgggagggttgctggagggtgctttattgggtggagggcaccatgtcccagggctatcaaataaagaatagtttggttttttttttaaataaaggttttattagcatttgcccaagaaggcagatactttcatatctgtaaaaaaaaaaaaaaaaaaa

SEQ ID NO: 1690 - DNA, 3816 bp, Homo Sapiens
  NM_002268
gcagcgccggggccctcagatcgaggctgcctccccctctcagccggcagcacattccgtcgccttgccgccgcccggccccacagttgtctttgccggagctgcagtcgcgctggggttagggcgggggggcgggcggggagaggagaaggccgcggcggaggcaggtgagaggaggaaggaagcggcggcgcggcgggcacagcagctcaggcggcggcccggttcctgggagtgtcggtgcggcgcgttggttggggcggatcccgcggggcccgggcgggggaaggagtcaccggcccggccatggcggacaacgagaaactggacaaccaacggctcaagaatttcaagaacaaaggccgcgacttggagactatgagaagacaacgaaatgaagttgtagttgaattaaggaagaataaaagagatgaacatctcttaaagagaaggaatgtaccacatgaagatatctgtgaagactctgatatagatggtgattatagagtgcaaaatacctctctagaagctattgttcaaaatgcttcaagtgataaccaaggaattcaattaagtgcagttcaagctgctaggaagcttttgtccagtgatcgaaatccaccaattgatgacttaataaaatctggaatattgcccattttagtccattgtcttgaaagagatgacaatccttctttacagtttgaagctgcatgggctttgacaaacattgcatctggaacttctgaacaaactcaagcagtagttcagtccaatgctgtgccacttttcctgaggcttctccattcaccccatcagaatgtctgtgagcaagcagtgtgggcattgggaaatatcataggtgatgggccccagtgtagagattatgtcataagtcttggagttgtgaaacctttactttccttcataagtccatctattcctataacattcttaagaaatgttacttgggttatggtcaacttatgtcgccacaaagacccaccaccaccaatggaaaccattcaggagattcttccagccctttgtgttttaattcatcacacagatgtaaatatactggtagacacagtctgggccctctcttaccttactgatgctggcaatgaacaaatacagatggtaatagactctggaatagttcctcatttggttcctctgctcagccaccaggaagttaaagttcagactgctgcacttagagctgtgggcaacattgttactggaactgatgagcaaacacaagtagttttgaactgtgatgctctttcacacttcccagcactcctgacacatcccaaagagaaaattaataaagaagcagtgtggttcctctccaacatcactgcaggaaatcagcagcaggtacaggcagtaattgatgccaatcttgtaccaatgataatacaccttttggataagggggattttggcactcaaaaagaagctgcttgggccataagtaacttaacaattagtggaaggaaagatcaagtggcttaccttatccaacaaaatgttatcccacctttttgcaacttgctgactgtaaaagatgcacaagttgtgcaagtagtactcgatggactaagtaatatattaaaaatggctgaagatgaggcagaaaccataggcaatcttatagaagaatgtggagggctggagaaaattgaacaacttcaaaatcatgaaaatgaagacatctacaaattggcctatgagatcattgatcagttcttctcttcagatgatattgatgaagaccctagccttgttccagaggcaattcaaggcggaacatttggtttcaattcatctgccaatgtaccaacagaagggttccagttttagaaagatgttgtggaagttaggtacaatgcagcactgagatatatatatatatatgtgtgtgtgtatatatatatatatatacatatatataaaaaggtttgatccatcaagcttggctcatgggatctgctgctgcattaaatcgggaaagaaaatgtgaagatttcatttggaatcacagaaaatgcccaaatgaggtcaagatggcgagtgggtgcgagtgagaatgagtggcaaaatgtaatgaaaactttacatgaatgcttatttaggttgttcaaagtaaaaagggctacaggtcacagatcgtcagtgcctgagaaagaacattgacttactctatatcaattgaggggaaagtgcagtaccgtcatcttcaagccttgtaagcataaaagagaataggctgcccatataagtcaaaggaaaatgagcccaggccttgctatgaagcagtgtgtgaatggacaatgttgaatgaatgtctggctcagtgatggagagccaggttcatctttgaaatctagggctcttcactcatgaagcagactcctagtcctggagtgactgtgtacgagagcgtggttgtggtgctgtatgtgaacgcatgcaagcttgattcaccttcagggggctgataacctagtaaatcatcaaaatgagatcataagtgttaatgtacactggacatgaaaacaaagactggtttagcagcagacattggtttactctgcagcctgtgttttctgtttccccctttcccacctccttccccccacccaatccttttttttttcttttttgcttttcttttctttttttttagtttttatttactttacctagtatgcctttttttagttgcttctcaagtcagaaaacttttcaggaaggtttccctgtgcatttgcaccagatgaatgtttgatgctatgaaaagctttccatatcatcaaaactaatttgtgtagatttttgcatgaaaaaaatcataaatttccctcaaaatagactgtgttgcagtacacaagttgccataatagtataaaacagtaaaatgtgcttaaaaggccatccttttcattttcagagataacataaagatctttgcatgaggtaaatctacagcatagttcatttttagattttgttgagtcctgtaaagaagaagaagaaaaaagtttcagttgtggtagaataccgtgctgtgtttaaatgttacttgttttcaaactttgttttctatgaaaatgatatggaaacttctaaaatggaatttggtgcatatgtactgctgaataaagaccgatgaagaggtttgagtagatgtacaaatcaagtaatggtttgaacacctttaataatatgcctaatctgttcaattgttttagaatctttttatcttagatgtaggcagccatgaacaatctattttgagccactttagggagaaaactttgtatttttaaaacttgcataaaagttatgcaagtggtttttataaattggaataatacctcagttttgaggttatgcacactaaattaaatgtgacataaattaatttgtacaaaaagaactctttataaggtggctcattgtaggaaatcctgtgccttcccctttgagcacaagtgttgcatgaacaacagtttgctataagaaacataccagattagccaccattagcatctatatctactttgtgtttaaaaatcaactggtaattctgaaacactgtagaatggataaaaattattttgtgatcataactctttgttgaactagagtatttttgcagcattccttgtcatcagaaacatggttaaagtttaaaactagaagcagcagaaaactagcttgtaaaatttatccaagtagagtgcaggctaggctgtcttggggaaataaacattaaaacttaaagcaaaaaaaaaaaaaaaa

SEQ ID NO: 1691 - DNA, 6019 bp, Homo Sapiens
  NM_002271
gacctcccacaactggagcagccgggaacagctctgaccacagtggttccggggagaagcctttccaggacccatgtgtaggcacaactgttttccctgatcaggatacttgcggcactcaacagaggaaagaaattcctaagggaacactgctcagaaagtactgcagcatgtcttcaaatgcctgaggatcaagttggaaaactagaagcaacagaaaacacaataagcgcaatggcggcggccgcggcggagcagcaacagttctacctgctcctgggaaacctgctcagccccgacaatgtggtccggaaacaggcagaggaaacctatgagaatatcccaggccagtcaaagatcacattcctcttacaagccatcagaaatacaacagctgctgaagaggctagacaaatggccgccgttctcctaagacgtctcttgtcctctgcatttgatgaagtctatccagcacttccctctgatgttcagactgccatcaagagtgagctactcatgattattcagatggaaacacaatctagcatgaggaaaaaagtttgtgatattgcggcagaactggccaggaatttaatagatgaggatggcaataaccagtggcccgaaggtttgaagttcctttttgattcagtcagctctcaaaatgtgggactgcgggaagctgcccttcacattttctggaactttcctggaatttttgggaaccagcaacaacactatttagatgtcatcaaacgaatgttagttcagtgtatgcaagatcaggaacacccgtcgatcaggacgttatctgctagagctacagctgcatttatacttgcaaatgagcataatgttgctctgttcaaacattttgcagacttgctaccgggattcctacaggcggtaaatgactcgtgctaccagaatgatgattctgtcctaaaatccctcgttgagattgcagatactgttccaaagtatttgcgtcctcacttggaagcaactctacagctaagtctaaagttgtgtggagacactagcctcaacaatatgcaacgccagcttgcccttgaagtgatcgtcaccctctctgagactgcagctgctatgttaagaaaacataccaatattgttgcacagactattcctcagatgttagcaatgatggttgatttggaagaagatgaggactgggcaaatgcagatgaactagaagatgatgattttgacagcaatgcagttgcaggcgagagtgctctagatcgaatggcttgcggacttggtggaaagctcgttctgccgatgatcaaggaacacattatgcaaatgcttcaaaatcctgactggaaataccggcatgcaggattgatggccttatctgccattggtgaagggtgccaccagcaaatggaaggaattctaaatgagatcgtaaattttgttttactttttctccaggatcctcatccaagagtaaggtatgcagcctgtaatgccgtgggacagatggctacagattttgcacctggtttccaaaagaaatttcatgagaaggtgattgcagctctgctgcagaccatggaagaccaaggcaatcaacgtgtgcaggcccatgcagctgctgccctcattaactttactgaagactgtcccaagtcactacttattccatacttggataatttggtgaaacatctgcattccattatggtactgaagcttcaagagctgattcagaaaggcaccaagttagttttggaacaagttgtgacatccattgcatcagttgccgatactgcagaagaaaaatttgtcccctactatgatttatttatgccatcactgaagcacatcgttgagaatgcggttcaaaaagaactgagacttctgagaggaaaaactattgaatgcattagcctcattggtctggctgttgggaaggaaaaattcatgcaggatgcatcagatgtgatgcagcttttgttaaagacccagacagacttcaatgatatggaagatgatgatcctcagatctcttacatgatctcagcatgggccagaatgtgcaaaatccttggaaaagaatttcagcaataccttccagtggttatggggcctttaatgaagacggcttcaattaagcccgaagtagcccttttagatacccaagacatggagaatatgagtgatgatgatggttgggaatttgtgaaccttggagatcagcaaagctttggtattaaaactgcaggactagaagaaaaatcaactgcttgccagatgttggtttgctatgctaaggagttaaaggaaggctttgtggagtacaccgaacaggttgtcaaactgatggtccctttactgaaattttatttccacgatggtgttcgagtggcagcagcggaatccatgcctcttctcctggagtgtgcaagagtccgtggtcctgagtatctcacacagatgtggcattttatgtgtgatgctctaattaaggccattggtacagaaccagattcagacgtcctctcagaaataatgcattcttttgcaaagtgcattgaagtaatgggagatggatgccttaataatgaacactttgaagaactgggaggtatattgaaagcaaagcttgaagaacattttaaaaatcaagaattacgacaagttaaaagacaagatgaagactatgatgaacaggtcgaagagtcactacaagatgaggatgataatgatgtttatattctgaccaaagtgtcagatattttacactcaatattcagtagctacaaagaaaaggtgttaccatggtttgaacagctgcttccattaattgtcaacctcatttgtccacatagaccatggccagacagacaatggggattatgcatctttgatgatgtcatagaacactgtagtccagcctcatttaaatacgcagaatatttcttaagaccaatgctccaatatgtatgtgacaacagcccagaagtcaggcaagcagctgcatatggcctgggagtcatggcacagtacggtggagataattatcgccctttttgtacagaagcacttcccctgctggtaagagttattcagtctgcggattctaagaccaaagaaaatgtcaatgctacagagaactgcatctcagcagtagggaaaatcatgaagttcaagcctgactgtgtaaacgttgaagaggtccttccacactggttgtcttggcttccactacatgaagataaagaagaagctgttcagactttcaattatctgtgtgacctgattgaaagtaatcatccaattgttcttggcccaaacaataccaatctgcccaaaatatttagtataattgcggaaggagaaatgcacgaggcaattaaacatgaagatccttgtgccaaacgtctggccaatgtcgttcgccaagtacagacttctggaggactgtggactgagtgcatagcacagctcagtcctgagcagcaggccgccattcaggagctcctgaactctgcgtgaagggccttaatgtcacccaccagaaaactaactccaaataaacgcttaccctttcctttaggtttctttgttttgtttttgagcaaaagagatcggtagtgttgtgtgtaggccattcttctggagagccacaagcaggaagagcagcgctgtgttgcagaatggagtttccatggatttctaccagaccactgaaggagttcctggaagccctgcggtagctagcactgaagactatttttctattggtataacccgcccacctgaaggggaaagggaaatcaaattaatttttctcgttagacataaggaaatttaaggaaaaacagctttaagaacagttactcagcgtagatgtgtgttcacacaaattgctctgcattcagtgttcattgtgaattgggagtgtgagtctttctgtagggtagaaagaagcctcctacccagcaaaccagtagacccaaaagttgaaaaaaactgatgacagacaacaagcatgaagatggcatatttgatgtcactttggttctttttcccagaaggcttatacagtgactcagtcgggaagctttccagcttccagcccttgaatgtgaagtgtcattggcatgtctggcagtagtctctcattcactcctcaataaacaacattgaatacaaaagaggcttgtgtaaaaactcagtactgtctggcttggattcatttcatgtttttaatataagaatgatctaatatttttttaaagtaatagctatcagtaatagctgagtgttttttcccctaatattttccttgtgcaattcagacttaagcatcgagtttttaccatcttccactttaagctaagttatgatacctattccattcacaattggtgttctttttaaggtttgcaaatttcagccaattttgtagctaagattgttctgatcagctcaaaaagatttggcttagtgttttcattgcaaattataattgctgtagagccacacacaacttttgaacttttaattataagtgttatggctaaagttatttactgaaaatttcagtaaaatgtgtgaatgtttctttatgtattaacctcatagcagtaaatgacttgctgttgtttaatttttctaaggcatcttaatagacttctgttgaaaacttcagtgttaacatttttatagtttgtactaaatttaaccgtgatataaaaatgaattttatgcatagatcagaattttaaattaaaggttttttctttaaatgatttgtattactttattaaaactaaatctgaaatggaatagaaaatagaatggattacatacagatggtttccttgttagcagatgcccttcaaatatattttacgtttgcagcacaacaccattgcccggaggcttccgaatctagcaaagcagcatattaaatgactccacctgcgcagtccttgtgttcagtggatgaatacctgtgggctcttgtaatgtgtggtaatatttggagctttatagcctgtattccttgggagaaaaaaatgggaattggagtaaaaagtgtgtcaagacaacccctttctgctttcttatgtagcatctgcaaagccgattcatgtactgatgccaatcagctagagcaatgtaggctttttttaatttaaattattactacactttattactacacttgcagaaaagaaacatgttaaaatcatggcacacctgcagaatttcagatgacagtgtggtcagaagatgttttttgggagaacctagtgtttgctgggcactatgctaagcactttgggagcaagaacctcctaccttccagtttaaacactagtggtattgtcagatgccgttagtatctgagatgtacttacagcagggttctaagagctctgaaagaagcgctctgttagatgcagactggcagcatcctccttgataaaagcagaaaagcaaagaggtaattggagttgaatcaagttaatagggaaggttggtagtaaatgctgttagtgtgacatgattctgaaacccagagctcagaactaactgtgagatgtaccatgaactaacaattctttgaaaggacctgcagaagcatttttaatacctcattctgtctatgcaagatgaaaatccatggagttttttcttggcttttgtaccaaatttaggggtcttgcatgtcagcaagtgatatatattgtttataaatgcaagctatttctggaggggaaaaatgtgtgtggctcttacgttttctgggaattttgtaacaagttacacgcacaagtgttagaaactttggcataactcaatttggagtattttttaaatgctgtatctttaaagaaaagtaaaattgtcttaaatctaattgacacttctgtaatgagaggcaaccttataactctggagttgtagtttgacagaaccatcagtaaagacataagcaaataaatggtcttggtgcaaaaaaaaaaaaaaaaaa

SEQ ID NO: 1692 - DNA, 1995 bp, Homo Sapiens
  NM_002286
acaggggtgaaggcccagagaccagcagaacggcatcccagccacgacggccactttgctctgtctgctctccgccacggccctgctctgttccctgggacacccccgcccccacctcctcaggctgcctgatctgcccagctttccagctttcctctggattccggcctctggtcatccctccccaccctctctccaaggccctctcctggtctcccttcttctagaaccccttcctccacctccctctctgcagaacttctcctttaccccccaccccccaccactgccccctttccttttctgacctccttttggagggctcagcgctgcccagaccataggagagatgtgggaggctcagttcctgggcttgctgtttctgcagccgctttgggtggctccagtgaagcctctccagccaggggctgaggtcccggtggtgtgggcccaggagggggctcctgcccagctcccctgcagccccacaatccccctccaggatctcagccttctgcgaagagcaggggtcacttggcagcatcagccagacagtggcccgcccgctgccgcccccggccatcccctggcccccggccctcacccggcggcgccctcctcctgggggcccaggccccgccgctacacggtgctgagcgtgggtcccggaggcctgcgcagcgggaggctgcccctgcagccccgcgtccagctggatgagcgcggccggcagcgcggggacttctcgctatggctgcgcccagcccggcgcgcggacgccggcgagtaccgcgccgcggtgcacctcagggaccgcgccctctcctgccgcctccgtctgcgcctgggccaggcctcgatgactgccagccccccaggatctctcagagcctccgactgggtcattttgaactgctccttcagccgccctgaccgcccagcctctgtgcattggttccggaaccggggccagggccgagtccctgtccgggagtccccccatcaccacttagcggaaagcttcctcttcctgccccaagtcagccccatggactctgggccctggggctgcatcctcacctacagagatggcttcaacgtctccatcatgtataacctcactgttctgggtctggagcccccaactcccttgacagtgtacgctggagcaggttccagggtggggctgccctgccgcctgcctgctggtgtggggacccggtctttcctcactgccaagtggactcctcctgggggaggccctgacctcctggtgactggagacaatggcgactttacccttcgactagaggatgtgagccaggcccaggctgggacctacacctgccatatccatctgcaggaacagcagctcaatgccactgtcacattggcaatcatcacagtgactcccaaatcctttgggtcacctggatccctggggaagctgctttgtgaggtgactccagtatctggacaagaacgctttgtgtggagctctctggacaccccatcccagaggagtttctcaggaccttggctggaggcacaggaggcccagctcctttcccagccttggcaatgccagctgtaccagggggagaggcttcttggagcagcagtgtacttcacagagctgtctagcccaggtgcccaacgctctgggagagccccaggtgccctcccagcaggccacctcctgctgtttctcatccttggtgtcctttctctgctccttttggtgactggagcctttggctttcacctttggagaagacagtggcgaccaagacgattttctgccttagagcaagggattcaccctccgcaggctcagagcaagatagaggagctggagcaagaaccggagccggagccggagccggaaccggagcccgagcccgagcccgagccggagcagctctgacctggagctgaggcagccagcagatctcagcagcccagtccaaataaactccctgtcagcagcaaaaa

SEQ ID NO: 1693 - DNA, 6603 bp, Homo Sapiens
  NM_002294
aagaaagagccccgcccctagtcttatgactcgcactgaagcgccgattcctggcttttgcaaggctgtggtcggtggtcatcagtgctcttgacccaggtccagcgagccttttccctggtgttgcagctgttgttgtaccgccgccgtcgccgccgtcgccgcctgctctgcggggtcatggtgtgcttccgcctcttcccggttccgggctcagggctcgttctggtctgcctagtcctgggagctgtgcggtcttatgcattggaacttaatttgacagattcagaaaatgccacttgcctttatgcaaaatggcagatgaatttcacagtacgctatgaaactacaaataaaacttataaaactgtaaccatttcagaccatggcactgtgacatataatggaagcatttgtggggatgatcagaatggtcccaaaatagcagtgcagttcggacctggcttttcctggattgcgaattttaccaaggcagcatctacttattcaattgacagcgtctcattttcctacaacactggtgataacacaacatttcctgatgctgaagataaaggaattcttactgttgatgaacttttggccatcagaattccattgaatgacctttttagatgcaatagtttatcaactttggaaaagaatgatgttgtccaacactactgggatgttcttgtacaagcttttgtccaaaatggcacagtgagcacaaatgagttcctgtgtgataaagacaaaacttcaacagtggcacccaccatacacaccactgtgccatctcctactacaacacctactccaaaggaaaaaccagaagctggaacctattcagttaataatggcaatgatacttgtctgctggctaccatggggctgcagctgaacatcactcaggataaggttgcttcagttattaacatcaaccccaatacaactcactccacaggcagctgccgttctcacactgctctacttagactcaatagcagcaccattaagtatctagactttgtctttgctgtgaaaaatgaaaaccgattttatctgaaggaagtgaacatcagcatgtatttggttaatggctccgttttcagcattgcaaataacaatctcagctactgggatgcccccctgggaagttcttatatgtgcaacaaagagcagactgtttcagtgtctggagcatttcagataaatacctttgatctaagggttcagcctttcaatgtgacacaaggaaagtattctacagctcaagactgcagtgcagatgacgacaacttccttgtgcccatagcggtgggagctgccttggcaggagtacttattctagtgttgctggcttattttattggtctcaagcaccatcatgctggatatgagcaattttagaatctgcaacctgattgattatataaaaatacatgcaaataacaagattttcttacctctcagttgttgaaacactttgcttcttaaaattgatatgttgaaactttaattcttttatcaatcccagcattttgagatcagtctttattaataaaacctgttctctttaatcagcttaaaatccaaagtgtcatatttactggtcctggagacaaacttgttcaaaagaacatcaacgtgcaatgttttaaggtctatcttaagaagccctggccaaattttgatcctaaccttgaagtatgccttgaacttattaacatggccattataagaataaaatatgtagttgtgtcttaatggaattaataaatgtcatttcactactggtgttctgtttcaatgtataaggactatagtgatttaaactcatcaatgtgcctttgcataaagttcattaaataaatattgatgtggtataaatgcccatcagatatgcttaaacttggttttcagttgaatgaagtagagaatgtcctcaggaccatcagcattttaaaggttatgtgacttttgctgatttctctgagttcaagttaagcatgaagttagtacctcaagcctgtgatttttccctagggatgatacagacccaagaggctacaacagaacttaaactggcttcgtaattagagtttttaagataattgtttgtttttcagcaatatagactgaaaagatccaagcatatttagccacttgcttttttgtttcttgttttgttcttctttggatgcctgattagtattgaaagatagaaatattctatgaactaattaggacagattgtgttgtgtttctctacctcatcttgttgatctctggagcattaaaatctatttagtgttgtcatcagtgtggtacttatgaaatgtaagctaacagcaatctcagaagggaggcagtgaagcatagcaactaggctcttgtttcttcaagatggcccctgtggggcagtgcatagatgggggtgtaaagagaagctgttggcattaaaatgagctagataatcagcccttgttgaagcatattccatggtataagagtagcacagacatgaaacatagataaagaaggaaggcttaatagactagaagacttccacattgaagtattattaacccattgtatgtatataggggcatgatcagagtctctataacttcctgattaacaatacagtgtatcttgttacccagctgtcagtctttgagagctttcagtaaaatatagtaaattctttcagcataggctaatgtgtggttactgagatgagtgttgtgtactcagaaccgtagcaacatttttatgaatggtaaaagtacaagaggaggaaaagttaaaattagaagaaaagtacaagttattgcttaatcataaatcacaccagataacacattttgttaatttcattagctattactggaaaggaccttaacgattatttacagaaaggggagtgaaattcattgaggttccatatcaagtgggcaacaaaactattactagcattttgataaaaattgcccctaatgaaatctagtcactcaacagtaaaacaacagctggtttacacttgaaattatgagatcagaattgggcactttgggcttccgtactatgttttgcttaagttttttttttaatactaatatgggctttttcagtagtaatataccaaaacacttctattttaatctctgtttgctacttcaaaacctaatcctcctcagatgggatcatgagcataagaggaaaagagaagagaatgaatacttgttgacctcttgatgtgtatcagatgctttagaaatgtaattgtatttaatcctcaaataccttataggtattattatccccttcttacagatgaggaaagtgaggcccagtttaaataacttgcccaaggtcctttggctagtactggaaggagtcaagatttaaacacagttctgtctgaatccagaactcaaaatctacattgcacatgttgctttcctggtggttcggtggaatggactgcaacgcattagatactgctgttattcttccaggccaccgctcagctaaaaataattgtgtgtgtgtgtatatatatatatatgtacacacacacacatatatatacacacacacatatatatacacatatacatatatatacacatatatatacacacacatatatatgtatatatatactacattcttgatcctaagtcttttttaacttaaattttattacttatacagaattcttatttatactttaattataggtgtgacgaagagaaagagagtagggaaatacacaggcagtggttttaagtgtagatgatggctccttaacccagtgtcattagataatcaaacctaaagtcttcccatattaggcaagcgcaattctctattttggacccttcccattcttcccttaccttctgcttttcgtactgaggaatttcgtgtgattttagataaagtgataatgagatattgagcaaataagaaaatagaggtaatgctataaaaaactaagctatgtacactttcaaaatgcatgtttcttgcatgctttttactacttaattgcattctttgctaatttcctttccttgctgtctgttcttttctaacagctgaagaatgttctgctgactctgacctcaactttcttattcctgttgcagtgggtgtggccttgggcttccttataattgttgtctttatctcttatatgattggaagaaggaaaagtcgtactggttatcagtctgtgtaatcagttaaatctagtgtttgtttgtttttttcaattagaagttacgtttccattggctaaaagccaggacatgctgtgcaatagattgtttaagatatgcagactaacttcagtgagttcctagctaacttgggcatgagtacacttatttaagacaaaatatattaggaccaatttttttctgttttttttcttcctttgttaaagtataattaaaagaaaaattgtggcttagaattttttaagtaaataatgattttaagcccctggatccaattatgaaagcatttttgctgatgtgtaattttatatgttacagttacttatattttactactttgatgttatttgcaaaatcaaaggtgttaaagaatttaacttgcttcaggaaataaattcaagaacatagtggattcattttcattggtggcagacacgaaatttggttcatgataagacttcctttccccacctcctgatcagcattatttaaatctgtatttttctgttagttaagaaagaaatggcttcatgatattgtatttaatagcaaaagtttggctgtcttcttcattactgttaatagctactatattttaacaaggagatttctttttttgttgttgttgttctagagtttggaatatactgattatctcagacttgacatttatactgaaggatgaagtaagacctccagctttttttaaaaaaggtgttgatttggaacacctgtatgggttatggtttattaaggttatggtttagaaagtttttttccctcagagccttaacttgttaagaaggttcatttatcctgcactgaaaacaaaaactctatatactttgtttgtgtgcctcctgcactctcccattccctatgtgaatatgctctagttgatatttttaatatattgatttcttttttctcacagcaacaagtgcttactctagaggttagtgggccctgatatgtcatcagtcagatgcctgcctagccaaagctggactaagattattctgtacatttgttgatcttgatatagacttatatccctgtagggactgctaatggctccggcttctggagtaaggtactggagaccactcatccctgtgtctgcttgattggttcagctgttgaattgcccttttatttggaagcagtgttgaagttgtctagggttcaaatggctgctttgtacacctgtcattagtataaggcagatgtttattttatcaagctattttatctctacatttaactaaaaacaaaagttcccaaagatctgccttcacttcagaaattttttttggattaaaaaaattaagcctgaaccttaaataaagtgagttggttattcattccaaggattaagtcccaatctacctctcagcacaatgcagaagctcaccactgtattgctgccattaactcatgccagaaccctttgccaataactggaattacaaatttttgttaaagaaaatttatcaagatctttctttactgccttctctatatgtacatctcaaaaacatgtacatctcaaaaactggagtagaaagttagattgctcaactacaactcctctagaactctatagctctgacatacagattcacactctcctctatttgctaagtatgtaaagaatgttttcttttaaaatgttctcttttgagaacaactgcttatttgttataaaagcatttggttaaaatgatgtcatcataaaaaacagtggctttgtttcaatacatatttttgagatgattatctagaagccagattaataaaatcagcttgtgaccttgctaagcatataaactggaaattcagatacattcaaaattatgggttcatttaaaagtgttctaccttttgggtatgagactaatatcactaattcctcaatagttatcatggctctatcttaattaattagaaaatatgtgtgtttaattctttgagaattaaaatagagaatattaacagagggttaaaaactgcttcaactccaataagataaaggaagctcaaaatctatgagctgagtgttcaattagctttgcctactgagttcaattttatgtcaatacaacagtggatcagacagtacgactttgaactggtgaatgtaaacaattgtttttcacctaagctgctttggaagaactgatgcttgctgctaactaaagttttggatgtatcgatttagagaaccaattaatacctgcaaaataaagcatactgtggtacttctgtttgatctagtatgtgtgattttagattgatggattaaaaattaataaagatcatacattccataccaaaaaaaaaaaaaaaa

SEQ ID NO: 1694 - DNA, 1155 bp, Homo Sapiens
  NM_002295
cgcctgtcttttccgtgctacctgcagaggggtccatacggcgttgttctggattcccgtcgtaacttaaagggaaattttcacaatgtccggagcccttgatgtcctgcaaatgaaggaggaggatgtccttaagttccttgcagcaggaacccacttaggtggcaccaatcttgacttccagatggaacagtacatctataaaaggaaaagtgatggcatctatatcataaatctcaagaggacctgggagaagcttctgctggcagctcgtgcaattgttgccattgaaaaccctgctgatgtcagtgttatatcctccaggaatactggccagagggctgtgctgaagtttgctgctgccactggagccactccaattgctggccgcttcactcctggaaccttcactaaccagatccaggcagccttccgggagccacggcttcttgtggttactgaccccagggctgaccaccagcctctcacggaggcatcttatgttaacctacctaccattgcgctgtgtaacacagattctcctctgcgctatgtggacattgccatcccatgcaacaacaagggagctcactcagtgggtttgatgtggtggatgctggctcgggaagttctgcgcatgcgtggcaccatttcccgtgaacacccatgggaggtcatgcctgatctgtacttctacagagatcctgaagagattgaaaaagaagagcaggctgctgctgagaaggcagtgaccaaggaggaatttcagggtgaatggactgctcccgctcctgagttcactgctactcagcctgaggttgcagactggtctgaaggtgtacaggtgccctctgtgcctattcagcaattccctactgaagactggagcgctcagcctgccacggaagactggtctgcagctcccactgctcaggccactgaatgggtaggagcaaccactgactggtcttaagctgttcttgcataggctcttaagcagcatggaaaaatggttgatggaaaataaacatcagtttctaaaagttgtcttcatttagtttgctttttactccagatcagaatacctgggattgcatatcaaagcataataataaatacatgtctcgacatgagttgtacttctaaaaaaaaaaa

SEQ ID NO: 1695 - DNA, 3808 bp, Homo Sapiens
  NM_002298
caggtgatttttggtggggcggggacatgaaaaaaaagttaaaatgtccttataaagacaaaatctttttctttcctggctgatgatttgtcattctagtcacttcctgccttgtgaccacacacccaggcttgacaaagctgttctgcagatcagaaagaaggggttcctggtcatacaccagtactaccaaggacagcttttttcctgcaagatctgttacctaaagcaataaaaaatggccagaggatcagtgtccgatgaggaaatgatggagctcagagaagcttttgccaaagttgatactgatggcaatggatacatcagcttcaatgagttgaatgacttgttcaaggctgcttgcttgcctttgcctgggtatagagtacgagaaattacagaaaacctgatggctacaggtgatctggaccaagatggaaggatcagctttgatgagtttatcaagattttccatggcctaaaaagcacagatgttgccaagacctttagaaaagcaatcaataagaaggaagggatttgtgcaatcggtggtacttcagagcagtctagcgttggcacccaacactcctattcagaggaagaaaagtatgcctttgtcaactggataaacaaagccctggaaaatgatcctgattgtcggcatgtcatcccaatgaacccaaacacgaatgatctctttaatgctgttggagatggcattgtcctttgtaaaatgatcaacctgtcagtgccagacacaattgatgaaagaacaatcaacaaaaagaagctaacccctttcaccattcaggaaaatctgaacttggctctgaactctgcctcagccatcgggtgccatgtggtcaacataggggctgaggacctgaaggaggggaagccttatctggtcctgggacttctgtggcaagtcatcaagattgggttgtttgctgacattgaactcagcagaaatgaagctctgattgctcttttgagagaaggtgagagcctggaggatttgatgaaactctcccctgaagagctcttgctgaggtgggctaattaccacctggaaaatgcaggctgcaacaaaattggcaacttcagtactgacatcaaggactcaaaagcttattaccacctgcttgagcaggtggctccaaaaggagatgaagaaggtgttcctgctgttgttattgacatgtcaggactgcgggagaaggatgacatccagagggcagaatgcatgctgcagcaggcggagaggctgggctgccggcagtttgtcacagccacagatgttgtccgagggaaccccaagttgaacttggcttttattgccaacctctttaacagataccctgccctgcacaaaccagagaaccaggacattgactggggggctcttgaaggtgagacgagagaagagcggacatttaggaactggatgaactccctgggtgttaaccctcgagtcaatcatttgtacagtgacttatcagatgccctggtcatcttccagctctatgaaaagatcaaagttcctgttgactggaacagagtaaacaaaccgccataccccaaactgggaggcaatatgaagaagcttgagaattgtaactacgcggtagaattggggaagaatcaagcgaagttctccctggttggcatcggtggacaagatctcaatgaaggaaaccgcactctcacactggccttgatttggcagctaatgagaaggtatacactgaatatcctcgaagaaattggtggtggccagaaggtcaatgatgacattattgtcaactgggtgaatgaaacattgagggaagcaaagaaaagttcatccatctctagtttcaaggacccgaagattagtacaagtctgcctgttctggacctcatcgatgccatccaaccaggttccattaactatgaccttctgaagacagaaaatctgaatgatgatgagaaactcaacaatgcaaaatatgccatctctatggcccgaaaaattggagcaagagtgtatgccctgccagaagacctggttgaagtgaaccccaaaatggtcatgaccgtgtttgcctgcctcatggggaaaggaatgaagagggtgtgaggcccaatggggctgggtgggaggcggtgcactcactcctgactgcccggcacagatgctccagggatgattcaagccattccaaagttcaacttggtgacactctataagattccaaaaagcacatattagtgcagccaagtagcctctcctgtatttaacaaaaagtgcttcattctttgcaggaggcccaacctcctatatataggtttctattcttgatttatttgcttcttcgaaaatctagaggaaaagaaagaagttattttccaggtacccttctcgcttttgccattagccaaggatagaagctgcagtggtattaattttgatataatctttcaaaccagcttcatgtggcttcccttttctttgttcaagatgagggccaggaggggaaacatcacacctgccctaaaccctgttcctggaggtcagcatttgatctgttgcaagcccctctttctgtcccctcttcctaccctgcctcccttgactttgctcctcacacttttggaaccatgccttccgggggggcccatctcttctggccgtccttgtctctgggccacttggagtgtgtgataaatcagtcaagctgttgaagtctcaggagtctctggtagcctgcagaagtaagcctcatcatcagagcctttcctcaaaactggagtcccaaatgtcatcaggttttgttttttttcagccactaagaacccctctgcttttaactctagaatttgggcttggaccagatctaacatcttgaatactctgccctctagagccttcagccttaatggaaggttggatccaaggagggtgtaatggagcatcaagccactcggcggcagcatggagctataactaagcatcctttagggttctgcctctccaggcatttagccctcacattagatctagttactgtggtatggctaatacctgtcaacatttggaggcaatcctaccttgcttttgcttctagagcttagcatatctgattgttgtcaggccatattatcaatgtttacttttttggtactataaaagctttctgccacccctaaactccaggggggacaatatgtgccaatcaatagcacccctactcacatacacacacacctagccagctgtcaagggcagaatgaatctatgctggataagaaatggtggaactgcgttatgaagagctaatttactggacaaagaattccaaagcaaaaccagaacagtatgaatttgagcaggtctcataggttgagcaatttccccctaaaccaactgaaggctaaaaagcaacaggccattgtgaaccaatgcaagacgccctctatcatggtgaaaagctccatcaatgaggtatcttctttagtggtggtatgtaatggaacttagccatttttcaaagcaattgaaatgcattgctctggatctgttccttggcagtggactcagaaagccaacatgtggctcctcccagcccataaccagtatttttgctgcttctgaatacaaattggttggttttgacttcagattgaacttactgtagcctcagatgatttcccccctccgcctccaggaagaaagaatgttactgccttaataaaaaatgaaaagagaatgatgctcaaaatctttccaaataaaatgttccctataaaaaaaaaaaaaaaaaaa

SEQ ID NO: 1696 - DNA, 1317 bp, Homo Sapiens
  NM_002300
cccctcctccctccttgcagagccggcgccggaggagacgcacgcagctgactttgtcttctccgcacgactgttacagaggtctccagagccttctctctcctgtgcaaaatggcaactcttaaggaaaaactcattgcaccagttgcggaagaagaggcaacagttccaaacaataagatcactgtagtgggtgttggacaagttggtatggcgtgtgctatcagcattctgggaaagtctctggctgatgaacttgctcttgtggatgttttggaagataagcttaaaggagaaatgatggatctgcagcatgggagcttatttcttcagacacctaaaattgtggcagataaagattattctgtgaccgccaattctaagattgtagtggtaactgcaggagtccgtcagcaagaaggggagagtcggctcaatctggtgcagagaaatgttaatgtcttcaaattcattattcctcagatcgtcaagtacagtcctgattgcatcataattgtggtttccaacccagtggacattcttacgtatgttacctggaaactaagtggattacccaaacaccgcgtgattggaagtggatgtaatctggattctgctagatttcgctaccttatggctgaaaaacttggcattcatcccagcagctgccatggatggattttgggggaacatggcgactcaagtgtggctgtgtggagtggtgtgaatgtggcaggtgtttctctccaggaattgaatccagaaatgggaactgacaatgatagtgaaaattggaaggaagtgcataagatggtggttgaaagtgcctatgaagtcatcaagctaaaaggatataccaactgggctattggattaagtgtggctgatcttattgaatccatgttgaaaaatctatccaggattcatcccgtgtcaacaatggtaaaggggatgtatggcattgagaatgaagtcttcctgagccttccatgtatcctcaatgcccggggattaaccagcgttatcaaccagaagctaaaggatgatgaggttgctcagctcaagaaaagtgcagataccctgtgggacatccagaaggacctaaaagacctgtgactagtgagctctaggctgtagaaatttaaaaactacaatgtgattaactcgagcctttagttttcatccatgtacatggatcacagtttgctttgatcttcttcaatatgtgaatttgggctcacagaatcaaagcctatgcttggtttaatgcttgcaatctgagctcttgaacaaataaaattaactattgtagtgtgc

SEQ ID NO: 1697 - DNA, 586 bp, Homo Sapiens
  NM_002305
agttaaaagggtgggagcgtccgggggcccatctctctcgggtggagtcttctgacagctggtgcgcctgcccgggaacatcctcctggactcaatcatggcttgtggtctggtcgccagcaacctgaatctcaaacctggagagtgccttcgagtgcgaggcgaggtggctcctgacgctaagagcttcgtgctgaacctgggcaaagacagcaacaacctgtgcctgcacttcaaccctcgcttcaacgcccacggcgacgccaacaccatcgtgtgcaacagcaaggacggcggggcctgggggaccgagcagcgggaggctgtctttcccttccagcctggaagtgttgcagaggtgtgcatcaccttcgaccaggccaacctgaccgtcaagctgccagatggatacgaattcaagttccccaaccgcctcaacctggaggccatcaactacatggcagctgacggtgacttcaagatcaaatgtgtggcctttgactgaaatcagccagcccatggcccccaataaaggcagctgcctctgctccctctgaaaaaaaaaaaaaaaaaaaaaaaaaaaaaa

SEQ ID NO: 1698 - DNA, 3714 bp, Homo Sapiens
  NM_002333
gagccgcagccagagccagagccggagccgcagccggaaccggagccggagccgcggggcaggaggcggcgcccgcgggcggccgggcccggcatggagaagcgcgcggccgcggggctggagggcgcgccgggcgcccgggcgcagctggccgtcgtctgtctggtgaacatctttctcaccgggagactcagcagtgcggttcctgccttagcggcctgcagtgggaagctggagcagcacacggagcggcgtggggtcatctacagcccggcctggcccctcaactacccgccaggcaccaactgcagctggtacatccagggcgaccgtggtgacatgattaccatcagcttccgcaactttgacgtggaggagtcccaccagtgctccctggactggctcctgctgggcccagcagccccaccccgccaggaggccttccgcctctgtggctccgccatcccacctgccttcatctctgcccgcgaccatgtctggattttcttccactcagacgcctccagctccggccaggcccagggcttccgtctgtcttacatccgagggaagctgggccaggcatcctgccaggcagatgagttccgctgtgacaacggcaagtgcctgcccggcccgtggcagtgcaacacggtggacgagtgtggagacggctctgatgagggcaactgctcggcgcccgcctccgagcctccaggcagcctgtgccccggggggaccttcccatgcagcggggcgcgctccacgcgctgcctgcctgtggagcggcgctgtgacggcttgcaggactgcggcgacggctcggatgaggcgggctgccccgacctggcgtgcggccggcggctgggcagcttctacggctcctttgcctccccagacctgttcggcgccgctcgcgggccctcagaccttcactgcacgtggctggtggacacacaggactcccggcgggtgctgctgcagctggaactgcggctgggctatgacgactacgtgcaggtatacgagggcctgggcgagcgcggggaccgcctgctgcagacgctgtcctaccgcagcaaccaccggcccgtgagcctggaggccgcccagggccgcctcactgtggcctaccacgcgcgcgcccgcagcgccggccacggcttcaatgccacctaccaggtgaagggctattgcctcccctgggagcagccgtgcgggagcagtagtgacagtgacgggggcagcctgggcgaccagggctgcttctcagagccacagcgctgtgatggctggtggcattgtgccagcggccgagacgagcagggctgccctgcctgcccgcccgaccagtacccctgcgagggtggcagtggtctgtgctacacgcctgccgaccgctgcaacaaccagaaaagctgtcccgacggcgccgacgagaagaactgcttctcctgccagcccggcaccttccactgcggtaccaacctgtgcatcttcgagacgtggcgctgtgacggccaggaagactgccaggacggcagcgatgagcatgggtgcctggccgccgtgccccgcaaggtcatcacggcggcgctcattggcagcctggtgtgtggcctgctgctggtcatcgcgctgggctgcgccttcaagctctactcactgcgcacgcaggaatacagggccttcgagacccagatgacgcgcctggaggctgagttcgtgcggcgggaggcacccccatcctatggtcagctcatcgcccagggcctcattccacccgtggaggactttcctgtctacagtgcgtcccaggcctctgtgctgcagaatcttcgcacagccatgcggagacagatgcgtcggcacgcctcccgccgggggccctcccgccgccgcctcggccgcctctggaaccggctctttcaccggccgcgggcgccccgaggccagatcccactgctgaccgcagcacgcccctcacagaccgtgctgggcgatggcttcctccagcctgctccaggggctgcccccgaccccccagcaccgctcatggacacaggcagcaccagggcggccggagacaggccccccagtgcccccggccgtgcaccggaggtgggaccttcagggccacccttgccctcgggcctgcgagacccagagtgcaggcccgtggacaaggacagaaaggtctgcagggagccactggtagacggcccagctcctgcagatgcacctcgggagccctgctcagcccaggacccgcacccccaggtctccactgccagcagcaccctgggcccccactcgccagagccactgggggtctgcaggaaccccccgcccccctgctccccaatgctggaggccagcgatgatgaggccctgttggtctgttgaccgctgggctcgctggtgaccgccacagccccgctttgtaaccagggaatacacagtcatttctaccctgcctctgcgtcctttcttatggagaggccctccggggaccccagcggaggggctggcccctaagccagctggctgcactggtgggcgggagctgtgggactgaacggcgggggggagaagagtggagtggtgagcccgtctgcagggtcccattgtacacaagcaccctggggtctcacttctctccccccactccattctgggaacccatttccagagaagcaggggaccagagcctttttgcttcatctgccctgcagtggcaacagctgcccctagagctgggagttgtcatgaggatggggccgggccatggggacgctgggtctcatccgtggtgactattttgctcacgcctcaccctcttcctgtccagcaaggcctctggaggacctgggttgggtggctcctgccaaaccctcatgcccctggccaggcaggcgccctttgccctccctgaaggtccaatctcctgggcaccgtggaagggctggggtgtgtgcctgctgtacatgaagcccctggagttccctgcaggcctcaaagcccccaggacatgctgctctgtgctttctggggacagagaggccgaggcaccaacagcagtggccacgtctgttccatcctatctcagggcctcggtttccccacctgtaagccagggtgagactgtgggctctgaagtcctgaccttcactctgtggtgatttacgggaagaaagacaatcccagcctggagcccctgagctctcctgggtggccgagctcagactggcatcgaggggcctggggtaggggcggactgagctgctaccccatcctcgacatccctttagggcagggggactctgggtgccatggtagggagcgcctgtgtcaagcagcaaagccccctaatgtcaagagcctcctccagggcctgccacggcatcttcctggccagcaacatgtgtgcacccaccgaggtacgccccagccactcccatctgtgcccatcagggactccccatagcacgagcgaacagccagccctgtttatttataggccttttcaggaagagctagcagggcagtgctaagacaggaaacccagtccacattttagggcttccttaaacaggcttctgagagtcgtatcttttttcttttttttccagaaaaaaacaaaacaaaacttttttgccaaaacacctcctcaataaacaacatgtaaacagaaacaaaaaaaaaaaaaaaaaa

SEQ ID NO: 1699 - DNA, 1586 bp, Homo Sapiens
  NM_002337
agaccgcgcggtgggtgggggcggggtagtgggcggggcatcggcaggctaggttttctccgcgcagcgccagtcgcagaggaagatggcgccgcggagggtcaggtcgtttctgcgcgggctcccggcgctgctactgctgctgctcttcctcgggccctggcccgctgcgagccacggcggcaagtactcgcgggagaagaaccagcccaagccgtccccgaaacgcgagtccggagaggagttccgcatggagaagttgaaccagctgtgggagaaggcccagcgactgcatcttcctcccgtgaggctggccgagctccacgctgatctgaagatacaggagagggacgaactcgcctggaagaaactaaagcttgacggcttggacgaagatggggagaaggaagcgagactcatacgcaacctcaatgtcatcttggccaagtatggtctggacggaaagaaggacgctcggcaggtgaccagcaactccctcagtggcacccaggaagacgggctggatgaccccaggctggaaaagctgtggcacaaggcgaagacctctgggaaattctccggcgaagaactggacaagctctggcgggagttcctgcatcacaaagagaaagttcacgagtacaacgtcctgctggagaccctgagcaggaccgaagaaatccacgagaacgtcattagcccctcggacctgagcgacatcaagggcagcgtcctgcacagcaggcacacggagctgaaggagaagctgcgcagcatcaaccagggcctggaccgcctgcgcagggtcagccaccagggctacagcactgaggctgagttcgaggagcccagggtgattgacctgtgggacctggcgcagtccgccaacctcacggacaaggagctggaggcgttccgggaggagctcaagcacttcgaagccaaaatcgagaagcacaaccactaccagaagcagctggagattgcgcacgagaagctgaggcacgcagagagcgtgggcgacggcgagcgtgtgagccgcagccgcgagaagcacgccctgctggaggggcggaccaaggagctgggctacacggtgaagaagcatctgcaggacctgtccggcaggatctccagagctcggcacaacgaactctgaaggcattggggagcccagcccggcagggaagaggccagcgtgaaggacctgggctcttggccgtggcatttccgtggacagcccgccgtcagggtggctggggctggcacgggtgtcgaggcaggaaggattgtttctggtgactgcagccgctgccgtcgcgacacagggcttggtggtggtagcatttgggtctgagatcggcccagctctgactgaaggggcttggcttccactcagcatcagcgtggcagtcaccaccccagtgaggacctcgatgtccagctgctgtcaggtctgatagtcctctgctaaaacaacacgatttacataaaaaatcttacacatctgccaccggaaataccatgcacagagtccttaaaaaatagagtgcagtatttaaaccacccgaaaaaaaaaaaaaaaa

SEQ ID NO: 1700 - DNA, 4258 bp, Homo Sapiens
  NM_002340
aggggcggggctgggcggcaggtcccgggtgcggacatctggcagctggcagtgggcggcgtagagcactgcagcagcaatgacggagggcacgtgtctgcggcgccgagggggcccctacaagaccgagcccgccaccgacctcggccgctggcgactcaactgcgagaggggccggcagacgtggacctacctgcaggacgagcgcgccggccgcgagcagaccggcctggaagcctacgccctggggctggacaccaagaattactttaaggacttgcccaaagcccacaccgcctttgagggggctctgaacgggatgacattttacgtggggctgcaggctgaggatgggcactggacgggtgattatggtggcccacttttcctcctgccaggcctcctgatcacttgccacgtggcacgcatccctctgccagccggatacagagaagagattgtgcggtacctgcggtcagtgcagctccctgacggtggctggggcctgcacattgaggataagtccaccgtgtttgggactgcgctcaactatgtgtctctcagaattctgggtgttgggcctgacgatcctgacctggtacgagcccggaacattcttcacaagaaaggtggtgctgtggccatcccctcctgggggaagttctggctggctgtcctgaatgtttacagctgggaaggcctcaataccctgttcccagagatgtggctgtttcctgactgggcaccggcacacccctccacactctggtgccactgccggcaggtgtacctgcccatgagctactgctacgccgttcggctgagtgccgcggaagacccgctggtccagagcctccgccaggagctctatgtggaggacttcgccagcattgactggctggcgcagaggaacaacgtggcccccgacgagctgtacacgccgcacagctggctgctccgcgtggtatatgcgctcctcaacctgtatgagcaccaccacagtgcccacctgcggcagcgggccgtgcagaagctgtatgaacacattgtggccgacgaccgattcaccaagagcatcagcatcggcccgatctcgaaaaccatcaacatgcttgtgcgctggtatgtggacgggcccgcctccactgccttccaggagcatgtctccagaatcccggactatctctggatgggccttgacggcatgaaaatgcagggcaccaacggctcacagatctgggacaccgcattcgccatccaggctctgcttgaggcgggcgggcaccacaggcccgagttttcgtcctgcctgcagaaggctcatgagttcctgaggctctcacaggtcccagataaccctcccgactaccagaagtactaccgccagatgcgcaagggtggcttctccttcagtacgctggactgcggctggatcgtttctgactgcacggctgaggccttgaaggctgtgctgctcctgcaggagaagtgtccccatgtcaccgagcacatccccagagaacggctctgcgatgctgtggctgtgctgctgaacatgagaaatccagatggagggttcgccacctatgagaccaagcgtggggggcacttgctggagctgctgaacccctcggaggtcttcggggacatcatgattgactacacctatgtggagtgcacctcagccgtgatgcaggcgcttaagtatttccacaagcgtttcccggagcacagggcagcggagatccgggagaccctcacgcagggcttagagttctgtcggcggcagcagagggccgatggctcctgggaaggctcctggggagtttgcttcacctacggcacctggtttggcctggaggccttcgcctgtatggggcagacctaccgagatgggactgcctgtgcagaggtctcccgggcctgtgacttcctgctgtcccggcagatggcagacggaggctggggggaggactttgagtcctgcgaggagcggcgttatttgcagagtgcccagtcccagatccataacacatgctgggccatgatggggctgatggccgttcggcatcctgacatcgaggcccaggagagaggagtccggtgtctacttgagaaacagctccccaatggcgactggccgcaggaaaacattgctggggtcttcaacaagtcctgtgccatctcctacacgagctacaggaacatcttccccatctgggccctcggccgcttctcccagctgtaccctgagagagcccttgctggccacccctgagaacatgcctacctgctgggtgccgtctgtgcgttccagtgaggccaaggggtcctggccgggttggggagccctcccataaccctgtcttgggctccaacccctcaacctctatctcatagatgtgaatctgggggccaggctggaggcagggatggggacagggtgggtggcttagactcttgatttttactgtaggttcatttctgaaagtagcttgtcgggcttgggtgaggaagggggcacaggagccgtgacccctgaggaggcacagcgccttctgccacctctgggcacggcctcaaggtagtgaggctaggaggttttttctgaccaatagctgagttcttgggagaggagcagctgtgcctgtgtgattccttagtgtcgagtgggctctgggctggggtcggccctgggcaggcttctcctgcaccttttgtctgctgggctgagggacacgagggcaaccctgtgacaatggcaggtagtgtgcatccgtgaatagcccagtgcgggggttgctcatggagcatcctgaggccgtgcagcagggagccccatgcccctgggtcgtgagcttgcctgcgtatggggtggtgtcatggagcctcatgcccctgggtcgtgagctcgcctgagtatggggtggtgtcatggagccgcatacccctgggttgtgagctcgcctgcatatgcagggtctgtcatggaacatcccaagtctgtgcagcagggagccccatgcccctgggacatgaacccacctgcgtggaatgctgtttgtgaggtgtctacagggtttatagtagtcttgtggacacagaaatgcacaggggacacttacggacacagaaatgcacaggggaggccgagcataaccaggggtgaggggcaggcagcagttgtagttactgccgcggggcactgctatgtgcagggacagccagcacccagcccatcaccactccctgggctggctggcaggtatggcaccctgggagcccggcatatacccagggcacccctacggctgccgccagtctcatgcccaggtgggtgctctgggctggagcgagggccaggttttgggccgaggcttccccaggcaatcctgtgagctcccttctagcctctgacccagtctggtctggcttgcatggatgtagggcttggggtgggaagttcaggtcctggctttgcctttgcctgatgtggatgagcagctcacatgctcagggccacctgagactgtcactgctctcccctggctactgggaggagtcactgagagcttcgttacccctgctgccttgcccagggcacaccctatacctccttatctgctcttcccctccctgccgccttctgggcaggtagcagtccctggcctctccccctggctgatcactctccctcaggcagtggagatctgcgtctggacaccctcagatcctgtcattgcctgcccagagtccttcaggggcacccctctgccttggtgtgcagtccagggctctcacccaggtgccgcaccctctggggtcttctgtccagctcccttgccccatgtgctgtcactgactctccttgggactcgcctgcctgctcagagccctgcagggcttggtcagctgcctgttcagtgtcaacacttccctgcacatcttaaaactgggctttattttcgctgaaggaactgtgttgggacccttgacatctgtcaggtttgcacatgctgtttttttttctcagcccacgtgttctcccccacgtggggtagcagcaggacagacagtgaatcacagagtctgccctgagcagaggctgctgtccctgggactcctagccatggtcagactgtacaaaacggttttccagaaatgaaatgtaaatccatttttatactgaaaatgttactgaaagtcacttttatgagcatctgccttaataaacagacattgattcccttatcagaag

SEQ ID NO: 1701 - DNA, 894 bp, Homo Sapiens
  NM_002341
cagtctcaatgggggcactggggctggagggcaggggtgggaggctccaggggaggggttccctcctgctagctgtggcaggagccacttctctggtgaccttgttgctggcggtgcctatcactgtcctggctgtgctggccttagtgccccaggatcagggaggactggtaacggagacggccgaccccggggcacaggcccagcaaggactggggtttcagaagctgccagaggaggagccagaaacagatctcagccccgggctcccagctgcccacctcataggcgctccgctgaaggggcaggggctaggctgggagacgacgaaggaacaggcgtttctgacgagcgggacgcagttctcggacgccgaggggctggcgctcccgcaggacggcctctattacctctactgtctcgtcggctaccggggccgggcgccccctggcggcggggacccccagggccgctcggtcacgctgcgcagctctctgtaccgggcggggggcgcctacgggccgggcactcccgagctgctgctcgagggcgccgagacggtgactccagtgctggacccggccaggagacaagggtacgggcctctctggtacacgagcgtggggttcggcggcctggtgcagctccggaggggcgagagggtgtacgtcaacatcagtcaccccgatatggtggacttcgcgagagggaagaccttctttggggccgtgatggtggggtgagggaatatgagtgcgtggtgcgagtgcgtgaatattgggggcccggacgcccaggaccccatggcagtgggaaaaatgtaggagactgtttggaaattgattttgaacctgatgaaaataaagaatggaaagcttcagtgctgccgataaa

SEQ ID NO: 1702 - DNA, 2136 bp, Homo Sapiens
  NM_002342
gccctggaggcccggcctggccgctcccggccctggggtgcacatcggccctgagtcccgtcccaggctctgggctcgggcagccgccgccaccgctgcccaggacgtcgggcctcctgccttcctcccaggcccccacgttgctggccgcctggccgagtggccgccatgctcctgccttgggccacctctgcccccggcctggcctgggggcctctggtgctgggcctcttcgggctcctggcagcatcgcagccccaggcggtgcctccatatgcgtcggagaaccagacctgcagggaccaggaaaaggaatactatgagccccagcaccgcatctgctgctcccgctgcccgccaggcacctatgtctcagctaaatgtagccgcatccgggacacagtttgtgccacatgtgccgagaattcctacaacgagcactggaactacctgaccatctgccagctgtgccgcccctgtgacccagtgatgggcctcgaggagattgccccctgcacaagcaaacggaagacccagtgccgctgccagccgggaatgttctgtgctgcctgggccctcgagtgtacacactgcgagctactttctgactgcccgcctggcactgaagccgagctcaaagatgaagttgggaagggtaacaaccactgcgtcccctgcaaggcagggcacttccagaatacctcctcccccagcgcccgctgccagccccacaccaggtgtgagaaccaaggtctggtggaggcagctccaggcactgcccagtccgacacaacctgcaaaaatccattagagccactgcccccagagatgtcaggaaccatgctgatgctggccgttctgctgccactggccttctttctgctccttgccaccgtcttctcctgcatctggaagagccacccttctctctgcaggaaactgggatcgctgctcaagaggcgtccgcagggagagggacccaatcctgtagctggaagctgggagcctccgaaggcccatccatacttccctgacttggtacagccactgctacccatttctggagatgtttccccagtatccactgggctccccgcagccccagttttggaggcaggggtgccgcaacagcagagtcctctggacctgaccagggagccgcagttggaacccggggagcagagccaggtggcccacggtaccaatggcattcatgtcaccggcgggtctatgactatcactggcaacatctacatctacaatggaccagtactggggggaccaccgggtcctggagacctcccagctacccccgaacctccataccccattcccgaagagggggaccctggccctcccgggctctctacaccccaccaggaagatggcaaggcttggcacctagcggagacagagcactgtggtgccacaccctctaacaggggcccaaggaaccaatttatcacccatgactgacggagtctgagaaaaggcagaagaaggggggcacaagggcactttctcccttgaggctgccctgcccacgtgggattcacaggggcctgagtagggcccggggaagcagagccctaagggattaaggctcagacacctctgagagcaggtgggcactggctgggtacggtgccctccacaggactctccctactgcctgagcaaacctgaggcctcccggcagacccacccaccccctggggctgctcagcctcaggcacggacagggcacatgataccaactgctgcccactacggcacgccgcaccggagcacggcaccgagggagccgccacacggtcacctgcaaggacgtcacgggcccctctaaaggattcgtggtgctcatccccaagcttcagagaccctttggggttccacacttcacgtggactgaggtagaccctgcatgaagatgaaattatagggaggacgctccttccctcccctcctagaggagaggaaagggagtcattaacaactagggggttgggtaggattcctaggtatggggaagagttttggaaggggaggaaaatggcaagtgtatttatattgtaaccacatgcaaataaaaagaatgggacctaaactcgtgccgctcgtgccgaattcctgcag

SEQ ID NO: 1703 - DNA, 2593 bp, Homo Sapiens
  NM_002343
agaaccaggacaggtgaggtgcaggctggctttcctctcgcagcgcggtgtggagtcctgtcctgcctcagggcttttcggagcctggatcctcaaggaacaagtagacctggccgcggggagtggggagggaaggggtgtctattgggcaacagggcggggcaaagccctgaataaaggggcgcagggcaggcgcaagtggcagagccttcgtttgccaagtcgcctccagaccgcagacatgaaacttgtcttcctcgtcctgctgttcctcggggccctcggactgtgtctggctggccgtaggaggagtgttcagtggtgcgccgtatcccaacccgaggccacaaaatgcttccaatggcaaaggaatatgagaaaagtgcgtggccctcctgtcagctgcataaagagagactcccccatccagtgtatccaggccattgcggaaaacagggccgatgctgtgacccttgatggtggtttcatatacgaggcaggcctggccccctacaaactgcgacctgtagcggcggaagtctacgggaccgaaagacagccacgaactcactattatgccgtggctgtggtgaagaagggcggcagctttcagctgaacgaactgcaaggtctgaagtcctgccacacaggccttcgcaggaccgctggatggaatgtccctatagggacacttcgtccattcttgaattggacgggtccacctgagcccattgaggcagctgtggccaggttcttctcagccagctgtgttcccggtgcagataaaggacagttccccaacctgtgtcgcctgtgtgcggggacaggggaaaacaaatgtgccttctcctcccaggaaccgtacttcagctactctggtgccttcaagtgtctgagagacggggctggagacgtggcttttatcagagagagcacagtgtttgaggacctgtcagacgaggctgaaagggacgagtatgagttactctgcccagacaacactcggaagccagtggacaagttcaaagactgccatctggcccgggtcccttctcatgccgttgtggcacgaagtgtgaatggcaaggaggatgccatctggaatcttctccgccaggcacaggaaaagtttggaaaggacaagtcaccgaaattccagctctttggctcccctagtgggcagaaagatctgctgttcaaggactctgccattgggttttcgagggtgcccccgaggatagattctgggctgtaccttggctccggctacttcactgccatccagaacttgaggaaaagtgaggaggaagtggctgcccggcgtgcgcgggtcgtgtggtgtgcggtgggcgagcaggagctgcgcaagtgtaaccagtggagtggcttgagcgaaggcagcgtgacctgctcctcggcctccaccacagaggactgcatcgccctggtgctgaaaggagaagctgatgccatgagtttggatggaggatatgtgtacactgcaggcaaatgtggtttggtgcctgtcctggcagagaactacaaatcccaacaaagcagtgaccctgatcctaactgtgtggatagacctgtggaaggatatcttgctgtggcggtggttaggagatcagacactagccttacctggaactctgtgaaaggcaagaagtcctgccacaccgccgtggacaggactgcaggctggaatatccccatgggcctgctcttcaaccagacgggctcctgcaaatttgatgaatatttcagtcaaagctgtgcccctgggtctgacccgagatctaatctctgtgctctgtgtattggcgacgagcagggtgagaataagtgcgtgcccaacagcaacgagagatactacggctacactggggctttccggtgcctggctgagaatgctggagacgttgcatttgtgaaagatgtcactgtcttgcagaacactgatggaaataacaatgaggcatgggctaaggatttgaagctggcagactttgcgctgctgtgcctcgatggcaaacggaagcctgtgactgaggctagaagctgccatcttgccatggccccgaatcatgccgtggtgtctcggatggataaggtggaacgcctgaaacaggtgttgctccaccaacaggctaaatttgggagaaatggatctgactgcccggacaagttttgcttattccagtctgaaaccaaaaaccttctgttcaatgacaacactgagtgtctggccagactccatggcaaaacaacatatgaaaaatatttgggaccacagtatgtcgcaggcattactaatctgaaaaagtgctcaacctcccccctcctggaagcctgtgaattcctcaggaagtaaaaccgaagaagatggcccagctccccaagaaagcctcagccattcactgcccccagctcttctccccaggtgtgttggggccttggcctcccctgctgaaggtggggattgcccatccatctgcttacaattccctgctgtcgtcttagcaagaagtaaaatgagaaattttgttgatattctctccttaaaaaaaaaaaaaaaaaaaaaaaaaaaaaa

SEQ ID NO: 1704 - DNA, 1194 bp, Homo Sapiens
  NM_002346
ggggccgcgcggctgcctgggaggctccgggccagccgcggtccagagcgcgcgaggttcggggagctcggccaggctgctggtacctgcgtccgcccggcgagcaggacaggctgctttggtttgtgacctccaggcaggacggccatcctctccagaatgaagatcttcttgccagtgctgctggctgcccttctgggtgtggagcgagccagctcgctgatgtgcttctcctgcttgaaccagaagagcaatctgtactgcctgaagccgaccatctgctccgaccaggacaactactgcgtgactgtgtctgctagtgccggcattgggaatctcgtgacatttggccacagcctgagcaagacctgttccccggcctgccccatcccagaaggcgtcaatgttggtgtggcttccatgggcatcagctgctgccagagctttctgtgcaatttcagtgcggccgatggcgggctgcgggcaagcgtcaccctgctgggtgccgggctgctgctgagcctgctgccggccctgctgcggtttggcccctgaccgcccagaccctgtcccccgatcccccagctcaggaaggaaagcccagccctttctggatcccacagtgtatgggagcccctgactcctcacgtgcctgatctgtgcccttggtcccaggtcaggcccaccccctgcacctccacctgccccagcccctgcctctgccccaagtggggccagctgccctcacttctggggtggatgatgtgaccttccttgggggactgcggaagggacgagggttccctggagtcttacggtccaacatcaggaccaagtcccatggacatgctgacagggtccccagggagaccgtgtcagtagggatgtgtgcctggctgtgtacgtgggtgtgcagtgcacgtgagagcacgtggcggcttctgggggccatgtttggggagggaggtgtgccagcagcctggagagcctcagtccctgtagccccctgccctggcacagctgcatgcacttcaagggcagcctttgggggttggggtttctgccacttccgggtctaggccctgccccaaatccagccagtcctgccccagcccacccccacattggagccctcctgctgctttggtgcctcaaataaatacagatgtcccccagaaaaaaaaaaaaaaaaaa

SEQ ID NO: 1705 - DNA, 2486 bp, Homo Sapiens
  NM_002348
gctgtggtaagtgcatcctccttcagtctcagttctgaaaatagatcatcatggtggcaccaaagagtcacacagatgactgggctcctgggcctttctccagtaagccacagaggagtcagctgcaaatattctcttctgttctacagacctctctcctcttcctgctcatgggactaagagcctctggaaaggactcagccccaacagtggtgtcagggatcctagggggttccgtgactctccccctaaacatctcagtagacacagagattgagaacgtcatctggattggtcccaaaaatgctcttgctttcgcacgtcccaaagaaaatgtaaccattatggtcaaaagctacctgggccgactagacatcaccaagtggagttactccctgtgcatcagcaatctgactctgaatgatgcaggatcctacaaagcccagataaaccaaaggaattttgaagtcaccactgaggaggaattcaccctgttcgtctatgagcagctgcaggagccccaagtcaccatgaagtctgtgaaggtgtctgagaacttctcctgtaacatcactctaatgtgctccgtgaagggggcagagaaaagtgttctgtacagctggaccccaagggaaccccatgcttctgagtccaatggaggctccattcttaccgtctcccgaacaccatgtgacccagacctgccatacatctgcacagcccagaaccccgtcagccagagaagctccctccctgtccatgttgggcagttctgtacagatccaggagcctccagaggaggaacaacgggggagactgtggtaggggtcctgggagagccagtcaccctgccacttgcactcccagcctgccgggacacagagaaggttgtctggttgtttaacacatccatcattagcaaagagagggaagaagcagcaacggcagatccactcattaaatccagggatccttacaagaacagggtgtgggtctccagccaggactgctccctgaagatcagccagctgaagatagaggacgccggcccctaccatgcctacgtgtgctcagaggcctccagcgtcaccagcatgacacatgtcaccctgctcatctaccgcaggctgaggaagcccaaaatcacgtggagcctcaggcacagtgaggatggcatctgcaggatcagcctgacctgctccgtggaggacgggggaaacactgtcatgtacacatggaccccgctgcagaaggaagctgttgtgtcccaaggggaatcacacctcaatgtctcatggagaagcagtgaaaatcaccccaacctcacatgcacagccagcaaccctgtcagcaggagttcccaccagtttctttctgagaacatctgttcaggacctgagagaaacacaaagctttggattgggttgttcctgatggtttgccttctgtgcgttgggatcttcagctggtgcatttggaagcgaaaaggacggtgttcagtcccagccttctgttccagccaagctgaggccccagcggatacaccagaacccacagctggccacacgctatactctgtgctctcccaaggatatgagaagctggacactcccctcaggcctgccaggcaacagcctacacccacctcagacagcagctctgacagcaacctcacaactgaggaggatgaggacaggcctgaggtgcacaagcccatcagtggaagatatgaggtatttgaccaggtcactcaggagggcgctggacatgacccagcccctgagggccaagcagactatgatcccgtcactccatatgtcacggaagttgagtctgtggttggagagaacaccatgtatgcacaagtgttcaacttacagggaaagaccccagtttctcagaaggaagagagctcagccacaatctactgctccatacggaaacctcaggtggtgccaccaccacaacagaatgatcttgagattcctgaaagtcctacctatgaaaatttcacctgaaaggaaaagcagctgctgcctctctcctgggaccgtggggttggaaagtcagctggacctcatggggcctggggctcacagacagaagcacctcagaatttccttcagtgcctcagagatgcctggatgtggcccctccccctccttctcacccttaaggactcccaaacccattaatagttcagacacaggctccttcttggagcctatgggcttcagatgtctttgccccatttgtcacctcgcacacttatagcgtttcctcctcgaaattctaccaagactggtcaaatgttgctgaggggcctggaccagctgtcctttacaccaccttctcaacactgctgaaaagaacccaagagaattgtcacacatgacacaagatgtacataatatcatgctcactgcagtgttatttaaaataaaaggcaggaaataaaaaaaaaaaaaaaaaaaaaaaaaaaaaaa

SEQ ID NO: 1706 - DNA, 3106 bp, Homo Sapiens
  NM_002350
agacagccagttcctctcccgccgcgccgggccgcgctgccgctcgctccccggccgtggcgcctccgggccagacgcgctgcagcctccagcccgcggcaagcggggcggccgcgccacccccggccccgcgccagcagcccctcgccgcgcgtccagcgttcccggccagcagcctccccatacgcaggtcctgctgggccgccccgtcgcgccccccactctgaactcaagtcaccgtggagctccgccgccccgaaactttcaccgcgagcgggaaatatgggatgtataaaatcaaaagggaaagacagcttgagtgacgatggagtagatttgaagactcaaccagtacgtaatactgaaagaactatttatgtgagagatccaacgtccaataaacagcaaaggccagttccagaatctcagcttttacctggacagaggtttcaaactaaagatccagaggaacaaggagacattgtggtagccttgtacccctatgatggcatccacccggacgacttgtctttcaagaaaggagagaagatgaaagtcctggaggagcatggagaatggtggaaagcaaagtcccttttaacaaaaaaagaaggcttcatccccagcaactatgtggccaaactcaacaccttagaaacagaagagtggtttttcaaggatataaccaggaaggacgcagaaaggcagcttttggcaccaggaaatagcgctggagctttccttattagagaaagtgaaacattaaaaggaagcttctctctgtctgtcagagactttgaccctgtgcatggtgatgttattaagcactacaaaattagaagtctggataatgggggctattacatctctccacgaatcacttttccctgtatcagcgacatgattaaacattaccaaaagcaggcagatggcttgtgcagaagattggagaaggcttgtattagtcccaagccacagaagccatgggataaagatgcctgggagatcccccgggagtccatcaagttggtgaaaaggcttggcgctgggcagtttggggaagtctggatgggttactataacaacagtaccaaggtggctgtgaaaaccctgaagccaggaactatgtctgtgcaagccttcctggaagaagccaacctcatgaagaccctgcagcatgacaagctcgtgaggctctacgctgtggtcaccagggaggagcccatttacatcatcaccgagtacatggccaagggcagtttgctggatttcctgaagagcgatgaaggtggcaaagtgctgcttccaaagctcattgacttttctgctcagattgcagagggaatggcatacatcgagcggaagaactacattcaccgggacctgcgagcagctaatgttctggtctccgagtcactcatgtgcaaaattgcagattttggccttgctagagtaattgaagataatgagtacacagcaagggaaggtgctaagttccctattaagtggacggctccagaagcaatcaactttggatgtttcactattaagtctgatgtgtggtcctttggaatcctcctatacgaaattgtcacctatgggaaaattccctacccagggagaactaatgccgacgtgatgaccgccctgtcccagggctacaggatgccccgtgtggagaactgcccagatgagctctatgacattatgaaaatgtgctggaaagaaaaggcagaagagagaccaacgtttgactacttacagagcgtcctggatgatttctacacagccacggaagggcaataccagcagcagccttagagcacagggagacccgtccatttggcaggggtggctgcctcatttagagaggaaaagtaaccatcactggttgcacttatgatttcatgtgcggggatcatctgccgtgcctggatcctgaaatagaggctaaattactcaggaagaacaccctctaaatgggaaagtattctgtactcttagatggattctccactcagttgcaacttggacttgtcctcagcagctggtaatcttgctctgcttgacaacatctgagtgcagccgtttgagaagaaaacatctattctctccaaaaatgcacccaactagctctatgtttacaaatggacataggactcaaagtttcagagaccattgcaatgaatccccaataattgcagaactaaactcatttataaagctaaaataaccggatatatacatagcatgacatttctttgtgctttggcttacttgtttaaaaaaaaaaaaaaactaatccaacctgttagattttgcaggtgaagtcagcagcttaaaaatgtctttcccagatttcaatgatttttttccccctacctcccaaaatctgagactgttaaaacatttttcttctatgaacactgctcagacctgctagacatgccataggagtggcgtgcacatctctctctcttccagcaggaggagcccgtgagcacgcacagctgccctgtctgctcacccgaaggcaccgggctcacctggacctcccaggaaagggagaagagcctcagaaactgctctgtgtttagaaggaatatttttaagagtccagctttttcatttccacaatttcctatatccagatttgttttgacaatgtagtttggaagaactaagattctaatctctgaagaaccttatagggccttctaaaacataagagtttcctttgttgcttcaaatatttgaacattatgttaaagatcaagtattaattttagttgtactctagaaagctaaagtgccacattcggggctatttttatgattcagcaatcttttctaaattgtgtagcatgtgtatgagactatttatacccaaggatatgaaggaacataagtgactacaaggctctaataagccacggtggcaggaggttcaagcggttctgttcactaaatttttctcctgtaagctttgaatggaaacttctgtatcacatgatgtgtttcacttatgctgttgtgtatatacctaatatttctatttttgattttattttaatacacctcgtccaataacaaaaaaaaaaaaaaa

SEQ ID NO: 1707 - DNA, 2523 bp, Homo Sapiens
  NM_002351
attactaagcatccccgtctgagtgcaagggtgtgtgttggcagtacagccccaatcttgcaaaatccttcttccaatgttcctcccctctctgtatgaaccctgtgttggggggcagaagatggaagcccttggcaagctcgatcgaaccaagctactaaattgctgagctcgttttaactgaagtgtgagaaggaggtttaaggcaagtagacaacatcctgttgttggggtgcttctctcttttttgcacatctggctgaactgggagtcaggtggttgacttgtgcctggctgcagtagcagcggcatctcccttgcacagttctcctcctcggcctgcccaagagtccaccaggccatggacgcagtggctgtgtatcatggcaaaatcagcagggaaaccggcgagaagctcctgcttgccactgggctggatggcagctatttgctgagggacagcgagagcgtgccaggcgtgtactgcctatgtgtgctgtatcacggttacatttatacataccgagtgtcccagacagaaacaggttcttggagtgctgagacagcacctggggtacataaaagatatttccggaaaataaaaaatctcatttcagcatttcagaagccagatcaaggcattgtaatacctctgcagtatccagttgagaagaagtcctcagctagaagtacacaaggtactacagggataagagaagatcctgatgtctgcctgaaagccccatgaagaaaaataaaacaccttgtactttattttctataatttaaatatatgctaagtcttatatattgtagataatacagttcggtgagctacaaatgcatttctaaagccattgtagtcctgtaatggaagcatctagcatgtcgtcaaagctgaaatggacttttgtacatagtgaggagctttgaaacgaggattgggaaaaagtaattccgtaggttattttcagttattatatttacaaatgggaaacaaaaggataatgaatactttataaaggattaatgtcaattcttgccaaatataaataaaaataatcctcagtttttgtgaaaagctccatttttagtgaaatattattttatagctactaattttaaaatgtcttgcttgattgtatggtgggaagttggctggtgtcccttgtctttgccaagttctccactagctatggtgtcataggctcttttgggatttttgaagctgtatactgtgtgctaaaacaagcactaaacaaagagtgaaggatttatgtttaattctgaaagcaaccttcttgcctagtgttctgatattggacagtaaaatccacagaccaacctggagttgaaaatcttataatttaaaatatgctctaaacatgtttatcgtatttgatgctacaggatttgaaattgtattacaaatccaatgaaatgagtttttcttttcatttacctctgccccagttgtttctactacatggaagacctcattttgaagggaaatttcagcagctgcagctcatgagtaactgatttgtaacaagcctccttttaaagtaaccctacaaaaccactggaaagtttatggttgtattattttttaaaaaaattccaagtgattgaaacctacacgagatacagaattttatgcggcattttcttctcacatttatatttttgtgattttgtgattgattatatgtcactttgctacagggctcacagaattcattcactcaacaaacataatagggcgctgagggcatagaagtaaaaacacctggtccctgctctcagttcactgtcttgttggacgagaaaacaataacgataaaagacagtgaaagaaaataacgataaaagacagtgaaagaaaataacaataaaagacaaggaaaaaataacaatgaaagttgataagtacatgataagcgaggttccccgtgtgtaggtagatctggtctttagaggcagatagataggtcagtgcaaatactctggtccatgggccatatgaaaaggctaagcttcactgtaaaataataactgggaattctggattgtgtatgggtgttggtgaacttggttttaattagtgaactgctgagagacagagctattctccatgtactggcaagacctgatttctgagcatttaatatggatgccgtgggagtacaaaagtggagtgtggcctgagtaatgcattatgggtggtttaccatttcttgaggtaaaagcatcacatgaacttgtaaaggaatttaaaaatcctactttcataataagttgcataggtttaataatttttaattatatggcttgagtttaaattgtaataggcgtaactaattttaactctataatgtgttcattctggaataatcctaaacatatgaattatgtttgcatgttcacttccaagagcctttttttgaaaaaaagctttttttgaatcatcaagtctttcacatttaaataaagtgtttgaaagctttatttacctaaaaaaaa

SEQ ID NO: 1708 - DNA, 2080 bp, Homo Sapiens
  NM_002353
gcgggtccccagaagcctacaggtgagtatcggttctccccttcccggctttcggtccggaggaggcgggagcagcttccctgttctgatcctatcgcgggcggcgcagggccggcttggccttccgtgggacggggaggggggcgggatgtgtcacccaaataccagtggggacggtcggtggtggaaccagccgggcaggtcgggtagagtataagagccggagggagcggccgggcggcagacgcctgcagaccatcccagacgccggagcccgagccccgacgagtccccgcgcctcatccgcccgcgtccggtccgcgttcctccgccccaccatggctcggggccccggcctcgcgccgccaccgctgcggctgccgctgctgctgctggtgctggcggcggtgaccggccacacggccgcgcaggacaactgcacgtgtcccaccaacaagatgaccgtgtgcagccccgacggccccggcggccgctgccagtgccgcgcgctgggctcgggcatggcggtcgactgctccacgctgacctccaagtgtctgctgctcaaggcgcgcatgagcgcccccaagaacgcccgcacgctggtgcggccgagtgagcacgcgctcgtggacaacgatggcctctacgaccccgactgcgaccccgagggccgcttcaaggcgcgccagtgcaaccagacgtcggtgtgctggtgcgtgaactcggtgggcgtgcgccgcacggacaagggcgacctgagcctacgctgcgatgagctggtgcgcacccaccacatcctcattgacctgcgccaccgccccaccgccggcgccttcaaccactcagacctggacgccgagctgaggcggctcttccgcgagcgctatcggctgcaccccaagttcgtggcggccgtgcactacgagcagcccaccatccagatcgagctgcggcagaacacgtctcagaaggccgccggtgacgtggatatcggcgatgccgcctactacttcgagagggacatcaagggcgagtctctattccagggccgcggcggcctggacttgcgcgtgcgcggagaacccctgcaggtggagcgcacgctcatctattacctggacgagattcccccgaagttctccatgaagcgcctcaccgccggcctcatcgccgtcatcgtggtggtcgtggtggccctcgtcgccggcatggccgtcctggtgatcaccaaccggagaaagtcggggaagtacaagaaggtggagatcaaggaactgggggagttgagaaaggaaccgagcttgtaggtacccggcggggcaggggatggggtggggtaccggatttcggtatcgtcccagacccaagtgagtcacgcttcctgattcctcggcgcaaaggagacgtttatcctttcaaattcctgccttccccctcccttttgcgcacacaccaggtttaatagatcctggcctcagggtctcctttctttctcacttctgtcttgaaggaagcatttctaaaatgtatcccctttcggtccaacaacaggaaacctgactggggcagtgaaggaagggatggcatagcgttatgtgtaaaaaacaagtatctgtatgacaacccgggatcgtttgcaagtaactgaatccattgcgacattgtgaaggcttaaatgagtttagatgggaaatagcgttgttatcgccttgggtttaaattatttgatgagttccacttgtatcatggcctacccgaggagaagaggagtttgttaactgggcctatgtagtagcctcatttaccatcgtttgtattactgaccacatatgcttgtcactgggaaagaagcctgtttcagctgcctgaacgcagtttggatgtctttgaggacagacattgcccggaaactcagtctatttattcttcagcttgcccttactgccactgatattggtaatgttcttttttgtaaaatgtttgtacatatgttgtctttgataatgttgctgtaattttttaaaataaaacacgaatttaataaaatatgggaaaggcacaaaccagaaaaaaaaaa

SEQ ID NO: 1709 - DNA, 2454 bp, Homo Sapiens
  NM_002355
ttccggttcccagagtggggcacagcgaggcgctagggggaacgctggcctctgaaactagctctgggaccggggtctgcggccggcccctagctggccccgtctcccatccccagaagggtattcactggggattctgagctttggctactccagtttcccacgacacgatgttccctttctacagctgctggaggactggactgctactactactcctggctgtggcagtgagagaatcctggcagacagaagaaaaaacttgcgacttggtaggagaaaagggtaaagagtcagagaaagagttggctctagtgaagaggctgaaaccactgtttaataaaagctttgagagcactgtgggccagggttcagacacatacatctacatcttcagggtgtgccgggaagctggcaaccacacttctggggcaggcctggtgcaaatcaacaaaagtaatgggaaggagacagtggtagggagactcaacgagactcacatcttcaacggaagtaattggatcatgctgatctataaagggggtgatgaatatgacaaccactgtggcaaggagcagcgtcgtgcagtggtgatgatctcctgcaatcgacacaccctagcggacaattttaaccctgtgtctgaggagcgtggcaaagtccaagattgtttctacctctttgagatggatagcagcctggcctgttcaccagagatctcccacctcagtgtgggttccatcttacttgtcacgtttgcatcactggttgctgtttatgttgttggggggttcctataccagcgactggtagtgggagccaaaggaatggagcagtttccccacttagccttctggcaggatcttggcaacctggtagcagatggctgtgactttgtctgccgttctaaacctcgaaatgtgcctgcagcatatcgtggtgtgggggatgaccagctgggggaggagtcagaagaaagggatgaccatttattaccaatgtagattgcactttatatgtccagcctcttcctcagtcccccaaaccaaagctacacagccagatttctcaagcagtctcaactccagtccctcatctcacccttactattgctcttgctttccagtttgcttttgatttgcatcttctcactagtaaaactgccttccctttgttccttattttctgttttttctctagagaggtacagttgtaagtcagagttaatataatagggcctgtgaaaacagaggcttttgcattgtctcttgacatcagaagttacaataggcatatgggcaaaatggtgtagcaggctcactggccgtttgttttttaaacacattttcacaagtttttgagacactggatttctttaattaaaaaaaaaatgccaagaaacattatttatacagggttgattgctttcatgttgttattctgtaccctatagtagcctccatgagaatctggtatttcttgctgcttggaactactttgcagtgattacttggttgcagtccaagtactctcgtttagtctgagcctggagatgttctagacttgcttctcccacctctgagattaggacaggaaaaatgtgaaatttcccaattacaggattatacggtaccatcacatcatttgtggaaattggggtgactgtatagctgggattgggctaaggactgtggtcttatctgtccacatacagccaaaatgcctatccagaaatccagttcgttggaaaggaaaattggtactcctgtgccacaggggttccagaaaagggaagtcactttaccttgcggtggtgggatcctgatgtctttcatccatttgtagtaaaagctggtaaagcttttcttactcctggttccctaccagtatttctaaacatgtcgcactttctccacaggcatgtggttttgacctttttttcaatcttctagaaagggaacggaagcagaagtgggacatcgagggctctgctgtcctctgcgctgggtgtggaatgctgctgcacctgtcccttctgctggctcagggaagtgtcttcttgcccacatttctgtggggaaaggtttttaatcctctgatgcttccatcttcctgtttaggccatgtgcccagaaacctggactgatctttctttaatagtgaacccctgggccactgaagagtaacatggctccactggacacaaaagagggatggaatcaacaggcagggggccttttataagccttaggaaaagaaaatgaaactatttcatctttggacttttcaatactattggagtgatttttttctttctaaacagggaaaataatgttacaaaagcatcttttttgttatttgtttgcatccctcccccacaccctggtgttttaaaatgaagaaaaaaaaccatcaccttttgtacaaaaactcttaatgattaaaaaacaaaca

SEQ ID NO: 1710 - DNA, 4304 bp, Homo Sapiens
  NM_002356
cttgggcgttggaccccgcatcttattagcaaccagggagatttctccattttcctcttgtctacagtgcggctacaaatctgggatttttttattacttctttttttttcgaactacacttgggctcctttttttgtgctcgacttttccaccctttttccctccctcctgtgctgctgctttttgatctcttcgactaaaatttttttatccggagtgtatttaatcggttctgttctgtcctctccaccacccccacccccctccctccggtgtgtgtgccgctgccgctgttgccgccgccgctgctgctgctcgccccgtcgttacaccaacccgaggctctttgtttcccctcttggatctgttgagtttctttgttgaagaagccagcatgggtgcccagttctccaagaccgcagcgaagggagaagccgccgcggagaggcctggggaggcggctgtggcctcgtcgccttccaaagcgaacggacaggagaatggccacgtgaaggtaaacggcgacgcttcgcccgcggccgccgagtcgggcgccaaggaggagctgcaggccaacggcagcgccccggccgccgacaaggaggagcccgcggccgccgggagcggggcggcgtcgccctccgcggccgagaaaggtgagccggccgccgccgctgcccccgaggccggggccagcccggtagagaaggaggcccccgcggaaggcgaggctgccgagcccggctcgcccacggccgcggagggagaggccgcgtcggccgcctcctcgacttcttcgcccaaggccgaggacggggccacgccctcgcccagcaacgagaccccgaaaaaaaaaaagaagcgcttttccttcaagaagtctttcaagctgagcggcttctccttcaagaagaacaagaaggaggctggagaaggcggtgaggctgaggcgcccgctgccgaaggcggcaaggacgaggccgccgggggcgcagctgcggccgccgccgaggcgggcgcggcctccggggagcaggcagcggcgccgggcgaggaggcggcagcgggcgaggagggggcggcgggtggcgacccgcaggaggccaagccccaggaggccgctgtcgcgccagagaagccgcccgccagcgacgagaccaaggccgccgaggagcccagcaaggtggaggagaaaaaggccgaggaggccggggccagcgccgccgcctgcgaggccccctccgccgccgggcccggcgcgcccccggagcaggaggcagcccccgcggaggagcccgcggccgccgcagcctcgtcagcctgcgcagccccctcacaggaggcccagcccgagtgcagtccagaagcccccccagcggaggcggcagagtaaaagagcaagcttttgtgagataatcgaagaacttttctcccccgtttgtttgttggagtggtgccaggtactggttttggagaacttgtctacaaccagggattgattttaaagatgtctttttttattttacttttttttaagcaccaaattttgttgttttttttttttctcccctccccacagatcccatctcaaatcattctgttaaccaccattccaacaggtcgaggagagcttaaacaccttcttcctctgccttgtttctcttttattttttattttttcgcatcagtattaatgtttttgcatactttgcatctttattcaaaagtgtaaactttctttgtcaatctatggacatgcccatatatgaaggagatgggtgggtcaaaaagggatatcaaatgaagtgataggggtcacaatggggaaattgaagtggtgcataacattgccaaaatagtgtgccactagaaatggtgtaaaggctgtcttttttttttttttttaaagaaaagttattaccatgtattttgtgaggcaggtttacaacactacaagtcttgagttaagaaggaaagaggaaaaaagaaaaaacaccaatacccagatttaaaaaaaaaaaaacgatcatagtcttaggagttcatttaaaccataggaacttttcacttatctcatgttagctgtaccagtcagtgattaagtagaactacaagttgtataggctttattgtttattgctggtttatgaccttaataaagtgtaattatgtattaccagcagggtgtttttaactgtgactattgtataaaaacaaatcttgatatccagaagcacatgaagtttgcaactttccaccctgcccatttttgtaaaactgcagtcatcttggaccttttaaaacacaaattttaaactcaaccaagctgtgataagtggaatggttactgtttatactgtggtatgtttttgattacagcagataatgctttcttttccagtcgtctttgagaataaaggaaaaaaaaatcttcagatgcaatggttttgtgtagcatcttgtctatcatgttttgtaaatactggagaagctttgaccaatttgacttagagatggaatgtaactttgcttacaaaaattgctattaaactcctgcttaaggtgttctaattttctgtgagcacactaaaagcgaaaaataaatgtgaataaaatgtacaaatttgttgtgtttttttatgttctaataatactgagacttctaggtcttaggttaatttttaggaagatcttgcatgccatcaggagtaaattttattgtggttcttaatctgaagttttcaagctctgaaattcataatccgcagtgtcagattacgtagaggaagatcttacaacattccatgtcaaatctgttaccatttattggcatttagttttcatttaagaattgaacataattatttttattgtagctatatagcatgtcagattaaatcatttacaacaaaaggggtgtgaacctaagactatttaaatgtcttatgagaaaatttcataaagccattctcttgtcattcaggtccagaaacaaattttaaactgagtgagagtctatagaatccatactgcagatgggtcatgaaatgtgaccaaatgtgtttcaaaaattgatggtgtattacctgctattgtaattgcttagtgcttggctaatttccaaattattgcataatatgttctaccttaagaaaacaggtttatgtaacaaagtaatggtgttgaatggatgatgtcagttcatgggcctttagcatagttttaagcatcatttttttttttttttttgaaagtgtgttagcatcttgttactcaaaggataagacagacaataatacttcactgaatattaataatctttactagtttacctcctctgctctttgccacccgataactggatatcttttccttcaaaggaccctaaactgattgaaatttaagatatgtatcaaaaacattatttcatttaatgcacatctgttttgctgtttttgagcagtgtgcagtttagggttcatgataaatcattgaaccacatgtgtaacaactgaatgccaaatcttaaactcattagaaaaataacaaattaggttttgacacgcattcttaattggaataatggatcaaaaatagtggttcatgaccttaccaaacacccttgctactaataaaatcaaataacacttagaagggtatgtatttttagttagggtttcttgatcttggaggatgtttgaaagttaaaaattgaatttggtaaccaaaggactgatttatgggtctttcctatcttaaccaacgttttcttagttacctagatggccaagtacagtgcctggtatgtagtaagactcagtaaaaaagtggatttttaaaaataactcccaaagtgaatagtcaaaaatcctgttagcaaactgttatatattgctaagtttgttcttttaacagctggaatttattaagatgcattattttgattttattcactgcctaaaacactttgggtggtattgatggagttggtggattttcctccaagtgattaaatgaaatttgacgtatcttttcatccaaagttttgtacatcatgttttctaacggaaaaaaatgttaatatggcttttttgtattactaaaaatagctttgagattaaggaaaaataaataactcttgtacagttcagtattgtctattaaatctgtattggcagtatgtataatggcatttgctgtggttacaaaatacttcctctgggttataataatcatttgatccaattcctattgcttgtaaaataaagttttaccagttgatataatcaaaaaaaaaaaaaaa

SEQ ID NO: 1711 - DNA, 5630 bp, Homo Sapiens
  NM_002357
aagagaaggggctgggggcggggagatggtgagtcggggataaacactccgcggcggtggcggctgctgctctgctccgggttctgtcactgtgtcggcggtgcccagctcactggccccctccctctcttgtcgagcgtggttgccagagaggctccctcagccctgctccgcggggtccacagcgggctccacagcgggctccatagcgggctccacagcggtccggcggcggcagcgagcccgtgggcagtgggggttggtcccgtggctccggcccccggtgcagaatggcggcggcggttcggatgaacatccagatgctgctggaggcggccgactatctggagcggcgggagagagaagctgaacatggttatgcctccatgttaccatacaataacaaggacagagatgccttaaaacggaggaacaaatccaaaaagaataacagcagtagcagatcaactcacaatgaaatggagaagaatagacgggctcatcttcgcttgtgcctggagaagttgaaggggctggtgccacttggacccgaatcaagtcgacacactacgttgagtttattaacaaaagccaaattgcacataaagaaacttgaagattgtgacagaaaagccgttcaccaaatcgaccagcttcagcgagagcagcgacacctgaagaggcagctggagaagctgggcattgagaggatccggatggacagcatcggctccaccgtctcctcggagcgctccgactccgacagggaagaaatcgacgttgacgtggagagcacggactatctcacaggtgatctggactggagcagcagcagtgtgagcgactctgacgagcggggcagcatgcagagcctcggcagtgatgagggctattccagcaccagcatcaagagaataaagctgcaggacagtcacaaggcgtgtcttggtctctaagagagtgggcactgcggctgtctccttgaaggttctccctgttggttctgattaggtaacgtattggacctgcccacaactcccttgcacgtaaacttcagtgtcccaccttgaccaaaatcagctttgtaactgttttcaaggaggtgcttaggattgtgggtttctgattgcatccactagcttctctttttctcgccataaaaatttgtctctgagagactatacattccaatcaatttgaagcatccaagaattcttagaccgaataagcaatgtccacatctcagcaatccccctctttgctctcctcgtgtcctctcccagacctttcttccagttttctggcttactgtgttacttgcctaggaggaatgtccaagtgtgtcttgtacttaggaaactgaaggaaacaaacttttgaaattgagatcctgatctcagaactccaaagtaagctttgaaagcagcatttaagagcacttaaccatggacctcaccaccagtgaggaagtcaggaatacctctagaaaacacgcccttcacaccgcgcatgctcattcccccgacgcgccgcgtgtggatgggagcagtatttctcactttaaaatggacaccttgatagtgtgtctctggggttgcacagctcatcaaagttccaaattgtttgttctcacaaacaaaacggtacaatctatttttgtgcgatgttcttgggacctcgctgtgttctgctatctcgaggcacattctcccctccaactttgttaatgctacttgtctctggaacatttttttttcctacctcagagataaatgagatctccatttcccacttaacacagtgattatccttttttccccccccaaaatagtgacatttggtccaattataatctattttcctattgaactttcagcaataactgagctgtggcactagcagagctagtagccattatcagtgaaagaaaaagtccacatttctactctctgttgcaggtgaacaggagaggatggtacactgttactagaactcctctccttattgattatttttggacacacccagaaacttctttatggaggcttttgggttgatagtttaaaaggctgatttttctttttggttatgatttctcccttaagtggtctccgactttgtagcatttttatttaagctaaaacagagcacatgtatatgtacataagacacattaaatctataaatactatttattcattttatataaactaatgtaatggaaaacaaattcttatgactttgtggttttatagatgttctagaaactttgtatgtaggtatctacaaaattagttcattcccctgaatatttttgcattcatatttttgaggtcttgatgttttcagcctctggcgaatctttttcattgaatttgaaccatttgtaaaatctgtgatgctgaagcagagtgtgtcacaaagtgatgagaacattactaaaatccacggacgcactgcgacctaagggctcaacggctgactcggcagcgggcagccaccccacgctcccctgcggtcactcgcacaccacagcctgaagctcccccagcgcctgcacctcgcacacagctaaggtcaaagttcaaacgcactccacacggaagctcattctatacccgaagagcagtctcagaaagcaagattacttttgtgttttttaaaaaatgattctttaatgtatttttctaaacattctgattggaagtagtggattcctaaatgattccaaagtcacctgtaattcttctgtttttgttttgttctgtcttttcttcattttggctttgggtggggggaggggcaggtgacacaaaggattttttttttttttttttaatttttggaatcttttccaataaccagctaaagatttgcactgaaatacaacttgtatgccttttgcatttttaaagcctgcttcctggatttaagcagagtgatagtgttcaaagagccagttcagcctgtaacatatttgaaaaagatatgtctgcactttgaggtcccttttgaatgccattcactagacctctcaagcattttgtttcattgctacatccaagcgcctcacaagtccacaatgcgggacagcatcaaaagctcaagactttggaaaaagcttgtgggcttgcactgggggagggaagggaacaaaatttgtgtacttctttgtttaatttagaaataaggcatccaagagatgccattattttctgtgtttcaattgttgtgcctttgagttaaactgcatttttgtcttttggttgaaatctgaaatgtactgtcccaatataaaacagtaattatttgacctttgcactgtttgtctggtccttttcagtttgattgcatataaatgtggaacttgatagatctctatatttttaatgcacttgtgataaactggcagcagggttagacattactttcaaagcttgaggtagaccgagtcagcatgctagacaggcttctctctctaaccaaaactgtaatcttcaggaccagcaaactcagcccaaggcagctaatccccccaaccccatcctccgcgccccgtgcggctgatcggcagccctgattcgccaatttgtcctctctcattcactgatccaccagcctgactgctaagagctatagtctttttagttgttttgtctttttaagcaagatgaaaacctttctattagggattttggggttgggaggggatgggcagagatataaaccccagcctttaagactttgacaattgtacgtaaatacagatgtgtataaatataggcacatgcatatttttatgtgaaagttgattttaaaaaactaaaaaaatctaaactgcactcttattgataccatcataacgcaagtgggaaaaataagagtacgcagtctaatttaatttcatgcagtgggaaaatatatatgtgtgcttctgtaacatcctgaaaacatagctttccatcccctgttggctttgaatggtgggccgagcacccaggtcgtctgtattttggttttcttttgctaagcagagatcttgaattcttcaaggtgctgatagcaactgctggctcctttctgtagtcacacacctaatgctagtttagtgattcaaaatgcatcacatttttaggcaggacctagattttccctgtcaacctaagatgaaaataatttcagtgttgattcagaactgaacattaagtaggccctcgtcctgcagttggccacttgagtgttttgttttgtttttattttttaaggtgggcattttcctttaacctctactttttcaaaagcaacaaaggggcctcaacctgagtttcctatgggcctctcttctgcatccccaaagcggccaagagcaaatcctgggggataagaaaaaagtgtaaactaggtaggattgtgatgctcaaaataaccatctagcaatatcttggagcttgagaatagattttgtgggcttatttcttcttgcctcttccccatcctttcaagagagaacttatttttgaaaagtatctatatatacacacacacacacacacacacatattattatttaggtttttataccatactgtattggcgagaataccactatcattgtcctttacagtctatttcttcccccaagtcttggtctttttttattttctattttttcatgaaccacacaggagactttaacatcctggtcttttctgtttcttctttgtttccccaagtttgtctgtccccctttgccttccctgagtgttgaacatcaggtagtaaaaggctaaacgcaatttcttgcatgtcaatctattctttttctatgtttgactctgatgcagtgtgtttagcgtgtctagtagctggctactcctatttaaaaactcttcctggtagaagacaacccaaagacccttttcgatgaggtggtttctcattctacatcctctgatctctatagactgtaggatgctttgctttcaaagataactgggttagagggtggggtgtgcaataggtgatttatcatggtttttttcattatcaatattacatggatgattttctcagattcttctgaaagaagaaattgacaggcactgctagattcagctattgaatggctgaagagattgagtatttgaccttctctcaaaatcataaagtgagaattcataaggcacccaatgttaagatttatccagatttttacattttgatttcttctctctgtggggtggcaagttgagggagcattcttcattttagcttttacctgacaaccaaacttgcctttaccccatccctagaattggtgctcttggaatattgctgttaccatcatttttggggggccatcttcctaatgctacacacagcctgacaggggagcagcagatgaaagggtatgctattctgtttccagatgtttctttatgtaaatatgacgccaatgtaaatcctgtgtcaagatcatagagaatggtgctttttactacagttagcacatgcatttttagaaactactacatgttttagagaatctttgctgtgtatatgtaaactgtattgttcaactgttaacaaataataaattatttcattattaaagaaaaaaaaaaaaaaaa

SEQ ID NO: 1712 - DNA, 5043 bp, Homo Sapiens
  NM_002359
cggcggcggcggatcccgagcctggtccggcccggccttcccagtgcgctcggcccggcccgcgcaggcggcgagtcctccgagccccgggcccggacccctcgcgccggtccctgccccgcgcggcctcggagcgcgcgcggccccgccccgccccggcctcggcccgccgggcccgcagtgtgagagcgcctgctcgctgtgcccccgggttatgacgacccccaataaaggaaacaaggccttgaaggtgaagcgggagccgggtgagaatggcaccagcctgacggatgaggagctggtgaccatgtcggtgcgggagctgaaccagcacctgcggggcctgtccaaggaggagatcgtccagctgaagcagcgccggcgcacgctcaagaaccgcggctacgctgccagctgccgcgtgaagcgggtgacgcagaaggaggagctggagaagcagaaggcggagctgcagcaggaggtggagaagctggcctcagagaacgccagcatgaagctggagctcgacgcgctgcgctccaagtacgaggcgctgcagaccttcgcccggacggtggcccgcagccccgtggcgccagcccggggcccccttgccgccggcctggggcccctcgtcccaggcaaggtggccgccaccagcgtcatcacaatagtaaagtccaagacggatgcccgatcgtagggacgcgcgtctgcccaggcgggtctttgcggggccactaggcacatggcgaatttggctgccctgtccctctgtttccttctcttctctttcctccctctcttccccacccttctctcttccctgcaaagcacaacctgtaccccaggggcgccgggctgagcccctttgatctcgtcattgtcgtcgtgtgttttgtatgttgggattggtcagttcggcggtgacgtggggtcgccccaaccccttttgtaccagggccatgcaggcttggagtccagagttggtgctgtgggaacggactagagagagttgcgggagagagaaggagcaggcacgctgggcctcgcgtgtccccgagcagtgagggtcccagtgttccctccactcccgagtggccacaggctcgcgggctgggaaggattcactctctttagccccaggggagcagctcagcttagcccagcatgaagagatgggctctgctctgagagtagggcgggcttgaaggccctgatgggtggaccaccagcctgggcgcagtggtgctgggggcgtgcagctgggcccaggggctgtgcactcaggcctgacccgttgcactgaacaagaccaaatcgctggttgtgcgcttaacgtgagggtgggtccagtgtgccctgcgatgggtcccgtgtcactgtttacatgacctatttgtgtggttatatagccctttatttaaaagagagaagttccttttacaaagttattaaattaattatatgtttaaaagttaaagaaaaaagagctgcagagtatttataaaactgtcttttagaaaaaaaacaagcaagaagaccatttgaccatatgaatggaaaagggaagaaagtataatagaaactttgctagttaaaaaaaaaagaaaaaaaaagaaaaaaaatccctttcttgtaaacttacggacacctctttgtggctgttggagtttagtttttatatacacagagttatcagacattatttataaaacttagtttaaaaaaaagacaaaaaaaaaaaagccaagccgtgagccgaccagaaggccgtcctctttgatatcttttgcaattgtaccgaaagtgacttactcctctgcccttcctgcttccgtctcttgccggtgccgtggtgtcgtccgtgcctggtgaggttttgtgcagcggtaaagtgctggtgcttctggtgacctttgacctgtgggtgtcacttcttgtgtctgttttcccgtgttcgttttttgggtttagttgtgcttttgcttctgctggcttgctggacctgggctggggtgccaagtggcgcctgctgcgtcagagctcaaggaatctgtgcccaccaccagctcctggtccgtaggaggtgagacatggggttctgtcatgcccccctccactgagccttggctacatctgtgtctagggcttgggctgatctagtggcggggtaggtgaaactggggtcccttggggcgccccacgctgcttccacacccaccacctctggccttgggtggtggcattacagggatgagggagtcactgtgggtggccacagggctatggccaagcgttccctggccgtcttcctctggcctcagctttgttcctataggctgcccgcgccgtgggctgcaggtctcgccgcccgcttgatccctgaggtgtttccatgctgcgggtggtgcttccaggcagagtgggtgggggcccaccgggcaccgccctttcttccttgtccctgcctcactctgagagccttgggggtctccaccagtgcagacaagggctacagtctccagggccgggtcttgtccctcttctccgctggtccacgctggcagctcttggcttcgggcctgccttctgcctccctttgggatctgtgtcttccagggatcagctgcttggcttctgctggaggtgcctccctgtgggggcgcagcctgcctcctgctctcagttcctcgccagaggctgctgcccttcctggctgggctcaggaggctccttgtaggcatatgatggggagggggtgcccctacccacctccaagaggctacagccctgtgtctggccatgtgagccctggcctttcaccgggttgctggtttcttttctgtggggcccagacttctgtaaagcacacagatgtgggtaagatgaaaaactgtggcccaacagggcttaaccctatggatggtgggatttttatccaatagtttggcctggtgtgcccacaggatgggaacagggaggcaccatcaacacttgtcatgttaatgagcttttctttgctcgaggtgttcagagacaagtcctgtgtctacctgcgtcagcctgaaaatggaaatattggctgttgactcttgtcatttagtgacttcatccccctcccctcagtctgatcttgtctaagtagaatccaggcgttagttggaatcatatcataagtatccatgaagaaaacgtcatgatctgcctcggagtggggagaaacaggccctccttgtccttgtgcagcccccacttttgtcctggctgtgggtggccatccattttgagcacctctgccaggctgcagacctggaggcgaagggagtgtggaagaggagggtgtaagggtcgacgcgtgctgaatgggaggtgcaggtcctcggtgcgttggcagaagaggcttctggagtttcgaggccatacctcctttcaagagctttggatttggggcgacttccctgggtctaggggagtgttcctgtcccctgtcaggtcagccctgcggagccactccacccctcttccccttcccctggatttcctgacatagatggtgtgttcatgtgcaggtgtgagtgtgctgtccttctgatctctgttgatcccgctttcctactgagagggtggtggagagggtggtggtctcttctcacctcagtttttctgacacagcgaatcgagggctttggccaaggccaggtctctcaaacttgtccgccaagtaaaccatgatatatgtcttcccttccaccttaactttgccccaactcctcttttatcctaacatggacgctcagatttcagaggaatacccagcagggacaggtcagctctcaccaggagagtgaggcccctggctgctgctcggggtggcactggtgttgctggctcagctcttggtgcatgtttcagatatgtgtgtacacttctgactggtgatcagggcccggcccacggccctgagcggctgcagcctgctttgggacgatggtcaggtcccatgttgtccctgctgcctccctctggagtggccacttggccaaagcgcccatccacatctggaaagtcggagccgcagcctgctgcaccgtttccgctctgggatcttgtgagttacttttttaggctgtggtttggtgaaaggaaccaacacattaacgatttttcccccagaagccactgaataattctttttggtgtatttttgccttcctgttggctgtctggccttggagcaggtcgggagagtagagtacataatcagtgccacacagaggcagggcgtgtctgagagactaatgcctgtcctgcctctggcctgtgtcctgggtgtgtaccatacctgctgggccagtcccacacatttccaccctgcccctggagcagcagctttgataccatgggtgtcccttgagtctgagctagagtgtgtccccgataaactgtgagacctccctgttcttggtgaccccagttgggctttggcccctccagcaaccttgtgtcccagccctgcccttcttcccaccccctcaatctgctagtccctgaagcctttaaccaaacgggagtgggcacagaaagccttctcctggcaacaggacaagggctgcccgcgtgtccagccctgttgctctcctggcgctgagaggtgggtccaagcagagttgatcagtccctgcctgccctgcctaggtctagccaggggaggttgtgtgtgtgggagaagaccccgggatctgctggggtgggatggaggttattaaagatctaagtgaggaggggctggggtttggatgcggggtgaggcccgagcgctcacacttcgtgtagggcgggcaggggcctgacctcttgcagggcagtggccttggtgccctacccctgccctgcgcagtatttattgctaaattattgtccaggaggggcagcactgggcctggccccccgggtatttattgctgtacatagtgtatgtttgtgatatataaggttttctttattttgtatatgatcaataaaccttttaaagagaaaaaa

SEQ ID NO: 1713 - DNA, 1056 bp, Homo Sapiens
  NM_002371
gtctgcgcggagtctgagcggcgctcgtcccgtcccaaggccgacgccagcacgccgtcatggcccccgcagcggcgacggggggcagcaccctgcccagtggcttctcggtcttcaccaccttgcccgacttgctcttcatctttgagtttatcttcgggggcctggtgtggatcctggtggcctcctccctggtgccctggcccctggtccagggctgggtgatgttcgtgtctgtgttctgcttcgtggccaccaccaccttgatcatcctgtacataattggagcccacggtggagagacttcctgggtcaccttggacgcagcctaccactgcaccgctgccctcttttacctcagcgcctcagtcctggaggccctggccaccatcacgatgcaagacggcttcacctacaggcactaccatgaaaacattgctgccgtggtgttctcctacatagccactctgctctacgtggtccatgcggtgttctctttaatcagatggaagtcttcataaagccgcagtagaacttgagctgaaaacccagatggtgttaactggccgccccactttccggcataactttttagaaaacagaaatgcccttgatggtggaaaaaagaaaacaaccacccccccactgcccaaaaaaaaaagccctgccctgttgctcgtgggtgctgtgtttactctcccgtgtgccttcgcgtccgggttgggagcttgctgtgtctaacctccaactgctgtgctgtctgctagggtcacctcctgtttgtgaaaggggaccttcttgttcgggggtgggaagtggcgaccgtgacctgagaaggaaagaaagatcctctgctgacccctggagcagctctcgagaactacctgttggtattgtccacaagctctcccgagcgccccatcttgtgccatgttttaagtcttcatggatgttctgcatgtcatggggactaaaactcacccaacagatctttccagaggtccatggtggaagacgataaccctgtgaaatactttataaaatgtcttaatgttc

SEQ ID NO: 1714 - DNA, 5128 bp, Homo Sapiens
  NM_002372
gcgggcggtgctggagcgccaagtggcgctggagaaccggcgcttcctttcgccgcttccgccgccatctccgcgtttgtggggcgggaaagagggagggggctagcggctgcagctggagcgggcttctctccggggacggtcctttcctccctgctctccttttccttctttccgcgttgccgccgcccgccccctgcgcctccccgcggagcctgggtccgggagggggaaggtaggggcggcggggggcgggagagtctggcgagcggacgctagctctgaggaaactcatcaatccgtgagccccggagtccggggtgcacatcggcccagccgcagcgtcggcggcggcggcggcagcagcacgaaggggctcagtcggggtaggcgggggcggtgccggtgccgcgggggcgggcccgaccgtcccgcccagaagttgtagggcttggctcctcgcgatcttgttcctttcccctccgcttctctgacctagctgcgcggccccggcccgggagctgccgaacccgcgcctcccctgggtgaggaggacacgcctgccctcgtcgagaaaacttttcctgccgactcagttggggcggcggtggcaggaagtgcgggcagcgacctctcctccgcctgccccgcgcgccctgccggaggtcggcgctgagcttgcgatcaagtttgtgggggccccccttcccagttgccggcgagtctcgcctcgagaggggcgcccgaccccggggagggcggcaggccagggcgaaggccaagggcgtgtggtggcgccggagactaggtgcggagcaaggcggggactcgcacccgcatccgagagcgcggaggtcgcgcagcccgggagaagggagcctccggcggctgcttcctagagtccacagtgcgctgtctcctttggctgaggagagtgtcctggccccgagtctatcgaggaaaatgaagttaagccgccagttcaccgtgttcggcagtgcgatcttctgtgtggtgattttctcgctctacctgatgctggaccggggtcacttagactaccccaggaacccgcgccgcgagggctccttccctcagggccagctctcaatgttgcaagaaaaaatagaccatttggagcgtttgctagctgagaataatgagatcatctcaaatattagagactcagtcatcaatttgagtgagtctgtggaggatggtccgaaaagttcacaaagcaatttcagccaaggtgctggctcacatcttctgccctcacaattatccctctcagttgacactgcagactgtctgtttgcttcacaaagtggaagtcacaattcagatgtgcagatgttggatgtttacagtctaatttcttttgacaatccagatggtggagtttggaagcaaggatttgacattacttatgaatctaatgaatgggacactgaaccccttcaagtctttgtggtgcctcattcccataacgacccaggttggttgaagactttcaatgactactttagagacaagactcagtatatttttaataacatggtcctaaagctgaaagaagactcacggaggaagtttatttggtctgagatctcttacctttcaaagtggtgggatattatagatattcagaagaaggatgctgttaaaagtttaatagaaaatggtcagcttgaaattgtgacaggtggctgggttatgcctgatgaagctactccacattattttgccttaattgatcaactaattgaaggacatcagtggctggaaaataatataggagtgaaacctcggtccggctgggctattgatccctttggacactcaccaacaatggcttatcttctaaaccgtgctggactttctcacatgcttatccagagagttcattatgcagttaaaaaacactttgcactgcataaaacattggagtttttttggagacagaattgggatctgggatctgtcacagatattttatgccacatgatgcccttctacagctatgacatccctcacacttgtggacctgatcctaaaatatgctgccagtttgattttaaacgtcttcctggaggcagatttggttgtccctggggagtccccccagaaacaatacatcctggaaatgtccaaagcagggctcggatgctactagatcagtaccgaaagaagtcaaagctttttcgtaccaaagttctcctggctccactaggagatgatttccgctactgtgaatacacggaatgggatttacagtttaagaattatcagcagctttttgattatatgaattctcagtccaagtttaaagttaagatacagtttggaactttatcagatttttttgatgcgctggataaagcagatgaaactcagagagacaagggccaatcgatgttccctgttttaagtggagattttttcacttatgccgatcgagatgatcattactggagtggctattttacatccagacccttttacaaacgaatggacagaatcatggaatctcatttaagggctgctgaaattctttactatttcgccctgagacaagctcacaaatacaagataaataaatttctctcatcatcactttacacggcactgacagaagccagaaggaatttgggactgtttcaacatcatgatgctatcacaggaactgcaaaagactgggtggttgtggattatggtaccagactttttcattcgttaatggttttggagaagataattggaaattctgcatttcttcttattttgaaggacaaactcacatacgactcttactctcctgataccttcctggagatggatttgaaacaaaaatcacaagattctctgccacaaaaaaatataataaggctgagtgcggagccaaggtaccttgtggtctataatcctttagaacaagaccgaatctcgttggtctcagtctatgtgagttccccgacagtgcaagtgttctctgcttcaggaaaacctgtggaagttcaagtcagcgcagtttgggatacagcaaatactatttcagaaacagcctatgagatctcttttcgagcacatataccgccattgggactgaaagtgtataagattttggaatcagcaagttcaaattcacatttagctgattatgtcttgtataagaataaagtagaagatagcggaattttcaccataaagaatatgataaatactgaagaaggtataacactagagaactcctttgttttacttcggtttgatcaaactggacttatgaagcaaatgatgactaaagaagatggtaaacaccatgaagtaaatgtgcaattttcatggtatggaaccacaattaaaagagacaaaagtggtgcctacctcttcttacctgatggtaatgccaagccttatgtttacacaacaccgccctttgtcagagtgacacatggaaggatttattcggaagtgacttgcttttttgaccatgttactcatagagtccgactataccacatacagggaatagaaggacagtctgtggaagtttccaatattgtggacatccgaaaagtatataaccgtgagattgcaatgaaaatttcttctgatataaaaagccaaaatagattttatactgacctaaatgggtaccagattcaacctagaatgacactgagcaaattgcctcttcaagcaaatgtctatcccatgaccacaatggcctatatccaggatgccaaacatcgtttgacactgctctctgctcagtcattaggggtttcgagtttgaatagtggtcagattgaagttatcatggatcgaagactcatgcaagatgataatcgtggccttgagcaaggtatccaggataacaagattacagctaatctatttcgaatactactagaaaaaagaagtgctgttaatacggaagaagaaaagaagtcggtcagttatccttctctccttagccacataacttcttctctcatgaatcatccagtcattccaatggcaaataagttctcctcacctacccttgagctgcaaggtgaattctctccattacagtcatctttgccttgtgacattcatctggttaatttgagaacaatacagtcaaaggtgggcaatgggcactccaatgaggcagccttgatcctccacagaaaagggtttgattgtcggttctctagcaaaggcacagggctgttttgttctactactcagggaaagatattggtacagaaacttttaaacaagtttattgtcgaaagtctcacaccttcatcactatccttgatgcattcacctcccggcactcagaatataagtgagatcaacttgagtccaatggaaatcagcacattccgaatccagttgaggtgaacctgactttcacatttggattgagaatcattggcttttatacctttcttggtttgacgtgcaataaagaagcacattattttagcttctggctactgtgagaacatgaattctgtgattctgtgggttttttcttttttcttttaccagtacagtaagaaaaaaaaaaaaaaaaaaaaagccatgctatcaatcaagattctttttttttaaactttctcccatgaactaccaccatcagtatgaattgatgcaacaaatgaagaaatatttaaagacagcctctcaacagattgtatctcaggttaaatgctaactaattatgtctgtgttgggggttgcgaagagattcttaaaagtatctgtgtgttgatcatcagttttacaaaaacacctatttggctgaaatggaataaaatgtttgtgggtaaaagctaatggccaaaatggttgcaatcattcatactagttagaaaaattatgtgttgaaataagtggaaaagtgcaatccatccacccttatgattaacgtagatgatttttatacctttttctgatgtacctcttgaccttctccttcccttcctaccctttctaagtatttccagaaatacctgattttgaatcattcaacagtagaaaaagaggcatattttcattacttgacaatgtgggatgggtgcaatttattccatcttcactaaaatagaagcaattccataggtaccat

SEQ ID NO: 1715 - DNA, 3115 bp, Homo Sapiens
  NM_002386
agacgcagtcttcagcaaggaagtgctgggaacgccctggagtgaacccaggaagatgcctgcagtgggtgccagggcccctctccaccgtccctgctgggcttcggggccacgcccgactgctgtgaacggcctgcggagcaccacgtgcgacggctggaggcgagaggtctgcctttgatgtggctgttggtgcagggcctgtggtgccttccgcagcggaaatggcgcgccgcccggggagggcgggagcagcgtcccgggtgcccctgtgaggatgagcgacgagatgactggagggtccctgaagacctcactagggtgcccccagccggtccgctcccaggaagcgacacccccacagccccagggctgcagctgagggggtcgccactctggctgggcgaggctgggcccttgggggcaggcgccagagtggcctcaggctctacaagatgcctgaaaacaccaacctctccagggctcactagcattggacgctttcacgctctgccctggccggaagccccctcaccccgcgcgatgtgcaaactcctgcagggctcactcagtttccagaactttaattattggaaagttctccctggtccagcccccaaatctgccgtgaacgttgacagctgagttgctgctccatgcgtgctttggctgagagcagaggggacccctgtcctccctgagctgctgacgaggggaggggtgaagggtggggcctctggagagggcaggtcccggggaagctccggactcctagaggggcggccaggtgggggccctggtgaccaggacagactgtggtgttttttaacgtaaaggagatccgcggtgtgagggaccccctgggtcctgcacgccgcctggtggcaggccgggccatggtgggtgctcacgcccccggcatgtggccgccctcagtgggaggggctctgagaacgactttttaaaacgcagagaaaagctccattcttcccaggacctcagcgcagccctggcccaggaaggcaggagacagaggccaggacggtccagaggtgtcgaaatgtcctggggacctgagcagcagccaccagggaagaggcagggagggagctgaggaccaggcttggttgtgagaatccctgagcccaggcggtagatgccaggaggtgtctggactggctgggccatgcctgggctgacctgtccagccagggagagggtgtgagggcagatctgggggtgcccagatggaaggaggcaggcatgggggacacccaaggccccctggcagcaccatgaactaagcaggacacctggaggggaagaactgtggggacctggaggcctccaacgactccttcctgcttcctggacaggactatggctgtgcagggatcccagagaagacttctgggctccctcaactccacccccacagccatcccccagctggggctggctgccaaccagacaggagcccggtgcctggaggtgtccatctctgacgggctcttcctcagcctggggctggtgagcttggtggagaacgcgctggtggtggccaccatcgccaagaaccggaacctgcactcacccatgtactgcttcatctgctgcctggccttgtcggacctgctggtgagcgggagcaacgtgctggagacggccgtcatcctcctgctggaggccggtgcactggtggcccgggctgcggtgctgcagcagctggacaatgtcattgacgtgatcacctgcagctccatgctgtccagcctctgcttcctgggcgccatcgccgtggaccgctacatctccatcttctacgcactgcgctaccacagcatcgtgaccctgccgcgggcgcggcgagccgttgcggccatctgggtggccagtgtcgtcttcagcacgctcttcatcgcctactacgaccacgtggccgtcctgctgtgcctcgtggtcttcttcctggctatgctggtgctcatggccgtgctgtacgtccacatgctggcccgggcctgccagcacgcccagggcatcgcccggctccacaagaggcagcgcccggtccaccagggctttggccttaaaggcgctgtcaccctcaccatcctgctgggcattttcttcctctgctggggccccttcttcctgcatctcacactcatcgtcctctgccccgagcaccccacgtgcggctgcatcttcaagaacttcaacctctttctcgccctcatcatctgcaatgccatcatcgaccccctcatctacgccttccacagccaggagctccgcaggacgctcaaggaggtgctgacatgctcctggtgagcgcggtgcacgcggctttaagtgtgctgggcagagggaggtggtgatattgtgtggtctggttcctgtgtgaccctgggcagttccttacctccctggtccccgtttgtcaaagaggatggactaaatgatctctgaaagtgttgaagcgcggacccttctgggtccagggaggggtccctgcaaaactccaggcaggacttctcaccagcagtcgtggggaacggaggaggacatggggaggttgtggggcctcaggctccgggcaccaggggccaacctcaggctcctaaagagacattttccgcccactcctgggacactccgtctgctccaatgactgagcagcatccaccccaccccatctttgctgccagctctcaggaccgtgccctcgtcagctgggatgtgaagtctctgggtggaagtgtgtgccaagagctactcccacagcagccccaggagaaggggctttgtgaccagaaagcttcatccacagccttgcagcggctcctgcaaaaggaggtgaaatccctgcctcaggccaagggaccaggtttgcaggagcccccctagtggtatggggctgagccctcctgagggccggttctaaggctcagactgggcactggggcctcagcctgctttcctgcagcagtcgcccaagcagacagccctggcaaatgcctgactcagtgaccagtgcctgtgagcatggggccaggaaagtctggtaataaatgtgactcagcatcacccaccttaaaaaaaaaaaaaaaaa

SEQ ID NO: 1716 - DNA, 3143 bp, Homo Sapiens
  NM_002388
ctcgaggtaacctttggtggcgggaagagttcggaagttttcgcgccggggtggagtcatcctgggaacctccacgcgactttggtggaggtagttctttggcagcgggcatggcgggtaccgtggtgctggacgatgtggagctgcgggaggctcagagagattacctggacttcctggacgacgaggaagaccagggaatttatcagagcaaagttcgggagctgatcagtgacaaccaataccggctgattgtcaatgtgaatgacctgcgcaggaaaaacgagaagagggctaaccggcttctgaacaatgcctttgaggagctggttgccttccagcgggccttaaaggattttgtggcctccattgatgctacctatgccaagcagtatgaggagttctacgtaggactggaaggcagctttggctccaagcacgtctccccgcggactcttacctcctgcttcctcagctgtgtggtctgtgtggagggcattgtcactaaatgttctctagttcgtcccaaagtcgtccgcagtgtccactactgtcctgctactaagaagaccatagagcgacgttattctgatctcaccaccctggtggcctttccctccagctctgtctatcctaccaaggatgaggagaacaatccccttgagacagaatatggcctttctgtctacaaggatcaccagaccatcaccatccaggagatgccggagaaggccccagccggccagctcccccgctctgtggacgtcattctggatgatgacttggtggataaagcgaagcctggtgaccgggttcaggtggtgggaacctaccgttgccttcctggaaagaagggaggctacacctctgggaccttcaggactgtcctgattgcctgtaatgttaagcagatgagcaaggatgctcagccctctttctctgctgaggatatagccaagatcaagaagttcagtaaaacccgatccaaggatatctttgaccagctggccaagtcattggccccaagtatccatgggcatgactatgtcaagaaagcaatcctctgcttgctcttgggaggggtggaacgagacctagaaaatggcagccacatccgtggggacatcaatattcttctaataggagacccatccgttgccaagtctcagcttctgcggtatgtgctttgcactgcaccccgagctatccccaccactggccggggctcctctggagtgggtctgacggctgctgtcaccacagaccaggaaacaggagagcgccgtctggaagcaggggccatggtcctggctgaccgaggcgtggtttgcattgatgaatttgacaaaatgtctgacatggatcgcacagccatccatgaagtgatggagcagggtcgagtgaccattgccaaggctggcatccatgctcggctgaatgcccgctgcagtgttttggcagctgccaaccctgtctacggcaggtatgaccagtataagactccaatggagaacattgggctacaggactcactgctgtcacgatttgacttgctcttcatcatgctggatcagatggatcctgagcaggatcgggagatctcagaccatgtccttcggatgcaccgttacagagcacctggggagcaggatggcgatgctatgcccttgggtagtgctgtggatatcctggccacagatgatcccaactttagccaggaagatcagcaggacacccagatttatgagaagcatgacaaccttctacatgggaccaagaagaaaaaggagaagatggtgagtgcagcattcatgaagaagtacatccatgtggccaaaatcatcaagcctgtcctgacacaggagtcggccacctacattgcagaagagtattcacgcctgcgcagccaggatagcatgagctcagacaccgccaggacatctccagttacagcccgaacactggaaactctgattcgactggccacagcccatgcgaaggcccgcatgagcaagactgtggacctgcaggatgcagaggaagctgtggagttggtccagtatgcttactttaagaaggttctggagaaggagaagaaacgtaagaagcgaagtgaggatgaatcagagacagaagatgaagaggagaaaagccaagaggaccaggagcagaagaggaagagaaggaagactcgccagccagatgccaaagatggggattcatacgacccctatgacttcagtgacacagaggaggaaatgcctcaagtacacactccaaagacggcagactcacaggagaccaaggaatcccagaaagtggagttgagtgaatccaggttgaaggcattcaaggtggccctcttggatgtgttccgggaagctcatgcgcagtcaatcggcatgaatcgcctcacagaatccatcaaccgggacagcgaagagcccttctcttcagttgagatccaggctgctctgagcaagatgcaggatgacaatcaggtcatggtgtctgagggcatcatcttcctcatctgaggaggcctcgtctctgaacttgggttgtgccgagagagtttgttctgtgtttcccaccctctccctgacccaagtctttgcctctactcccttaacagtgttgaattcaactgaaggcgaggaatgttggtgatgaagctgagttcaggactcggtggaccctttgggaatgggtcatgaaagctgccatggggtgaggaaagaggagacagtgggagaggacaatgactattgcatcttcattgcaaaagcactggctcatccgccctacttcccatcccacacaaacccaattgtaaataacatatgacttctgagtacttttgggggcacaactgttttctgtttgctgtttttttgttttgttttttttctccagagcactttggtctagactaggctttgggtggttccaattggtggagagaagctctgaggcacgtcatgcaggtcaagaaagctttctttgcagtagcaccagttaaggtgaatatgtattgtatcacaaaacaaacccaatatccagatgaatatccgagatgttgaataaacttagccatttcgtacacatggtaaaaaaaaaaaaaaaaaaaaaaaaaaaaaaaa

SEQ ID NO: 1717 - DNA, 10090 bp, Homo Sapiens
  NM_002393
gtgtgggaggccggaagttgcggcttcattactcgccatttcaaaatgctgccgaggccctaggatctgtgactgccacccctccccccacccgggctcggcgggggagcgactcatggagctgccgtaagttttaccaacagactgcagtttcttcactaccaaaatgacatcattttccacctctgctcagtgttcaacatctgacagtgcttgcaggatctctcctggacaaatcaatcaggtacgaccaaaactgccgcttttgaagattttgcatgcagcaggtgcgcaaggtgaaatgttcactgttaaagaggtcatgcactatttaggtcagtacataatggtgaagcaactttatgatcagcaggagcagcatatggtatattgtggtggagatcttttgggagaactactgggacgtcagagcttctccgtgaaagacccaagccctctctatgatatgctaagaaagaatcttgtcactttagccactgctactacagatgctgctcagactctcgctctcgcacaggatcacagtatggatattccaagtcaagaccaactgaagcaaagtgcagaggaaagttccacttccagaaaaagaactacagaagacgatatccccacactgcctacctcagagcataaatgcatacattctagagaagatgaagacttaattgaaaatttagcccaagatgaaacatctaggctggaccttggatttgaggagtgggatgtagctggcctgccttggtggtttttaggaaacttgagaagcaactatacacctagaagtaatggctcaactgatttacagacaaatcaggatgtgggtactgccattgtttcagatactacagatgacttgtggtttttgaatgagtcagtatcagagcagttaggtgttggaataaaagttgaagctgctgatactgaacaaacaagtgaagaagtagggaaagtaagtgacaaaaaggtgattgaagtgggaaaaaatgatgacctggaggactctaagtccttaagtgatgataccgatgtagaggttacctctgaggatgagtggcagtgtactgaatgcaagaaatttaactctccaagcaagaggtactgttttcgttgttgggccttgaggaaggattggtattcagattgttcaaagttaacccattctctctccacgtctgatatcactgccatacctgaaaaggaaaatgaaggaaatgatgtccctgattgtcgaagaaccatttcggctcctgtcgttagacctaaagatgcgtatataaagaaagaaaactccaaactttttgatccctgcaactcagtggaattcttggatttggctcacagttctgaaagccaagagaccatctcaagcatgggagaacagttagataacctttctgaacagagaacagatacagaaaacatggaggattgccagaatctcttgaagccatgtagcttatgtgagaaaagaccacgagacgggaacattattcatggaaggacgggccatcttgtcacttgttttcactgtgccagaagactaaagaaggctggggcttcatgccctatttgcaagaaagagattcagctggttattaaggtttttatagcataatggtagtacgaacataaaaatgcatttattccgttcacttaccacattatttgaaaatcaatcctttatttaattttatttccaacctgtcagagaatgttcttaggcatcaaaatccaaggtagctgtaagaaaaatactggagctaacaatgaagaacagaagtaatctgattagtcaaattattaagtgccatggattactttatgcagcagtcaggtacatagttaggtgaacccaaaagaaaaactcttgaaaacaagagatttcttccatgcacatttacaatattgaggtataattaacatgataaagtgtttccttctaacgagttgtagaaatctgagtaaccacccaaaaaagcaatagaatgtttctgtcaccccaaaacactcccttctgcccctcttcagacagtccttcagctatttcatggctctcaccctagttttttttttttttgcacttttttttttccgggggtataggggaggtgtggggcgacagggtctgtcttgttctgtctcccaggctgaagtgcagtgcagtggtatgatcatggctcactgcagccttggtttcctgggcataagtggtcttcccacttcagcctcctgagtagctgagactatagactagcataaccacactggctaattttttgtggagatgaagtctcactatgttgcccaggctggtctcgaactcctgggctcaaacaatcctcccgcctcagccttccaaattgctgggattatagtcatgaggcacctagtctggcccttttgcaagactttaatctgaaatctaaatttttaaaatttaagtacttacaaaggatatactatccaacatattgcatattatatatgtgctttaaagtttttttttttttttgagagacggtctcactttgtcatccaagctggagtgcagtggtgcaaacacggcccacctcctgggctcaagtgatcctccagcctcagcttccctcacaggcattcactatcactcccagctaattaaaataatttgtagacggtgtctcgttatgttgcccaggctggtctcgaactcctgggtttaagtgattcccccgcctcagcctcccaaagtgttgggcttacagccttgagccactatgcttggctcaaagatatttttatgaaagccctgggactatagatttagctgattaaatttatagaaaaagtcctgtcatataaactggcaaagtctgttcttaatttaattagccaaatcagacttaacttccgtcagaacatgtcttggttttaattcagataaacacacaaacatacttctctggcacagccttcagaagcatcagtttttgttttgttttgttttgttttttgagacagggtcttgctctgtcgcccaggctggagtgcactggcacaatcacagttcactgcagcctcgacctcccagatccaagcaatcctcccacctaagcctcccaagtagctgggtctataggcgcgtgccaccaccatgcccagctgaattttgtattttttgtacagacagcattttgccatgttgcccaggctggtcccaaacttctagcctcaagcaaccctcctgcctcagcctctcaaagtgctaggattgcagtcctgagctactgccccctaccctctttgcgtcttaggagtcatttagattttttttgatccttttgtttagtgcctctggagctgcttacaccaaggcaatacgccttgatatactggatggttgagaggcagcctctttttttttttttttttttttttttttttggaggatagggagtatggctgttgtgaaaagggaggtaaagagaaatggtagatctgaagaggcctcatcagagcacatattttaggacaacacatatggaaattggacatctttaagttggtttccatagagctatgcatgtatccttacccccatgggaaaatgttggtgtgttctcaagggtatgcatgtgtcattttgaagaccaaggccctagaattgtcaaacttaaggatcataaaaatcatgagggttgcttgttaaaaatgtccaaacgtgcagagactgatctttgagatctggaccaggaatttgcatttgaacaagtgttcctggaatctctatgcaagttttatacagaacatacttttggaatccttgccctagacaggggtgtccaatcttttggcttccctggtccacaatggaagaagaattgtcttggaccacacataaaatacactaacactaacaatagctgatgagctaaaaaaaaaaaaaaaaaaaatcgtggaccgggcgtagtggctcacgcctgtaatcccaacactttgggagatcacctaggtcgggagtttgagaccagcctgaccgacatggagaaaccccatttttactaaaaatacaaaaaattagctgggcatggtggtgcatgcctgtagtcccagctactcaggaggctgaggcaggagaatcgcttgaacctgagagggggagattgcggtgagctgagattgcgccattgcaccccagcctgggcaacaatagcgaaactgtctcagaaaaaagaaaaaaaaaatcgcaaaaagaaaaatctcataatgtcgttgttggtttttttttttttttttgagacagtctcactctgttgcccaggctggagtgcaatggcatgatctctgctcaccgcaacctctgcctcccgggttcaggtgattctcctgcctcagcctcccagatagctgggactacaggcacataccaccatgcctggctaatttttgtatttttagtagagatgggggtttcactgtgttggccaggctggtctcgaactcctgacctcatgatccacacacctcggcctcccaaagtcctgcgattacaggcgtgagctaccgcacccagccaagttgtaatttttaataaaacttaagaagtaaacattttacttatgtttataggtatttgatcctaaatttgacacatcattgcccatgaaagaatcctcttaggctgctcagcttcactcttcctgcttgcccaccggggtttttcactgcttctgttagcactaagtacttagacgatcctaagatatgtgcttgagccgaatttcatctttacttgtaggaaactttaaactatttcttttcttttcttttttttttttttttacttgagatggagttttgctcttgtcgcccaggctggagtgcagtggagtgatctcggctcactgcaacctctgcctcccgggttcaaatgattctcctgcctcagcctcccaagtagctgggattacaggtgtgcaccaccatgtctggctaattttgtatttttagtagagatggtttcaccatgttggtcaggctggtctcgaactcctgacctcaggtcatccacccacctcagcctcgcaaagtgctgagattacaggcatgagccacagcgcccagcttaaactattttcttggtctgtttttgattttcttttttccttgccactgcggtacagattttttttactcactgccactaaactaaagcaaggcatagtttatatgtgaagtgttcagagtttactgctataaggaaacttccaaatactgacatttaccttttagctgtagttattgggaccatgtgctctggttttctggagactgccaaattgctcccatttttctgcatcccacctggtttctttctgcatgtcccctttcactttcaaacctcttcatttggatgttaaattatatggtcacctagttataggtaagccttgttcgagttgatatcttgattgtgaggaaggatctgtgtcattggagcttgtttctgctgcaacgtgctgtagactatgaataatgaaatcacaccacattaccatcagatttcttgttttagttgtcaaattaatatttatgattgttatcttgggcgaaaagttcagagcagagatgacaaatcattagaacaacgatgaatttcagtattacggctaaaaagttcttctgtctgaatattaactcactctccttccagtgtacttcacagtaattggtatgcttttttatttaatgcttaaatcaaactttataaaaatcttagaccagatctttaatatggtatgccatttccccagtctaccaatggaatagtatgggtttctaatcctaggcttgtacaatggattggagttgagccatgccagcctccacactgccactaacttctgtaatgtaagattgagtcactgccaagcatttgaaatatgcagttgtgttttaattataatttatgtatagttagatgtatgtagtgcattgtgtggtattatttggtttgtaagaatttatttttaagggtcaaggtcatttgtaacattttgtgtgtgtcaattcaatgcaatgttggctgccttttgaagtctttgatatattggtgaatattcttctgatctataatacaaagctatgtaatgttacctcttgactcgcttttgaaaggaagacaattgttaactagatatttgagttttttcccctcagaattatgtgaatttctgatatatggctttagatactgtgaatctgttttccatttagtcagttatctgcttaaattgttcagaactatatcctaacgagcaattagttctgatggttctcccagtcatgagtgtgcatgtgtgcaagcatgttttgatcctgatgctacctttgctaaaaatggccatagattaggaactagctatgtttttagaatcaaagatgaaccggtaagctgtctcatgtaccaaacgtgaaatttacagtgtttacaaatgtctggaattttgcactgccatagggaatgttaaggttacttggctggaatttatcagacttgtgagtaaacaagttgaagtttagcagatgagggggaatattgaggcccctaaggctaaacaaaataatcagtatctgagatagtggctaatgtggctccccaggcctaatttgggaacagtttttcctgattgctttgagaagtactttcttttgacagaaattttcattctgcttgccattgctatattctccctttataggagccattggatttctttccttttgtgggaaatgtcccattagcattttcagatcttttgatgtgcactaatgccattattggtaatgccgttattggtgaatacagcatagttaaataaactgttacagtaaatctacacttggatttgctgcacctctaccaatagccttttgaatgactgaaagtgttaacagagaaagaggcatgtctgcagaaagagatagctaatattttttggtactttatctgaaatccaagatgctgcttcccctgcaggttgttttccttcttacgatcctcattgaatcccctctgggagcacaggacagttagtagaactctccatttctttttttttttttttagacggagtctctctctgtcgccccggctggagtgcagtggcgcgatctcggctcactgcaacctccgcctcccgggttcaccccattctcctgcctcagcctccctagtagctgggactataggcgcccgccaccacgcctggctaatttttgtatttttattggagacggggtttcaccgtcttagccaggatggtcttgatctcctgacctcgtgatctgcccacctcagcctcccaaagtactgggattacaggcgtgagccaccgcgcccggccggaactctccatttcttaaggtaaagagggtcaaggatacctaaaaagggtcaaataatgctagaagagcaattcctctttcagagcagttgctgtaatttggcaaatgctttatcgaagattgatattaggctaggggcggtggcttacgcctgtaatcccagcactttgggaggccgaggtgggtggattgcctgagctcaggagttcgagaccagtctgaccagtatggtgaaaccctgtctctactaaaaatacaaaaattagccggtcgtggtggcgtgcacctgtagtcccagctacttggcaggttgagacaggagaatcgcttgaacctgggaggtggaggttgcagtgagccgagactgcaccactgcgctcccacctgggtgacagagactctgtctcaaaaaaaaggacatttatcattataacatcttattagagcccctaatttcttatctgaaggcactgtttttttttttaaacagttaagtactgatgtcaacagacaaatatttctgatcagatagtcccctgtcaacagtagcaaatgtggtttcataaagtgggaagaaaacagcattttaaagtaactttttgggagactgatttgagtaataataaaactctggtctcccttaagaaaaaaaaacccttccacctttactgtgtcatttatatccccttagttccaaagttaattatcttatttctggatattgcttttataccaaagacccttatcagcccttgtaactacagtatctttagataagattcctctttccagtcagtcctgggaaatgtttctgttgcagagttaggcggtagatgggaagctgtgatggcagagctactatctaataaagtaacaactcgtagttgaggcttcctttctgtgtgtgatgggggatagggagttagctcccctgttgtctcagcactaagaaattgaggtcaggccaggcgcggtggttcactcctgttattccagcactggggtggccaaagtgggcagattgcttgcgctctggagctcgagaccagcctgggcaacatggtgaaaccctgtctctaccaaaaatacaaaaaaaaagctgggcatggtgggtgcatgcttgtcccagctactgaggaggctgaggtgggaggatcgcttgagcctgggaggtggaggttgcagtgagctgagatggcaccactgcaatccaaggtgggtgacagagacgctgtctcaaagaaattgaggtcaggcttccttcttacagaattatttttttctctgtagtttgcctcattttttcactttcttttcaatgagaatcgaagtgtttcttttgggtttttttttcccccttttaaaatcaacaggaaatgtttcaaaggagggatgaaatgcttcttggcttcctcagcacttggcaaggtagacctcatagcaaccttgaatatgactttctttagtctctagctatgcactattaagtgcctcttgggtagaggtagagttaagtattgagtgccagtcttgacgtccgtatgcctcagtttttctcatatataaaaagcagtatacatacctacccttttctacctcatcatttgttgtagggattaaatccgggagagcaattctgaagcctataaatttccttgaagagatctaagaacctattatgctcttggtgtaccaagctctggggtatatattcagaatacctcatgttctggaagctgagcactagctcccctttattgcctgcctggcagagcctgtttgattactgcaggcccttttacccatgcttctagtttaggtattctttctttgatatgaggctcttgaccagaaaagagttctttctctaggtgttctgagagaagtttgtaaatttggatagtacattctatcctgataaaaccaccttgctgtggtcttgatgtacaaaaaaaaattttttttttgagacagagtcttactctgtcacccaggctggaatgcagtggcgcaatcttggttcactgcaacccccgcctcctgggttcaagcgatcctcctgcctcaacctctcaagtagctgggactacaggcgtgcaccaccacacctggctaattttgtatttttagtagagacagggtttcaccatgttggccaggctggtcttgaactcctgacctcaggcgatctgcccgccttggcctcccaaagtactgggattacaggcgtgagcaactgctcctggcccaaaacatctctttctacatacacttgagtaggtggcataaaatgcactgtcaatatatagaaaacatgaaattttccaaatatttccgatcagagaatcacaagagcagcaaatgtggtttcatcaagtgggaagaaagcagcaatttaaaataactttttgggagactgaattgagtaataataaaacttcagtctttcgctaataataataataataataataataacaacaacttattgaatgtggccagctcactagatgaggaaagaggaaggcattttctgcattcttgcctagttttccttataagcaccactaagttaatagctctgtctttttggtgtttgcactatgtaatgcttttaatactttttaattgtgcttttttatgtattaaatgtttttccttttgccaaaaaaaaaaaaaa

SEQ ID NO: 1718 - DNA, 4638 bp, Homo Sapiens
  NM_002396
accgtgggccacgccttccgggccccgcggctggccggctcctcgcgccctcccctctctcggccgctcttcgggccgcctctgcgtgtggggccgcccgcgccagtgtgagcctgagctgacggcggctccgggaggctcgcagaaggggagggccgggcggcgcgggagctgagcatcgccagggcgggcggcagggcgcggcctctccgccgggtgtaccacctgtcgcggcgcgagacctctggtgaaagaaaagatgttgtcccggttaagagtagtttccaccacttgtactttggcatgtcgacatttgcacataaaagaaaaaggcaagccacttatgctgaacccaagaacaaacaagggaatggcatttactttacaagaacgacaaatgcttggtcttcaaggacttctacctcccaaaatagagacacaagatattcaagccttacgatttcatagaaacttgaagaaaatgactagccctttggaaaaatatatctacataatgggaatacaagaaagaaatgagaaattgttttatagaatactgcaagatgacattgagagtttaatgccaattgtatatacaccgacggttggtcttgcctgctcccagtatggacacatctttagaagacctaagggattatttatttcgatctcagacagaggtcatgttagatcaattgtggataactggccagaaaatcatgttaaggctgttgtagtgactgatggagagagaattctgggtcttggagatctgggtgtctatggaatgggaattccagtaggaaaactttgtttgtatacagcttgtgcaggaatacggcctgatagatgcctgccagtgtgtattgatgtgggaactgataatatcgcactcttaaaagacccattttacatgggcttgtaccagaaacgagatcgcacacaacagtatgatgacctgattgatgagtttatgaaagctattactgacagatatggccggaacacactcattcagttcgaagactttggaaatcataatgcattcaggttcttgagaaagtaccgagaaaaatattgtactttcaatgatgatattcaagggacagctgcagtagctctagcaggtcttcttgcagcacaaaaagttattagtaaaccaatctccgaacacaaaatcttattccttggagcaggagaggctgctcttggaattgcaaatcttatagttatgtctatggtagaaaatggcctgtcagaacaagaggcacaaaagaaaatctggatgtttgacaagtatggtttattagttaagggacggaaagcaaaaatagatagttatcaggaaccatttactcactcagccccagagagcatacctgatacttttgaagatgcagtgaatatactgaagccttcaactataattggagttgcaggtgctggccgtcttttcactcctgatgtaatcagagccatggcctctatcaatgaaaggcctgtaatatttgcattaagtaatcctacagcacaggcagagtgcacggctgaagaagcatatacacttacagagggcaggtgtttgtttgccagtggcagtccatttgggccagtgaaacttacagatgggcgagtctttacaccaggtcaaggaaacaatgtttatatttttccaggtgtggctttagctgttattctctgtaacacccggcatattagtgacagtgttttcctagaagctgcaaaggccctgacaagccaattgacagatgaagagctagcccaagggagactttacccaccgcttgctaatattcaggaagtttctattaacattgctattaaagttacagaatacctatatgctaataaaatggctttccgatacccagaacctgaagacaaggccaaatatgttaaagaaagaacatggcggagtgaatatgattccctgctgccagatgtgtatgaatggccagaatctgcatcaagccctcctgtgataacagaatagaagcactcccctgataaatactttctgtgctccagggaaccccttttttcagacaagaagagataatgtcttcagttttatggtgttttctgtgttttgttctccctgaccactttggttgatgtattttttccatgcgtctccacatctgttggggtagacgtgttgattgattgcattgcccaccagcaccctacagtcagatagttgtgatgctttaattctaacatacagcccgtaccacatccaggagatgtaaaaagtgtgtttgtgaatgtcttcacttgtactctaattcagacttgccaaagtatttgctatttactattatgggtaatactcttctctggcctagttcttacagagctactaaaatagaaatttacttttatggatagaagtacagaattttgagaagaaactaaattttcaccaaattttaaggaaaaattgtcattatctaaaaatgttcttatatatctgcttcatcttaccttcatactctgaaattccctatagcagacagagctagggaaatattaaaaatttaccctatttattttctggaactaaatcaagccttaactataacattatgagagtaatgggaactactgctggctttaagtaaataaaagtcattgttttcaacagtgtataaaaatcatagtgtaacctttttatttaataaatatcttacatttaattgcttcagttatgctatcttattgcccaactagaaatttagatttgcttatgaaaaacacatatttttgttacttctagatgattctaggagggagtataagatacctaatcatatgggaacatcacgtgactttttaaatctaaattagtcatgcttcacatcaaaatgagtcatatttaactggagaaactatgcccttattccagaactgatgctctttattgcttgagataattttggaatgttactatgatactgtttctttgaatatcattagtagtgacaactctttctccattgaaggcagacttaatttttttaaaccaccaacattaatttagagctaaatggggatgaataaggttggtgttcatctgggaaatgccttttttaatcccagtaaaatgggtaataatggctatccagaacagttttcttgtgtggcttgcatattgaagaattctaaaggaaaatatatctgcctaccatgcttgctcttagggaagaaaacttaaatgctcattctaggatagtaacaacaacagataattcatcgataatatgagcatgcacagtatttgatattgctctgtaggaaaaaagagacttcatttttttcatcttctgcctatgaatacaaattgattctttttttttttttttttttttgagacagagtctcactctgttaccaggctggagtgcagtggtgtgatctcagctcactgcaacctctgcctcccaggttcaagcagttctcctgcctcagcctcccaagtagctgggactacaggtacacgccaccacgcccagctaatttttgtatttttagtagagacgggatttcaccatgttggccaggagggtctcgatttcctgacctcgcgatccgcccacctcagccttccaaagtgctgggattacaggcgtgagccaccgcacccagccaattttttttttttttttttttgagacagagtctcgcttttgtcgcccagtctggagtgtagtggcatgatctctgcaacctctgcctcctcggttcaggcgattcttctgccttagcctcccaagtagctgggattacaggcaccggccaccacacccagctaatttttgtatttttagtagagatggggtttcaccatgttggccaggctggtctcaaaatcctgacttcaggtgatccacccactttggcctcccaaagtgctgggattacaggcgtgagccaccacacctggtccaattcatcataattctgaatataatttaataattttaaaatggtcgcaatggcattgccatttggagtatgggaaaatgcagttggttaattcattgaacagattagtaaagtcagaagtctttttcataacatacggtcacaattcctttcttttaattaaagacaaaaggtttatgggttttggtttgtttgttttagatatggggttttgctatgtcacccttgctggagggcggtggctgttcacaggcgtgggtcatagagcactgcagcctggaactcctgggttcaagctctcctcctgcctcagcctcctgagcagcttggactaaaggtgtgcaccaccgcacctggctgagaggcttctgtttttcatgttccctttatcaaaacaaaatcacgcctaaacatactctctgtgtgaaatcttgattttagttcaacctaagaaatataataaatataaacctgtttcttgcttagtgtttattgaaggcaggaacgtatgctgaattaaagtaattttactacgaagtttgcttattaagtatgcctggtacagtcttcatggaagttattaagtattttaaggaaaaaaataggctaaatggcatatagcctgcttaaataaaataattctatttttttaaaaaaaaaaaaaaaaaa

SEQ ID NO: 1719 - DNA, 6449 bp, Homo Sapiens
  NM_002397
gagctgttctccttttcccattcgtcttctgtcacttccttcctggacgcagttttctggacgagtctggttacttttaatccgaccggccgctgagagccactttctcctcctcctcctcctcctccttctcttcctcctccttcttcctcctcctcctcctcttccgagcggcctcggcgcgcgcgaatgcgcggccccgcgccccccccctcgcgcgcgctcccctcgcgcgcgcgcacacacgcacacatcgtctccagctctctgctcgctctgctcgcagtcacagacacttgagcacacgcgtacacccagacatcttcgggctgctattggattgactttgaaggttctgtgtgggtcgccgtggctgcatgtttgaatcaggtggagaagcacttcaacgctggacgaagtaaagattattgttgttattttttttttctctctctctctctcttaagaaaggaaaatatcccaaggactaatctgatcgggtcttccttcatcaggaacgaatgcaggaatttgggaactgagctgtgcaagtgctgaagaaggagatttgtttggaggaaacaggaaagagaaagaaaaggaaggaaaaaatacataatttcagggacgagagagagaagaaaaacggggactatggggagaaaaaagattcagattacgaggattatggatgaacgtaacagacaggtgacatttacaaagaggaaatttgggttgatgaagaaggcttatgagctgagcgtgctgtgtgactgtgagattgcgctgatcatcttcaacagcaccaacaagctgttccagtatgccagcaccgacatggacaaagtgcttctcaagtacacggagtacaacgagccgcatgagagccggacaaactcagacatcgtggagacgttgagaaagaagggccttaatggctgtgacagcccagaccccgatgcggacgattccgtaggtcacagccctgagtctgaggacaagtacaggaaaattaacgaagatattgatctaatgatcagcaggcaaagattgtgtgctgttccacctcccaacttcgagatgccagtctccatcccagtgtccagccacaacagtttggtgtacagcaaccctgtcagctcactgggaaaccccaacctattgccactggctcacccttctctgcagaggaatagtatgtctcctggtgtaacacatcgacctccaagtgcaggtaacacaggtggtctgatgggtggagacctcacgtctggtgcaggcaccagtgcagggaacgggtatggcaatccccgaaactcaccaggtctgctggtctcacctggtaacttgaacaagaatatgcaagcaaaatctcctcccccaatgaatttaggaatgaataaccgtaaaccagatctccgagttcttattccaccaggcagcaagaatacgatgccatcagtgtctgaggatgtcgacctgcttttgaatcaaaggataaataactcccagtcggctcagtcattggctaccccagtggtttccgtagcaactcctactttaccaggacaaggaatgggaggatatccatcagccatttcaacaacatatggtaccgagtactctctgagtagtgcagacctgtcatctctgtctgggtttaacaccgccagcgctcttcaccttggttcagtaactggctggcaacagcaacacctacataacatgccaccatctgccctcagtcagttgggagcttgcactagcactcatttatctcagagttcaaatctctccctgccttctactcaaagcctcaacatcaagtcagaacctgtttctcctcctagagaccgtaccaccaccccttcgagatacccacaacacacgcgccacgaggcggggagatctcctgttgacagcttgagcagctgtagcagttcgtacgacgggagcgaccgagaggatcaccggaacgaattccactcccccattggactcaccagaccttcgccggacgaaagggaaagtccctcagtcaagcgcatgcgactttctgaaggatgggcaacatgatcagattattacttactagtttttttttttttcttgcagtgtgtgtgtgtgctataccttaatggggaaggggggtcgatatgcattatatgtgccgtgtgtggaaaaaaaaaaagtcaggtactctgttttgtaaaagtacttttaaattgcctcagtgatacagtataaagataaacagaaatgctgagataagcttagcacttgagttgtacaacagaacacttgtacaaaatagattttaaggctaacttcttttcactgttgtgctcctttgcaaaatgtatgttacaatagatagtgtcatgttgcaggttcaacgttatttacatgtaaatagacaaaaggaaacatttgccaaaagcggcagatctttactgaaagagagagcagctgttatgcaacatatagaaaaatgtatagatgcttggacagacccggtaatgggtggccattggtaaatgttaggaacacaccaggtcacctgacatcccaagaatgctcacaaacctgcaggcatatcattggcgtatggcactcattaaaaaggatcagagaccattaaaagaggaccatacctattaaaaaaaaatgtggagttggagggctaacatatttaattaaataaataaataaatctgggtctgcatctcttattaaataaaaatataaaaatatgtacattacattttgcttattttcatataaaaggtaagacagagtttgcaaagcatttgtggctttttgtagtttacttaagccaaaatgtgtttttttccccttgatagcttcgctaatattttaaacagtcctgtaaaaaaccaaaaaggactttttgtatagaaagcactaccctaagccatgaagaactccatgctttgctaaccaagataactgttttctctttgtagaagttttgtttttgaaatgtgtatttctaattatataaaatattaagaatcttttaaaaaaatctgtgaaattaacatgcttgtgtatagctttctaatatatataatattatggtaatagcagaagttttgttatcttaatagcgggaggggggtatatttgtgcagttgcacatttgagtaactattttctttctgttttcttttactctgcttacattttataagtttaaggtcagctgtcaaaaggataacctgtggggttagaacatatcacattgcaacaccctaaattgtttttaatacattagcaatctattgggtcaactgacatccattgtatatactagtttctttcatgctatttttattttgttttttgcatttttatcaaatgcagggcccctttctgatctcaccatttcaccatgcatcttggaattcagtaagtgcatatcctaacttgcccatattctaaatcatctggttggttttcagcctagaatttgatacgctttttagaaatatgcccagaatagaaaagctatgttggggcacatgtcctgcaaatatggccctagaaacaagtgatatggaatttacttggtgaataagttataaattcccacagaagaaaaatgtgaaagactgggtgctagacaagaaggaagcaggtaaagggatagttgctttgtcatccgtttttaattattttaactgacccttgacaatcttgtcagcaatataggactgttgaacaatcccggtgtgtcaggacccccaaatgtcacttctgcataaagcatgtatgtcatctattttttcttcaataaagagatttaatagccatttcaagaaatcccataaagaacctctctatgtccctttttttaatttaaaaaaaatgactcttgtctaatattcgtctataagggattaattttcagaccctttaataagtgagtgccataagaaagtcaatatatattgtttaaaagatatttcagtctaggaaagattttccttctcttggaatgtgaagatctgtcgattcatctccaatcatatgcattgacatacacagcaaagaagatataggcagtaatatcaacactgctatatcatgtgtaggacatttcttatccattttttctcttttacttgcatagttgctatgtgtttctcattgtaaaaggctgccgctgggtggcagaagccaagagaccttattaactaggctatatttttcttaacttgatctgaaatccacaattagaccacaatgcacctttggttgtatccataaaggatgctagcctgccttgtactaatgttttatatattaaaaaaaaaaaatctatcaaccatttcatatatatcccactactcaaggtatccatggaacatgaaagaataacatttatgcagaggaaaaacaaaaacatccctgaaaatatacacactcatacacacacacgcacaggggaataaaataagaaaatcattttcctcaccatagacttgatcccatccttacaacccatccttctaacttgatgtgtataaaatatgcaaacatttcacaaatgttctttgtcatttcaaaatactttagtatatcaatatcagtagataccagtgggtgggaaagggtcattacatgaaaatatgaagaaatagccatattagttttttaacctgcaatttgcctcagcaacaaagaaaaagtgaatttttaatgctgaagataaagtaagctaaagtaccagcagaagccttggctatttatagcagttctgacaatagttttataagaacatgaagagaacagaatcacttgaaaatggatgccagtcatctcttgttcccactactgaattcttataaagtggtggcaagatagggaagggataatctgagaatttttaaaagatgatttaatgagaagaagcacaattttgattttgatgagtcactttctgtaaacaatcttggtctatctttacccttataccttatctgtaatttaccatttattgtatttgcaaagctagtatggtttttaatcacagtaaatcctttgtattccagactttagggcagagccctgagggagtattattttacataacccgtcctagagtaacattttaggcaacattcttcattgcaagtaaaagatccataagtggcattttacacggctgcgagtattgttatatctaatcctattttaaaagatttttggtaatatgaagcttgaatactggtaacagtgatgcaatatacgcaagctgcacaacctgtatattgtatgcattgctgcgtggaggctgtttatttcaacctttttaaaaattgtgttttttagtaaaatggcttattttttcccaaaggtggaatttagcattttgtaatgatgaatataaaaatacctgtcatccccagatcatttaaaagttaactaaagtgagaatgaaaaaacaaaattccaagacactttttaaaagaatgtctgccctcacacacttttatggatttgtttttcttacatacccatcttttaacttagagatagcattttttgccctctttattttgttgtttgtttctccagagagtaaacgctttgtagttctttctttaaaaaacattttttttaaagaagaagaagccacttgaaccctcaataaaggctgttgcctaagcatggcatacttcatctgttctcatttgtgccatctgccgtgatgtcgtcacttttatggcgttaatttcctgccactacagatcttttgaagattgctggaatactggtgtctgttagaatgcttcagactacagatgtaattaaaggcttttcttaatatgttttaaccaaagatgtggagcaatccaagccacatatcttctacatcaaatttttccattttggttattttcataatctggtattgcattttgccttccctgttcatacctcaaattgattcatacctcagtttaattcagagaggtcagttaagtgacggattctgttgtggtttgaatgcagtaccagtgttctcttcgagcaaagtagacctgggtcactgtaggcataggacttggattgcttcagatggtttgctgtatcatttttcttctttttcttttcctggggacttgtttccattaaatgagagtaattaaaatcgcttgtaaatgagggcatacaagcatttgcaacaaatattcaaatagaggctcacagcggcataagctggactttgtcgccactagatgacaagatgttataactaagttaaaccacatctgtgtatctcaagggacttaattcagctgtctgtagtgaataaaagtgggaaattttcaaaagtttctcctgctggaaataaggtataatttgtattttgcagacaattcagtaaagttactggctttcttagtgaaaaaaaaaaa

SEQ ID NO: 1720 - DNA, 2129 bp, Homo Sapiens
  NM_002405
ggctaagcggggcggggccaggcggtcccggaggctgcggcaggccggacagcgggagcaggtggaggactggcggcggtcgagatcgtgctgccatggctcagcctctgggtccagagcctcagctcctacctcttccctccttgccagcccctgatgcctgccagacttttgcctctgctggagcccctgcctgaccagcttcccctccctgtctggttgggatttgggggctgagctgtctggggtcccagggccaaccaatgcagtgccggctcccgcggggcctggctggagccctcctcaccctcctgtgcatggggctcctgtgtctgcggtaccacttgaacctgtccccgcagcgggtacaagggacccccgagctgagccagccgaacccggggccccctaagctacagctacacgatgtcttcattgcagtgaagacgacccgggctttccaccgcttgcgcctggagctgctgcttgacacgtgggtttccaggaccagggaacagacatttgtcttcaccgacagcccagacaaaggcctccaggagagactggggtcccaccttgtggtcaccaactgctccgcggaacacagccacccagctctgtcctgcaagatggctgctgagttcgacaccttcttggccagtgggcttaggtggttctgccatgtggacgatgacaactatgtgaacccaagggcgctgctgcagcttctgagagccttcccgctggcccgcgacgtctatgtgggaaggcccagcctgaaccggcccatccatgcctcagagccacagccccacaaccgcacgaggctggtacagttctggtttgccactgggggtgctggcttctgcatcaatcgcaaactggctttgaagatggctccgtgggccagtggctcccgtttcatggacacatctgctctcatccggctgcctgatgactgcaccatgggctatatcattgagtgcaagctgggcggccgcctgcagcccagccccctctttcactcccacctggagaccctgcagctgctgaggactgcacagctcccagaacaggtcaccctcagctacggtgtctttgaggggaaactcaacgtcattaagctacagggccccttctccccggaggaggacccctccagatttcgctccctccattgtctgctctatccagatacaccctggtgtccccagctgggtgcccgatgaatcctgaactgctgggcaaaggttgggcagagacttctgggtgtgccttggctcccaaggtggcactgtgggtccctggcaagtgtcttgtgataggcagtccctggcagggccttcgggtggttggcaagcccaggatctgagtggcaattggcactgaaggcaccccaggcccctgggaggtgagttagacagcccaggggaccaggtggaccaggtggtggccagagaggctccaggggctagactccctcaggaggctgaattgaaaaagggcagggggcacttgagctgggctggggctcaggggtcctaaccctttaggcagtgacatggcctctgggtggggtctggccgttggccctggctaatgtctctcagtcattcccctggggctcaagcgctgggccgcccactcctgcctccctcatctgtgtcccgagttcctgaagggacatgggtggaatgatggcagaatccagggtctgcagcacctgctgttgttgccaaccagtctcccaaagctccttgctccccaccccttgcgaacaggaccagattttgtttggagcctcagcatgccggggcccagatgatggagcataacgggtcccagccaattgtgatgatcctttttgctcatttcccagcctttcttgctgttaggggctaccatgggaccagctctggccagagggaactaagcaaatccaatagagatgtttctggggaaggttttgcagcccactccccatcttcctgctataaatgtgggtgtgatggctggatctggggcagccaccttgctaccatgaaggaaaggccaagacaatcatccacagctattccctccagcatctggttctgtacaaaaattaaatgcttatttgtttaagtctc

SEQ ID NO: 1721 - DNA, 2728 bp, Homo Sapiens
  NM_002408
gggccggagggccgcggtgtgccgcggggcagttgcgggttgtcataacggtccccgccggagtgaggcgaggccgcgtcgctcagttctggccgtctagggcccctgtaaggatgagagcgcagaggacgcagggccgctggaggcgcaggtaacgaagctagggtgcggttgggaccgcggctgagctttttccgggacccgtggtgctgaatggagaggacggagacgaagccgagccgcggctcctagcggcggcgccgatgctcgagctgtagctgccaggcgaggatgtgtggagcgcaggcggcgcggggtaaatgagaggtctcgggccccaggacccccggggcccgggatgagttagcgagggcagccgcgggggccagttccgaccgtgacaggccaaggcgacggccgccgcccgcccgccccttccgtgcagaagcagctgctcctttccgcgcccgcccgcctgcgctcccggccctggagaccatgaggttccgcatctacaaacggaaggtgctaatcctgacgctcgtggtggccgcctgcggcttcgtcctctggagcagcaatgggcgacaaaggaagaacgaggccctcgccccaccgttgctggacgccgaacccgcgcggggtgccggcggccgcggtggggaccacccctctgtggctgtgggcatccgcagggtctccaacgtgtcggcggcttccctggtcccggcggtcccccagcccgaggcggacaacctgacgctgcggtaccggtccctggtgtaccagctgaactttgatcagaccctgaggaatgtagataaggctggcacctgggccccccgggagctggtgctggtggtccaggtgcataaccggcccgaatacctcagactgctgctggactcacttcgaaaagcccagggaattgacaacgtcctcgtcatctttagccatgacttctggtcgaccgagatcaatcagctgatcgccggggtgaatttctgtccggttctgcaggtgttctttcctttcagcattcagttgtaccctaacgagtttccaggtagtgaccctagagattgtcccagagacctgccgaagaatgccgctttgaaattggggtgcatcaatgctgagtatcccgactccttcggccattatagagaggccaaattctcccagaccaaacatcactggtggtggaagctgcattttgtgtgggaaagagtgaaaattcttcgagattatgctggccttatacttttcctagaagaggatcactacttagccccagacttttaccatgtcttcaaaaagatgtggaaactgaagcagcaagagtgccctgaatgtgatgttctctccctggggacctatagtgccagtcgcagtttctatggcatggctgacaaggtagatgtgaaaacttggaaatccacagagcacaatatgggtctagccttgacccggaatgcctatcagaagctgatcgagtgcacagacactttctgtacttatgatgattataactgggactggactcttcaatacttgactgtatcttgtcttccaaaattctggaaagtgctggttcctcaaattcctaggatctttcatgctggagactgtggtatgcatcacaagaaaacctgtagaccatccactcagagtgcccaaattgagtcactcttaaataataacaaacaatacatgtttccagaaactctaactatcagtgaaaagtttactgtggtagccatttccccacctagaaaaaatggagggtggggagatattagggaccatgaactctgtaaaagttatagaagactgcagtgaaaatcacagttacaaaagcgacagtcttctatttttgatatttgtccaaacaggacatacaattgaataaaagagtttaggaactggtttctgctttaatacaaaaacaaaatcttgtaaaaggtgtccaaatacatagtaatcttttccagttatgtctgattaagatttaaaactgaaggtttcattttgggagtagggttttaaagctcaatctgttatctgctaaaattgattattgttgatatgagagaagaggggaaattttatttaaattgcatttattaatctttttatctgaaactttgtacacttttccactttcaaaacctattttaagtacagcaaaatttatttaaaactgtcatagcagtaaaaagtattacgatgaaattgttagggtattaatggaacaaacccagtttcactctcttgacacacttattaggaagggattgcttcactggtttaataatttaaaagttatgtttgttaaacaccctgtcagaacagtcattttcagtattagattcctgtactattgtgttttgagtgtgttttggaaccttcatagaacacactttcttttggaatgtatttgattgataagaaagtttaaacattgttttcacctcaatgtagaaatacagtggttttgtttttttttttcttttagtgctgacaaaataaaatactcatttttgcataaaaaggttcctaatccttttgcagaataagttttgtttactctttataccaaaattcagtgaaggcattctacaagttttgagttagcattacattttaatatttactattgctacattgtataattgagtttgaaataaaacccagcttatgacaatgcaaaaaaaaaaaaaaaaaa

SEQ ID NO: 1722 - DNA, 1265 bp, Homo Sapiens
  NM_002412
ctcggccccgcccccgcgccccggatatgctgggacagcccgcgcccctagaacgctttgcgtcccgacgcccgcaggtcctcgcggtgcgcaccgtttgcgacttggtacttggaaaaatggacaaggattgtgaaatgaaacgcaccacactggacagccctttggggaagctggagctgtctggttgtgagcagggtctgcacgaaataaagctcctgggcaaggggacgtctgcagctgatgccgtggaggtcccagcccccgctgcggttctcggaggtccggagcccctgatgcagtgcacagcctggctgaatgcctatttccaccagcccgaggctatcgaagagttccccgtgccggctcttcaccatcccgttttccagcaagagtcgttcaccagacaggtgttatggaagctgctgaaggttgtgaaattcggagaagtgatttcttaccagcaattagcagccctggcaggcaaccccaaagccgcgcgagcagtgggaggagcaatgagaggcaatcctgtccccatcctcatcccgtgccacagagtggtctgcagcagcggagccgtgggcaactactccggaggactggccgtgaaggaatggcttctggcccatgaaggccaccggttggggaagccaggcttgggagggagctcaggtctggcaggggcctggctcaagggagcgggagctacctcgggctccccgcctgctggccgaaactgagtatgtgcagtaggatggatgtttgagcgacacacacgtgtaacactgcatcggatgcggggcgtggaggcaccgctgtattaaaggaagtggcagtgtcctgggaacaagcgtgtctgccctttctgtttccatattttacagcaggatgagttcagacgcccgcggtcctgcacacatttgtttccttctctaacgctgcccttgctctatttttcatgtccattaaaacaggccaagtgagtgtggaaggcctggctcatgttgggccacagcccaggatggggcagtctggcaccctcaggccacagacggctgccatagccgctgtccagggccagctaaggcccatcccaggccgtccacactagaaagctggccctgccccatccccaccatgcctcccttcctggctgtgtccatggctgtgatggcattctccactcagcagttcctagcatcccacacccaggtctcactgaaagaaaggggaacaggccatggcagtcagtgcttacagag

SEQ ID NO: 1723 - DNA, 561 bp, Homo Sapiens
  NM_002415
accacagtggtgtccgagaagtcaggcacgtagctcagcggcggccgcggcgcgtgcgtctgtgcctctgcgcgggtctcctggtccttctgccatcatgccgatgttcatcgtaaacaccaacgtgccccgcgcctccgtgccggacgggttcctctccgagctcacccagcagctggcgcaggccaccggcaagcccccccagtacatcgcggtgcacgtggtcccggaccagctcatggccttcggcggctccagcgagccgtgcgcgctctgcagcctgcacagcatcggcaagatcggcggcgcgcagaaccgctcctacagcaagctgctgtgcggcctgctggccgagcgcctgcgcatcagcccggacagggtctacatcaactattacgacatgaacgcggccaatgtgggctggaacaactccaccttcgcctaagagccgcagggacccacgctgtctgcgctggctccacccgggaacccgccgcacgctgtgttctaggcccgcccaccccaaccttctggtggggagaaataaacggtttagagact

SEQ ID NO: 1724 - DNA, 3056 bp, Homo Sapiens
  NM_002424
gacacatgatgctgtgaacgtcagggtgctcgccagggaagggccctacccagagggacagaaagaaagccaggaggggtagagtttgaagagaagatcatgttctccctgaagacgcttccatttctgctcttactccatgtgcagatttccaaggcctttcctgtatcttctaaagagaaaaatacaaaaactgttcaggactacctggaaaagttctaccaattaccaagcaaccagtatcagtctacaaggaagaatggcactaatgtgatcgttgaaaagcttaaagaaatgcagcgattttttgggttgaatgtgacggggaagccaaatgaggaaactctggacatgatgaaaaagcctcgctgtggagtgcctgacagtggtggttttatgttaaccccaggaaaccccaagtgggaacgcactaacttgacctacaggattcgaaactataccccacagctgtcagaggctgaggtagaaagagctatcaaggatgcctttgaactctggagtgttgcatcacctctcatcttcaccaggatctcacagggagaggcagatatcaacattgctttttaccaaagagatcacggtgacaattctccatttgatggacccaatggaatccttgctcatgcctttcagccaggccaaggtattggaggagatgctcattttgatgccgaagaaacatggaccaacacctccgcaaattacaacttgtttcttgttgctgctcatgaatttggccattctttggggctcgctcactcctctgaccctggtgccttgatgtatcccaactatgctttcagggaaaccagcaactactcactccctcaagatgacatcgatggcattcaggccatctatggactttcaagcaaccctatccaacctactggaccaagcacacccaaaccctgtgaccccagtttgacatttgatgctatcaccacactccgtggagaaatacttttctttaaagacaggtacttctggagaaggcatcctcagctacaaagagtcgaaatgaattttatttctctattctggccatcccttccaactggtatacaggctgcttatgaagattttgacagagacctcattttcctatttaaaggcaaccaatactgggctctgagtggctatgatattctgcaaggttatcccaaggatatatcaaactatggcttccccagcagcgtccaagcaattgacgcagctgttttctacagaagtaaaacatacttctttgtaaatgaccaattctggagatatgataaccaaagacaattcatggagccaggttatcccaaaagcatatcaggtgcctttccaggaatagagagtaaagttgatgcagttttccagcaagaacatttcttccatgtcttcagtggaccaagatattacgcatttgatcttattgctcagagagttaccagagttgcaagaggcaataaatggcttaactgtagatatggctgaagcaaaatcaaatgtggctgtatccactttcagaatgttgaagggaagttcagcaagcattttcgttacattgtgtcctgcttatacttttctcaatattaagtcattgtttcccatcactgtatccattctacctgtcctccgtgaaaatatgtttggaatattccactatttgcagaggcttattcagttcttacacattccatcttacattagtgattccatcaaagagaaggaaagtaagcctttttgtcacctcaatatttactatttcaatacttacatatctgacttctaggatttattgttatattacttgcctatctgacttcatacatccctcagtttcttaaaatgtcctatgtatatcttctacatgcaatttagaactagattttggttagaagtaaggattataaacaacctagacagtacccttggcctttacagaaaatatggtgctgttttctacccttggaaagaaatgtagatgatatgtttcgtgggttgaattgtgtcccccataaaagatatgttgaagttctaaccccaggtacccatgaatgtgagcttaccagggtctttgcagatgtaattagttaagttaaggtgagatcacactgaattagggtgggctctaaatccattatgactgttgttcttataagaagaagagaggcatagtcacctaggggaggaggccgtatgaagacagaggcagagattggagtgacgcatctccaagccaaggaattccaaggactgtaagccaccagtagaagctttgaagaggcaaggaaggattccctccaatagccttcaagtgtgaccctgctgacacctgcagaattcggacttctatcctccaaaaccgtgagggaataaatttcctttgttttaagccaccaactttgcaatactttgttacagcaaccctagacatgaggtactagacacagtacatctacacatatgaaaatgaatcaacacagaatgcagaagtagaacccttgctaaggactactgggcatcttcccaggacagcagccaaaagagaaccaccacttcctctcctgcctcctccttgctctctcctagagtccaaacccaaatgggccagttggatctgatgttcgtcagttctttacttctatttcctggggtactcaggagggcacacactatagataacttgggttagctgcataaaattcaatgtctcattaagttgcattaaactgagcttagatgtgtaagtttgctaacggatgggtttttttgttaagaactataggatttatgggaccaagtctagcgagtccagatatcaaaatcattataatgttatatttgctgttattagaatataatatagcttattatacaataaatatgtagactgtaaaatatatttctcactagtacctcctattttctttctctgttgaagtttttaaatcccacagataattaaattggcacctttatgcttgttcaaaaattaaaataatctattaaataagttcaaattaaagatttttacttcaaatgac

SEQ ID NO: 1725 - DNA, 1771 bp, Homo Sapiens
  NM_002435
cgagcatggccgctccgcgagtattcccactttcctgtgcggtgcagcagtatgcctgggggaagatgggttccaacagcgaagtggcgcggctgttggccagcagtgatccactggcccagatcgcagaggacaagccttatgcagagttgtggatggggactcacccccgaggggatgccaagatccttgacaaccgcatctcacagaagaccctaagccagtggattgctgagaaccaggacagcttgggctcaaaggtcaaggacacctttaatggcaacctgcccttcctcttcaaagtgctctcagttgaaacacccctgtccatccaggcacaccctaacaaggagctggcagagaagctgcacctccaggctccgcagcactaccccgatgccaaccacaagccagagatggccattgccctcacccccttccagggcttgtgtggcttccggccagttgaggagattgtaacctttctaaagaaggtgcctgagtttcagttcctgattggagatgaggcagcaacacacctgaagcagaccatgagccatgactcccaggctgtggcctcctctctgcagagctgtttctcccacctgatgaagagtgagaagaaggtggtggtggaacagctcaacctgttggtgaagcggatctcccagcaagcggctgccggaaacaacatggaggacatctttggggagcttttgctacagctgcaccagcagtacccaggtgatatcggctgctttgccatctacttcctgaacctgcttaccctgaagcctggggaggccatgtttctggaggccaacgtaccccatgcctacctgaaaggagactgcgtggagtgcatggcgtgttcagacaacacagttcgtgctggcctgacacccaagttcattgatgtgccaaccctgtgtgaaatgctcagctatacccctagctccagcaaggacaggctctttctcccaacacggagtcaggaagacccctacctctcaatctatgacccccctgtaccagacttcaccattatgaagacggaggtccctggctctgtcactgaatacaaggtcttggcactggactctgccagcatcctcctgatggtacaggggacagtaatagccagcacacccacaacccagacaccaatccctctgcaacgtggtggcgtgctcttcattggggccaatgagagtgtctcactgaagcttactgagccgaaggacctgctgatattccgtgcctgctgtctgctgtaaaggctgcagcctccccagctctcctctgccagccaccctaaattccagccaacctcacctcctcgggcccagctcaagcccccttccttgctctggaccccttaggtataccctggaagagctggggtgggggaggagggagcgtgaaggtagtgactcctgaacacacccaggtggaaccatctttggggaggagaggcccgtgtgaggggtctgatactccctttgtcttccctctctactcctcgctacacctgagccaggctcttgccaactctgttccagcctatggctttaggctagctgttaaatatgtgacccagcattagctcagcatctgtcagagcaagagaccaggtaatttctaagaacagggttctagcgatgggactgcccatttcctcagctgcagaggaggaaagggaaagggtaggcctgtagactaacgctgtttacacccttgttctgtcaaagcaattaaagatcacttgtgt

SEQ ID NO: 1726 - DNA, 2067 bp, Homo Sapiens
  NM_002436
agctccgtccgcgccctcccggcgcaccgcctgcggggcggtgactggcccagccgcaccgcgtctcccgccttctccgcagccccgcaggccccgggccctgtcattcccagcgctgccctgtcttgcgttccagtgttccagcttctgcgagatgaccctcaaggcgagcgagggcgagagtgggggcagcatgcacacggcgctctccgacctctacctggagcatttgctgcagaagcgtagtcggccagaggctgtatcgcatccattgaatactgtgaccgaggacatgtacaccaacgggtctcctgccccaggtagccctgcccaggtcaagggacaggaggtgcggaaagtgcgactcatacagtttgagaaggtcacagaagagcccatgggaatcacgctgaagctgaatgaaaaacagtcctgtacggtggccagaattcttcatggtggcatgatccatagacaaggctcccttcacgtgggggatgagatcctagaaatcaatggcacaaatgtgacaaatcattcagtggatcagctgcagaaggcgatgaaagaaaccaaaggaatgatctcattaaaagtaattcccaaccagcaaagccgtcttcctgcactacagatgttcatgagagcgcagtttgactatgatcccaaaaaggacaatctgatcccttgcaaggaggcgggactgaagtttgctactggggacattatccagattatcaacaaggatgacagcaattggtggcagggacgggtggaaggctcctccaaggagtcagcaggattgatcccttcccctgagctgcaggaatggcgagtggcaagtatggctcagtcagctcctagcgaagccccgagctgcagtccctttgggaagaagaagaagtacaaagacaaatatctggccaagcacagctcgatttttgatcagttggatgttgtttcctacgaggaagtcgttcggctccctgcattcaagaggaagaccctggtgctgatcggagccagtggggtgggtcgcagccacattaagaatgccctgctcagccagaatccggagaagtttgtgtaccctgtcccatatacaacacggccgccaaggaagagtgaggaagatgggaaggagtaccactttatctcaacggaggagatgacgaggaacatctctgccaatgagttcttggagtttggcagctaccaaggcaacatgtttggcaccaaatttgaaacagtgcaccagatccataagcagaacaagattgccatccttgacattgagccccagaccctgaaaattgttcggacagcagaactttcgcctttcattgtgttcattgcacctactgaccagggcactcagacagaagccctgcagcagctgcagaaggactctgaggccatccgcagccagtacgctcactactttgacctctcactggtcaataatggtgttgatgaaacccttaagaaattacaagaagccttcgaccaagcgtgcagttctccacagtgggtgcctgtctcctgggtttactaagcttgtagaatgggggaacccactgtatgcccctctccagcatttggaattccacccgccttgctttaagacaaacagggctgctccaactagttttgtgtcagcttccagctctctgcagctatcctaattcagccagtaaggttcagtcttcttgctcaggctcctgaagggttgattctcctgatagatggggccccactgatctggatttgaaaaggatttctagaaattgggggtaagaagtactaccaaaatgtaactgctaatcaagggtgatgcacagcaaaagcaatggaccccatccctctaaagcctgccctcctttgccttcaactgtatatgctgggtatttcatttgtctttttattttggagaaagcgtttttaactgcaactttctataatgccaaaatgacacatctgtgcaatagaatgatgtctgctctagggaaaccttcaaaagcaataaaaatgctgtgttgaaatgccaaaaaaaaaaaaaaaaaaaaa

SEQ ID NO: 1727 - DNA, 1051 bp, Homo Sapiens
  NM_002437
gcggaagttcctaggccagcctgtcacgtgggagggaggctcggcgctcaggaagcatggcactctggcgggcataccagcgggccctggccgctcacccgtggaaagtacaggtcctgacagctgggtccctgatgggcctgggtgacattatctcacagcagctggtggagaggcggggtctgcaggaacaccagagaggccggactctgaccatggtgtccctgggctgtggctttgtgggccctgtggtaggaggctggtacaaggttttggatcggttcatccctggcaccaccaaagtggatgcactgaagaagatgttgttggatcaggggggctttgccccgtgttttctaggctgctttctcccactggtaggggcacttaatggactgtcagcccaggacaactgggccaaactacagcgggattatcctgatgcccttatcaccaactactatctatggcctgctgtgcagttagccaacttctacctggtcccccttcattacaggttggccgttgtccaatgtgttgctgttatctggaactcctacctgtcctggaaggcacatcggctctaagcctgcctcactccatcgtttccaccttgcagtgatgcagcttgaccctggaacggtcagacaacctcctcaaagtgggcataccagtttccacggggttgggttgccggtcagagcttaagaggactagcaccctgcaatgcccctcttcactctaaaatgtacactgactgctttagagcccttgataatagtcttattcccaccacatactaggcactccataaatatctgttgaaccttcatgaccttatcaactttacacccatatcccagcaaatgccactcatccccactcttcatagacacatttgttactctaaccctgcctaggcttcttgtagctccagctctttagagactcccggaaccctttatatggtgcctcagtaaatatgttattaaatatgtaatccggaaaaaaaaaaaaaaaaaaaaaaaaaaaaaaaaaaaaaaaaaaaaaa

SEQ ID NO: 1728 - DNA, 2945 bp, Homo Sapiens
  NM_002441
agcggttaggagggcggggcgcgtgcgcgcgcacctcgctcacgcgccggcgcgctccttttgcaggctcgtggcggtcggtcagcggggcgttctcccacctgtagcgactcaggttactgaaaaggcgggaaaacgctgcgatggcggcagctgggggaggaggaagataagcgcgtgaggctggggtcctggcgcgtggttggcagaggcagagacataagacgtgcacgactcgccccacagggccctcagaccccttccttccaaaggagcctccaagctcatggcctccttaggagcgaacccaaggaggacaccgcagggaccgagacctggggcggcctcctccggcttccccagcccggccccagtgccgggccccagggaggccgaggaggaggaagtcgaggaggaggaggagctggccgagatccatctgtgtgtgctgtggaattcaggatacttgggcattgcctactatgatactagtgactccactatccacttcatgccagatgccccagaccacgagagcctcaagcttctccagagagttctggatgagatcaatccccagtctgttgttacgagtgccaaacaggatgagaatatgactcgatttctgggaaagcttgcctcccaggagcacagagagcctaaaagacctgaaatcatatttttgccaagtgtggattttggtctggagataagcaaacaacgcctcctttctggaaactactccttcatcccagacgccatgactgccactgagaaaatcctcttcctctcttccattattccctttgactgcctcctcacagttcgagcacttggagggctgctgaagttcctgggtcgaagaagaatcggggttgaactggaagactataatgtcagcgtccccatcctgggctttaagaaatttatgttgactcatctggtgaacatagatcaagacacttacagtgttctacagatttttaagagtgagtctcacccctcagtgtacaaagtggccagtggactgaaggaggggctcagcctctttggaatcctcaacagatgccactgtaagtggggagagaagctgctcaggctatggttcacacgtccgactcatgacctgggggagctcagttctcgtctggacgtcattcagttttttctgctgccccagaatctggacatggctcagatgctgcatcggctcctgggtcacatcaagaacgtgcctctgattctgaaacgcatgaagttgtcccacaccaaggtcagcgactggcaggttctctacaagactgtgtacagtgccctgggcctgagggatgcctgccgctccctgccgcagtccatccagctctttcgggacattgcccaagagttctctgatgacctgcaccatatcgccagcctcattgggaaagtagtggactttgagggcagccttgctgaaaatcgcttcacagtcctccccaacatagatcctgaaattgatgagaaaaagcgaagactgatgggacttcccagtttccttactgaggttgcccgcaaggagctggagaatctggactcccgtattccttcatgcagtgtcatctacatccctctgattggcttccttctttctattccccgcctgccttccatggtagaggccagtgactttgagattaatggactggacttcatgtttctctcagaggagaagctgcactatcgtagtgcccgaaccaaggagctggatgcattgctgggggacctgcactgcgagatccgggaccaggagacgctgctgatgtaccagctacagtgccaggtgctggcacgagcagctgtcttaacccgagtattggaccttgcctcccgcctggacgtcctgctggctcttgccagtgctgcccgggactatggctactcaaggccgcgttactccccacaagtccttggggtacgaatccagaatggcagacatcctctgatggaactctgtgcccgaacctttgtgcccaactccacagaatgtggtggggacaaagggagggtcaaagtcatcactggacccaactcatcagggaagagcatatacctcaaacaggtaggcttgatcacattcatggccctggtaggcagctttgtgccagcagaggaggccgaaattggggcagtagacgccatcttcacacgaattcatagctgcgaatccatctcccttggcctctccaccttcatgatcgacctcaaccaggtggcgaaagcagtgaacaatgccactgcacagtcgctggtccttattgatgaatttggaaagggaaccaacacggtggatgggctcgcgcttctggccgctgtgctccgacactggctggcacgtggacccacatgcccccacatctttgtggccaccaactttctgagccttgttcagctacaactgctgccacaagggcccctggtgcagtatttgaccatggagacctgtgaggatggcaacgatcttgtcttcttctatcaggtttgcgaaggtgttgcgaaggccagccatgcctcccacacagctgcccaggctgggcttcctgacaagcttgtggctcgtggcaaggaggtctcagacttgatccgcagtggaaaacccatcaagcctgtcaaggatttgctaaagaagaaccaaatggaaaattgccagacattagtggataagtttatgaaactggatttggaagatcctaacctggacttgaacgttttcatgagccaggaagtgctgcctgctgccaccagcatcctctgagagtccttccagtgtcctccccagcctcctgagactccggtgggctgccatgccctctttgtttccttatctccctcagacgcagagtttttagtttctctagaaattttgtttcatattaggaataaagtttattttgaagaaagaaaaaaaa

SEQ ID NO: 1729 - DNA, 4937 bp, Homo Sapiens
  NM_002451
ctccgcactgctcactcccgcgcagtgaggttggcacagccaccgctctgtggctcgcttggttcccttagtcccgagcgctcgcccactgcagattcctttcccgtgcagacatggcctctggcaccaccaccaccgccgtgaagattggaataattggtggaacaggcctggatgatccagaaattttagaaggaagaactgaaaaatatgtggatactccatttggcaagccatctgatgccttaattttggggaagataaaaaatgttgattgcgtcctccttgcaaggcatggaaggcagcacaccatcatgccttcaaaggtcaactaccaggcgaacatctgggctttgaaggaagagggctgtacacatgtcatagtgaccacagcttgtggctccttgagggaggagattcagcccggcgatattgtcattattgatcagttcattgacaggaccactatgagacctcagtccttctatgatggaagtcattcttgtgccagaggagtgtgccatattccaatggctgagccgttttgccccaaaacgagagaggttcttatagagactgctaagaagctaggactccggtgccactcaaaggggacaatggtcacaatcgagggacctcgttttagctcccgggcagaaagcttcatgttccgcacctggggggcggatgttatcaacatgaccacagttccagaggtggttcttgctaaggaggctggaatttgttacgcaagtatcgccatggcgacagattatgactgctggaaggagcacgaggaagcagtttcggtggaccgggtcttaaagaccctgaaagaaaacgctaataaagccaaaagcttactgctcactaccatacctcagatagggtccacagaatggtcagaaaccctccataacctgaagaatatggcccagttttctgttttattaccaagacattaaagtagcatggctgcccaggagaaaagaagacattctaattccagtcattttgggaattcctgcttaacttgaaaaaaatatgggaaagacatgcagctttcatgcccttgcctatcaaagagtatgttgtaagaaagacaagacattgtgtgtattagagactcctgaatgatttagacaacttcaaaatacagaagaaaagcaaatgactagtaaacatgtgggaaaaaatattacattttaagggggaaaaaaaaacccaccattctcttctccccctattaaatttgcaacaataaagggtggagggtaatctctactttcctatactgccaaagaatgtgaggaagaaatgggactctttggttatttattgatgcgactgtaaattggtacagtatttctggagggcaatttggtaaaatgcatcaaaagacttaaaaatacggacgtactttgtgctgggaactctacatctagcaatttctctttaaaaccatatcagagatgcatacaaagaattatatataaagaagggtgtttaataatgatagttataataataaataattgaaacaatctgaatcccttgcaattggaggtaaattatgtcttagttataattagattgtgaatcagccaactgaaaatcctttttgcatatttcaatgtcctaaaaagacacggttgctctatatatgaagtgaaaaaaggatatggtagcattttatagtactagttttgctttaaaatgctatgtaaatatacaaaaaaactagaaagaaatatatataaccttgttattgtatttgggggagggatactgggataatttttattttctttgaatctttctgtgtcttcacatttttctacagtgaatttaatcaaatagtaaagttgttgtaaaaataaaagtggatttagaaagatccagttcttgaaaacactgtttctggtaatgaagcagaatttaagttggtaatattaaggtgaatgtcatttaagggagttacatctttattctgctaaagaagaggatcattgatttctgtacagtcagaacagtacttgggtttgcaacagctttctgagaaaagctaggtgtttaatagtttaactgaaagtttaactatttaaaagactaaatgcacattttatggtatctgatattttaaaaagtaatgtttgattctcctttttatgagttaaattattttatacgagttggtaatttttgctttttaataaagtggaagcttgcttttttaactctttttttattgttattttatagaaatgctttttgttggccgggcacagttgctcatccatgtaatcccagcactgtgggaggccgagacgggtggatcacaaggtcaggagatcgagaccatcctggctaatgcgttgaaactccgtctctactaaaaatacaaaaaattagctgggcgtggtggtgggcacctgtagtcccagctactcaggaggctgaggcaggagaatggtgtgaacctgggaggtggagcttgcagtgagcagagcttgcagtgagacgagcttgtgccactgcactccagcctgggcaacagagtaagactcagtctcaaaaaaaaaaaaaagagtgaaatgctttttgtttgcttcagttttttatcatggggagatctttttcctcagaattgttttcttttcactgtaggctattacaggatacttcaggatcaagatacagaaccttttatttaaagagtttgtaaagtcaatgtgtttgtttgtgtctctgagattgacttcaagataataagctgctaattgtaaacaaaacagttaccctccagtattaatatgactcattagtgtgagccatttgggtcaagtatgattatgacccttggacttcctgatgtagtattaaatttcaactctggttatccattagcaatctgtagagaacttaatgaacctgaacccaggcttctctagctctggtaacgtgtgattgttttcactacaatatgatacatagatggtaccttacttttcctcattcttaataggtgtctaagaatgtcagggcaaaagtatgggcatttttcttgctatgttcagaaagtacagttctctccaacttgcagaggtacttttcttgattaaatagccttctctagcaacatcattttcagactaactaaatgaatgcagtatactcttttctttgttctcaatcattcactccttatgcaaagccaatataattttcctcataccttatgcttgaggatattgttgaagaacacttcctggaacacttctcacttgtgatgctgtactaattttttttttttaatttaagctagtatactaagtgaacaccatggtcagttgtgagcattttggtttccgcaaaggatggatggtgagcatcatgggaaagctgtagtttagtgacttagcccttagtgattaatagatttgcatgtacatagaagtctttgttggccttataatctgctgttatatttggcatggattttcatggttttgagaatgacatcctggccctgtggtccccgagggtcatggtccttgtgacctggcccctgttcactgcccccttcgctagcacgagttgctgtgcagggctggaggtagctaccatggcttgtttcaaggaaggaaactctggtacggtggcaccctcaggagtggaggacagtgaacttccttgaagagggagtgactaaggtgacctccaacctgccctgagccagctgccctgcaggtgccacgtgagcctgctctggcatccacaggatgctcctggagcctcttctctggctgctacctcagggcatggttgtggccccaccaacacctattttccaaataattattcattcttgtgacagtggcctgaacatgtttttaattttctcaacaagcatttagccagcacttatccagtgaaacaatttgataaggtttcaaggagtatctgatgggttaggaagtcacgaaatgaggagttcttgccacatttgcagagtccctccttgataaggtttggcggtgtccccacccaaatctcatgttgaattgtagttcccataatccccacatgttgtgggagggacccagtgggaggtaattaaatcatgggggtggttacccccacactgctgttctcatgatactgagttctcacaagtcctgtttgttttataaggggcttttcccccttttgctcaacacttcttcctgccatcatgtgaagaaggacgtgtttgtttccccttctgccacgattgtaagtttcctgaggccttcccagctatgtggaactgtgagttaattaaacctctttcctttataaattacccagtcatgggcagtcctttacagcagcatgagaatggactaatacactcctcaaatgttttgaagattgttgcaccttggaactaccagtgtgcacacaatctggctcaatgtatatattggcccagcaaggcaaagaactgaagttccaggatggaagaacctgtgttctcctcataatagtatagaataattcaagataggcaagaaggacagcagtaaatgaagaccatggaagaaaagaaggaatgccaaagatcgaggaaatctaccaagactagtagggtagtccagaagaagctgtttcagggcctgttgccagctatgcctttgagaacctcgggatcccaaagaatgaggggaatttcttcagaaagacaatctcggcatgcattatttctttgttttgaagattcactcatgttgcatgcatctgtagcttgtgccttttttattgcctagtagtattctgtcatatgcctatcttacaatttgattatctattcacctgttgatgaatgtttgaattttttccatttgaggaattttatgaataaagctgctataagcatgaaaaaaaaaaaaaaaaaa

SEQ ID NO: 1730 - DNA, 1632 bp, Homo Sapiens
  NM_002455
aagccccagcccggcctccgctccggccgccgccaccgcccctgttttgtttccatggcgacaggcggcgcagggcccgctccaaacataacgcgctgtggaaaacatgctgctcgggggacccccccgcagtccccgctcggggacgagccccaaggggccctggagcagtacaggccacgtgcagtttggcaagagcccccagacctggcccaggcgcacaagaccccgctctccagagcctgccgcgccttcaggggttcggggctccacttggacgaggcgccgtgacactccgaggcgcgccgggccgacagcgctgtcccgctacgtgggccacctctggatgggccggcggccgccctcccccgaggcccgcggcccagtcccccgcagttcagctgccagtcgggccagaagaagcctcgcctccccggggatctccccaggccccctgaccgcaacgatcggaggggcggtggcggggggcgggcccaggcaggggagggcagaagcacacaaggaagtgtttccgggacagagggtgggcaagatggcggcgcccatggagctgttctgctggtcagggggctgggggctgccgtcagtggacctggacagcctggccgtgctgacctatgccagatttactggtgctccactgaaggtacacaagatcagcaacccctggcagagcccttcaggaactctgcctgcccttcggaccagtcatggagaggtcatctcagttccacacaagatcatcacccaccttcgaaaagagaagtacaatgctgattatgatctgtcagctcggcaaggggcagacaccctggccttcatgtctctcctggaggagaagttgctcccggtgctggtacatactttttggatagacaccaagaactacgtggaagtgacccggaagtggtatgcagaggctatgccctttcccctcaacttcttcctgcctggccgcatgcagcggcagtacatggaacggctacagctgctgactggggagcacaggcctgaggacgaggaagagctggagaaggagctgtaccgagaggctcgggagtgtctgaccctgctctctcagcgcctgggctctcaaaagttcttctttggagatgcccctgcctccttggacgccttcgtcttcagctacttggccctgctgctgcaggcaaagctgcccagtgggaagctgcaggtccacctgcgtgggctgcacaacctctgtgcctattgtacccacattctcagtctctacttcccctgggatggagctgaggtaccaccgcaacgccagacaccagcaggcccagagactgaggaggagccataccggcgccggaaccagatcctatctgtgctggcaggactggcagccatggtgggctacgccttgctcagcggcattgtctccatccagcgggcaacgcctgctcgggccccaggcacccggaccctgggcatggctgaggaggatgaagaggaatgatttgtcctcacgctcccaagactggtttttctactctcatgcattccagaggcccccgtgcctcctcgttgttggtacagccggacacggggtgctgccacccagaataaagccactcacactga

SEQ ID NO: 1731 - DNA, 2379 bp, Homo Sapiens
  NM_002467
gacccccgagctgtgctgctcgcggccgccaccgccgggccccggccgtccctggctcccctcctgcctcgagaagggcagggcttctcagaggcttggcgggaaaaagaacggagggagggatcgcgctgagtataaaagccggttttcggggctttatctaactcgctgtagtaattccagcgagaggcagagggagcgagcgggcggccggctagggtggaagagccgggcgagcagagctgcgctgcgggcgtcctgggaagggagatccggagcgaatagggggcttcgcctctggcccagccctcccgctgatcccccagccagcggtccgcaacccttgccgcatccacgaaactttgcccatagcagcgggcgggcactttgcactggaacttacaacacccgagcaaggacgcgactctcccgacgcggggaggctattctgcccatttggggacacttccccgccgctgccaggacccgcttctctgaaaggctctccttgcagctgcttagacgctggatttttttcgggtagtggaaaaccagcagcctcccgcgacgatgcccctcaacgttagcttcaccaacaggaactatgacctcgactacgactcggtgcagccgtatttctactgcgacgaggaggagaacttctaccagcagcagcagcagagcgagctgcagcccccggcgcccagcgaggatatctggaagaaattcgagctgctgcccaccccgcccctgtcccctagccgccgctccgggctctgctcgccctcctacgttgcggtcacacccttctcccttcggggagacaacgacggcggtggcgggagcttctccacggccgaccagctggagatggtgaccgagctgctgggaggagacatggtgaaccagagtttcatctgcgacccggacgacgagaccttcatcaaaaacatcatcatccaggactgtatgtggagcggcttctcggccgccgccaagctcgtctcagagaagctggcctcctaccaggctgcgcgcaaagacagcggcagcccgaaccccgcccgcggccacagcgtctgctccacctccagcttgtacctgcaggatctgagcgccgccgcctcagagtgcatcgacccctcggtggtcttcccctaccctctcaacgacagcagctcgcccaagtcctgcgcctcgcaagactccagcgccttctctccgtcctcggattctctgctctcctcgacggagtcctccccgcagggcagccccgagcccctggtgctccatgaggagacaccgcccaccaccagcagcgactctgaggaggaacaagaagatgaggaagaaatcgatgttgtttctgtggaaaagaggcaggctcctggcaaaaggtcagagtctggatcaccttctgctggaggccacagcaaacctcctcacagcccactggtcctcaagaggtgccacgtctccacacatcagcacaactacgcagcgcctccctccactcggaaggactatcctgctgccaagagggtcaagttggacagtgtcagagtcctgagacagatcagcaacaaccgaaaatgcaccagccccaggtcctcggacaccgaggagaatgtcaagaggcgaacacacaacgtcttggagcgccagaggaggaacgagctaaaacggagcttttttgccctgcgtgaccagatcccggagttggaaaacaatgaaaaggcccccaaggtagttatccttaaaaaagccacagcatacatcctgtccgtccaagcagaggagcaaaagctcatttctgaagaggacttgttgcggaaacgacgagaacagttgaaacacaaacttgaacagctacggaactcttgtgcgtaaggaaaagtaaggaaaacgattccttctaacagaaatgtcctgagcaatcacctatgaacttgtttcaaatgcatgatcaaatgcaacctcacaaccttggctgagtcttgagactgaaagatttagccataatgtaaactgcctcaaattggactttgggcataaaagaacttttttatgcttaccatcttttttttttctttaacagatttgtatttaagaattgtttttaaaaaattttaagatttacacaatgtttctctgtaaatattgccattaaatgtaaataactttaataaaacgtttatagcagttacacagaatttcaatcctagtatatagtacctagtattataggtactataaaccctaattttttttatttaagtacattttgctttttaaagttgatttttttctattgtttttagaaaaaataaaataactggcaaatatatcattgagccaaatcttaaaaaaaaaaaaaaa

SEQ ID NO: 1732 - DNA, 2862 bp, Homo Sapiens
  NM_002468
agattcctacttcttacgccccccacatcacccgcctcgagacctcaagggtagaggtgggcacccccgcctccgcacttttgctcggggctccagattgtagggcagggcggcgcttctcggaaagcgaaagccggcggggcggggcgggtgccgcaggagaaagaggaagcgctggcagacaatgcgacccgaccgcgctgaggctccaggaccgcccgccatggctgcaggaggtcccggcgcggggtctgcggccccggtctcctccacatcctcccttcccctggctgctctcaacatgcgagtgcggcgccgcctgtctctgttcttgaacgtgcggacacaggtggcggccgactggaccgcgctggcggaggagatggactttgagtacttggagatccggcaactggagacacaagcggaccccactggcaggctgctggacgcctggcagggacgccctggcgcctctgtaggccgactgctcgagctgcttaccaagctgggccgcgacgacgtgctgctggagctgggacccagcattgaggaggattgccaaaagtatatcttgaagcagcagcaggaggaggctgagaagcctttacaggtggccgctgtagacagcagtgtcccacggacagcagagctggcgggcatcaccacacttgatgaccccctggggcatatgcctgagcgtttcgatgccttcatctgctattgccccagcgacatccagtttgtgcaggagatgatccggcaactggaacagacaaactatcgactgaagttgtgtgtgtctgaccgcgatgtcctgcctggcacctgtgtctggtctattgctagtgagctcatcgaaaagaggtgccgccggatggtggtggttgtctctgatgattacctgcagagcaaggaatgtgacttccagaccaaatttgcactcagcctctctccaggtgcccatcagaagcgactgatccccatcaagtacaaggcaatgaagaaagagttccccagcatcctgaggttcatcactgtctgcgactacaccaacccctgcaccaaatcttggttctggactcgccttgccaaggccttgtccctgccctgaagactgttctgaggccctgggtgtgtgtgtatctgtctgcctgtccatgtacttctgccctgcctcctcctttcgttgtaggaggaatctgtgctctacttacctctcaattcctggagatgccaacttcacagacacgtctgcagcagctggacatcacatttcatgtcctgcatggaaccagtggctgtgagtggcatgtccacttgctggattatcagccaggacactatagaacaggaccagctgagactaagaaggaccagcagagccagctcagctctgagccattcacacatcttcaccctcagtttcctcacttgaggagtgggatggggagaacagagagtagctgtgtttgaatccctgtaggaaatggtgaagcatagctctgggtctcctgggggagaccaggcttggctgcgggagagctggctgttgctggactacatgctggccactgctgtgaccacgacactgctggggcagcttcttccacagtgatgcctactgatgcttcagtgcctctgcacaccgcccattccacttcctccttccccacagggcaggtggggaagcagtttggcccagcccaaggagaccccaccttgagccttatttcctaatgggtccacctctcatctgcatctttcacacctcccagcttctgcccaaccttcagcagtgacaagtccccaagagactcgcctgagcagcttgggctgcttttcatttccacctgtcaggatgcctgtggtcatgctctcagctccacctggcatgagaagggatcctggcctctggcatattcatcaagtatgagttctggggatgagtcactgtaatgatgtgagcagggagccttcctccctgggccacctgcagagagctttcccaccaactttgtaccttgattgccttacaaagttatttgtttacaaacagcgaccatataaaagcctcctgccccaaagcttgtgggcacatgggcacatacagactcacatacagacacacacatatatgtacagacatgtactctcacacacacaggcaccagcatacacacgtttttctaggtacagctcccaggaacagctaggtgggaaagtcccatcactgagggagcctaaccatgtccctgaacaaaaattgggcactcatctattccttttctcttgtgtccctactcattgaaaccaaactctggaaaggacccaatgtaccagtatttatacctctaatgaagcacagagagaggaagagagctgcttaaactcacacaacaatgaactgcagacacagctgttctctccctctctccttcccagagcaatttatactttaccctcaggctgtcctctggggagaaggtgccatggtcttaggtgtctgtgccccaggacagaccctaggaccctaaatccaatagaaaatgcatatctttgctccactttcagccaggctggagcaaggtaccttttcttaggatcttgggagggaatggatgcccctctctgcatgatcttgttgaggcatttagctgccatgcacctgtccccctttaatactgggcattttaaagccatctcaagaggcatcttctacatgttttgtacgcattaaaataatttcaaagatatctgagaaaagccgatatttgccattcttcctatatcctggaatatatcttgcatcctgagtttataataataaataatattctaccttggaaaaaaaaaaaaaaa

SEQ ID NO: 1733 - DNA, 6037 bp, Homo Sapiens
  NM_002470
gtgggcggaggtctgggatctcctggctgttgctgtcttctgctctcatcctgcaggtgggactctcagctgacaccatgagtagtgacactgaaatggaagtgttcggcatagctgctcctttcctccggaagtcagaaaaggagaggatcgaggctcagaaccagccctttgatgccaagacgtattgcttcgtggtggactcaaaggaagaatatgccaaggggaaaatcaagagttctcaggatgggaaggtcactgtggaaactgaggacaacaggaccctggtggtcaaaccagaggatgtgtacgccatgaacccccccaagttcgacaggatcgaagacatggccatgctgacgcacctgaatgagccagccgtgctgtacaacctgaaggaccgttacacatcttggatgatctatacctactcaggcctcttctgtgtcactgtcaacccctacaagtggctgccggtgtacaaccccgaggtggtggaaggctaccgaggcaaaaagcgccaggaggccccaccccacatcttctccatctctgacaacgcctatcagttcatgctgactgatcgtgaaaaccagtccattctgatcaccggagaatccggggcaggaaagactgtgaacaccaaacgggtcatccagtactttgcaacaattgcagctactggggacctggccaagaagaaggactccaaaatgaaggggactctggaagatcaaatcatcagtgccaatcccctgctggaggcctttgggaacgccaagactgtgaggaatgacaactcctcccgttttggcaagttcatccgaatccattttggaaccactgggaagctggcctctgcagatattgaaacttatcttctggaaaaatcaagagtcactttccagctgaaggctgaaagaagctaccacatcttctaccagattctttctaacaagaagcctgagctcatagagctgctgcttattacgaccaacccttacgactacccgttcattagccagggggagatcctggtggccagcatagatgatgcagaggagctgctggctacagacagcgccattgacatcctgggcttcaccccagaagagaaatctgggctctacaagctgacgggagccgtgatgcactacgggaacatgaagttcaagcagaagcagcgagaggagcaggccgagccggatggcacagaagtggctgacaaaacagcctatctgatgggcctgaactcttcggacctcctaaaagctttgtgctttcctagagtgaaagttgggaatgagtacgttaccaaaggtcaaactgtggatcaggttcaccatgctgtgaatgctctttcaaaatcagtttatgaaaagttgttcttgtggatggtcactcgcattaaccagcaactggatacgaagcttccaagacaacacttcattggtgttttggacattgcaggctttgaaatctttgagtataacagcctggagcagctgtgcatcaacttcaccaatgagaaactgcaacagtttttcaaccaccacatgttcgtgctggagcaggaggagtacaagaaggaaggcatcgagtggacgttcattgacttcgggatggacctggctgcctgcatcgagctcatcgagaagcctatgggcatcttctccatcctggaagaggagtgcatgttccccaaggcaacagacacctccttcaagaacaagctgtatgaccagcatcttggaaagtccaacaacttccagaagcccaaggtggtcaaaggcagggccgaggctcacttctcactgatccactatgcgggcaccgtggactacagtgtctcaggttggctggagaagaacaaggaccctctgaacgagactgtggttgggctgtaccagaagtcttccaacaggctcctggcacacctctatgccacgtttgccacggcggatgctgacagtggaaagaagaaagttgccaagaagaagggttcttccttccaaactgtctctgcccttttcagggaaaacctgaacaagctgatgtcaaatttaagaactactcaccctcattttgtgcgttgtataattcccaatgaaaccaaaactccaggggctatggaacacagccttgttctgcaccagctgcggtgtaacggtgtcctggagggcatccgcatctgcaggaaagggttcccaaacaggattctctatggcgattttaaacaaagataccgagtgctgaatgccagtgcaatccctgagggacaattcattgacagcaagaaagcctgtgaaaagcttctggcatccattgatattgaccacactcagtacaaatttggacataccaaggtgttcttcaaggctggcttgctgggaaccctggaagagatgcgggatgaccgcctggccaaactaatcacccggacacaagctgtgtgcagagggttcctcatgcgtgtggaattccagaagatggtgcagaggagggagtccatcttctgcatccagtacaacattcgctcattcatgaacgtcaagcactggccctggatgaaactcttcttcaagatcaagcccctcctcaagagtgcagagactgagaaagagatggccaccatgaaggaagaattccagaaaaccaaagatgaactcgccaagtcggaggcaaaaaggaaggagctagaggaaaaactggtgactctggtccaagagaagaatgacctgcagctccaagtacaagctgaaagcgaaaatttgttggatgctgaggaaagatgcgatcagctgatcaaagccaaattccagctcgaggccaagatcaaggaggtgacagagagagctgaagatgaggaggagatcaatgctgagctgacggccaagaagaggaaactggaggatgaatgctcagagctcaagaaagacattgatgaccttgagttgaccctggccaaggttgagaaggagaagcatgccacagagaacaaggttaaaaaccttactgaggaactctctgggttagatgaaacaattgcaaagttaaccagagagaagaaggccctccaagaggcgcaccagcaggccttggatgacctccaagctgaagaagacaaagtcaattctttgaacaaaaccaagagcaaactggaacagcaagtggaagacctggaaagctccctagaacaagaaaagaagctccgagtagacctggaaaggaacaaaaggaaattggaaggagacttgaagcttgctcaagagtccatattagatctggagaatgacaagcaacagctggacgaaaggctcaagaagaaagattttgaatattgtcaacttcaaagcaaagtggaagatgagcagacactgggcctccagtttcagaagaaaatcaaagagttgcaggctcgaattgaggagctggaagaggagatagaggcggagagggccacccgcgcgaagacagagaaacagcgcagcgactatgcccgggagctggaggagctgagcgagcggctggaggaggcgggaggcgtcacctccacgcagatagagctcaacaagaagcgggaggcggagttcctgaagctgcgcagggacctggaggaggccacactgcagcacgaagccatggtggccgcgctgaggaagaagcatgcggatagtgtggccgagcttggggagcagattgacaacctgcagcgggtcaagcagaagctggagaaggagaagagcgagttcaagctggagatcgatgacctctccagcagcatggagagtgtgtcgaaatctaaggcaaatctggaaaaaatctgccgaaccctggaggatcagttaagtgaggccaggggcaagaatgaggaaattcagaggagcctgagcgagctgaccacacagaagtctcgtttgcagaccgaggctggtgagctgagtcgtcagctggaagaaaaagaaagcatagtatcccaactttccaggagcaagcaagcctttacccagcaaacagaagagctcaagaggcagctggaggaagagaacaaggccaagaacgccctggcgcacgccctgcagtcctcccgccacgactgtgacctgctgcgggaacagtatgaggaggagcaggaaggcaaagctgagctgcagagggcgctgtccaaggccaatagtgaggttgcccagtggagaaccaaatacgagacggacgccatccagcgcacagaagagctggaggaggccaagaaaaaacttgctcagcgccttcaagattccgaggaacaggttgaggcagtgaatgctaaatgtgcttcactggagaagaccaagcagaggctgcaaggagaggtggaggatctgatggttgatgttgaaagagccaattccttggccgccgctctggacaagaagcagaggaactttgacaaggtgttggcagagtggaagacaaagtgtgaggagagccaagcagagctggaggcatccctgaaggagtcccgctccttgagcactgagctcttcaaactgaaaaatgcctacgaggaagccttagatcaacttgaaactgtgaaacgggaaaataagaacttagagcaggagatagcagatctcacagaacaaattgctgaaaatggcaaaaccatccatgaactggagaaatcaagaaagcagattgagctggaaaaggctgatatccagctggctctcgaggaagcagaggctgctcttgagcatgaagaagccaagatcctccgaatccagcttgaattgacacaagtgaaatcagaaattgatagaaagatcgccgagaaggatgaagagatcgagcagctgaagaggaactaccagagaacagtggaaaccatgcagagcgccctggacgccgaggtgcggagcaggaatgaagccatccggctcaagaagaagatggagggggacctgaatgaaatcgagatccagctgagccacgccaaccgccaggcggcggagaccctcaaacacctcaggagtgtccagggacagctgaaggatacgcagctccacctggatgatgccctccggggccaggaggacctgaaggagcagctggcgattgtggagcgcagagccaacctgctgcaggccgaggtggaggagctgcgggctactctggagcagacggagagggcccggaaactggcggaacaggagctcctggactccaacgagagggtgcagctgctgcatacccagaacaccagcctcatccacaccaagaagaagctggagacagacctcatgcagctccagagtgaggtagaagatgccagcagggatgcaaggaacgctgaggagaaggccaagaaggccatcacggacgctgccatgatggcggaggagctgaagaaggagcaggacaccagcgcccaccttgagcggatgaagaagaacctggaacagacggtgaaggacctgcagcatcgtctagatgaggccgagcagctggcgctgaagggcgggaagaagcagatccagaaactggagaccaggatccgagagctggagtttgaacttgagggagagcagaagaagaacacagagtctgttaagggcctgaggaagtatgagcggagggtcaaggagctgacgtaccagagtgaagaggacaggaagaatgtgctgagattgcaggatctggtggataaactgcaagtgaaagtcaagtcctacaagaggcaggcggaggaggctgatgaacaagccaatgctcatctcaccaaattccgaaaggctcagcatgagctggaggaggccgaggaacgtgcggatatcgcagaatctcaagtcaacaagctccgcgctaagactcgagacttcacctccagcaggatggtggtccacgagagtgaagagtgagccagcccttctggagcaggacagaagatatgcaaaatgtatattttcttgattcctgaccattgatacttaatgtccatgtgactctttttcacatgcaataaactttgctttgtttcaatctgggaaaaaaaaaa

SEQ ID NO: 1734 - DNA, 1008 bp, Homo Sapiens
  NM_002475
gcgcgctggaaggacactgagtcaccaaccaccgccatgggccggaagccaccgccctcgcgtcaactgcaatctagagcgcggcgcatcccgtgagcccgcggggaactacgactcccggcatgctccgcggccaccggaattaacccttcagggctgggggccgcgctatgccccgccccctccccagccccagacacggaccccgcaggagatgggtgcccccatccgcacactgtcctttggccaccggacatcatgcctcccaagaaggatgttcccgtgaagaaaccagcagggccctccatctccaaacctgctgctaagccagcagcagcaggggctcctccagccaagaccaaagctgagccagctgtcccccaggcccctcagaaaacccaggagcctccagtcgatctctccaaagtggtgatcgagtttaacaaggaccagctggaggagttcaaggaggccttcgagctgtttgaccgagtgggggatggcaagatcctgtacagccagtgtggggacgtgatgagggccctgggccagaaccccaccaacgccgaggtgctcaaggtcctggggaaccccaagagtgatgagctgaagtcgcggcgtgtggactttgagactttcctgcccatgctccaggcagtggccaagaaccgaggccaaggcacatatgaggactacttggaggggtttcgtgtgtttgacaaggaggggaacggcaaagtcatgggagcagagctcagacatgttctcaccacccttggagagaagatgactgaggaggaggtggagaccgttctggcaggacacgaggacagcaacggctgcatcaactacgaggccttcttgaaacacatcctaagcgtctgagtgctgcagatccagtggggtccggacactgggccccgcaggcgaaagcacgttccagccaccaggaggccacctattgtttcaaaataaagactgggttcctctcttggtttcaaaaaaaaa

SEQ ID NO: 1735 - DNA, 855 bp, Homo Sapiens
  NM_002476
atctcatctcccagacgccacgtctctcggtttcttcttagatcactcctctgccaaagatcccaacaagacaacatggctcccaagaagcctgagcctaagaaggaggcagccaagccagctccagctccagctccagcccctgcaccagcccctgccccagctcctgaggctcccaaggaacctgcctttgaccccaagagtgtaaagatagacttcactgccgaccagattgaagagttcaaagaggccttttcattgtttgaccggaccccgactggagagatgaagatcacctacggccagtgcggggatgtactgcgggccctgggccagaaccctaccaatgccgaggtgctgcgtgtgctgggcaagcccaagcctgaagagatgaatgtcaagatgctggactttgagacgttcttgcccatcctgcagcacatttcccgcaacaaggagcagggcacctatgaggacttcgtggagggcctgcgtgtctttgacaaggagagcaatggcacggtcatgggtgctgagcttcggcacgtccttgccaccctgggagagaagatgactgaggctgaagtggagcagctgttagctgggcaagaggatgccaatggctgcatcaattatgaagcctttgtcaagcacatcatgtcagggtgaagcagagtcttccaggtgcctggcccttggctttagccataccagggtgagttaaagagaggccccggctgggtgagctgagatggagtcctcgacttatcaccacaccactgccccaaggaccttacaggccctccctgttaataaacagctctaacacggccaggctgggctctgggattctga

SEQ ID NO: 1736 - DNA, 661 bp, Homo Sapiens
  NM_002477
ggagtggcagccggagtctgaactgtcctgggggaccaagcaggagcttaagatgggcaagacctggggccctgggcagacgcatcaaagcaggcagaagcaggcatggccagcaggaagaccaagaagaaggaagggggtgccctccgggcccagagagcctcatccaatgtcttctccaactttgagcagactcagatccaggagttcaaggaggcattcacactcatggatcagaaccgagatggcttcattgacaaggaggacctgaaggacacctatgcctccctgggcaagaccaacgtcaaggacgacgagctggacgccatgctcaaagaggcctcggggcccatcaacttcaccatgtttctgaacctgtttggggagaagctgagcggtaccgacgccgaggagaccattcttaacgccttcaagatgctggacccggacgggaaagggaaaatcaacaaggagtacatcaagcgtctgctgatgtcccaggctgacaagatgacggcggaagaggtggaccagatgttccagttcgcctccatcgatgtggcgggcaacctggactacaaggcgctcagctacgtgatcacccacggggaggagaaggaggagtgagacccagccgggtcaataaacctggacgcttgga

SEQ ID NO: 1737 - DNA, 5726 bp, Homo Sapiens
  NM_002480
gaagttacgttagattggccgccggtgacgggtggccgtgctgggggcgggagggcttctgtggtaggaagggaggtccgctcggccgggtgcgccgccccagtgctctgtgggatactggaagtctcgagcgtcggctccgggttcccagccctcctctggcccgcactcatagaaacattcacacaccccctgcctcccctctcttccctctccgcctcccccttccccccctcgcgataagaagacccggcggcaggagaggggatgaagatggcggacgcgaagcagaagcggaacgagcagctgaaacgctggatcggctccgagacggacctcgagcctccggtggtgaagcgccagaagaccaaggtgaagttcgacgatggcgccgtcttcctggctgcttgctccagcggcgacacggacgaggtcctcaagctgctgcaccgcggcgccgacatcaattacgccaatgtggacggactcactgccctgcaccaggcttgcattgatgacaatgttgatatggtgaagtttctggtagaaaatggagcaaatattaatcaacctgataatgaaggctggataccactacatgcagcagcttcctgtggatatcttgatattgcagagtttttgattggtcaaggagcacatgtaggggctgtcaacagtgaaggagatacacctttagatattgcggaggaggaggcaatggaagagctacttcaaaatgaagttaatcggcaaggggttgatatagaagcagctcgaaaggaagaagaacggatcatgcttagagatgccaggcagtggctaaatagtggtcatataaatgatgtccggcatgcaaaatctggaggtacagcacttcacgttgcagctgctaaaggctatacggaagttttaaaacttttaatacaggcaggctatgatgttaatattaaagactatgatggctggacacctcttcatgctgcagctcattggggtaaagaagaagcatgtcgaattttagtggacaatctgtgtgatatggagatggtcaacaaagtgggccaaacagcctttgatgtagcagatgaagacattttaggatatttagaagagttgcaaaagaaacaaaatctgctccatagtgaaaaacgggacaagaaatctccactaattgaatcaacagcaaatatggacaataatcagtcacagaagacctttaaaaacaaagagacgttgattattgaaccagagaaaaatgcatcccgtattgaatctctggaacaagaaaaggttgatgaagaagaagaaggaaagaaggatgagtctagctgctctagtgaagaagatgaggaagatgactcggaatcagaagctgaaacagataagacaaaacccctggcttctgtaactaatgccaacacttctagtacacaagcagctcctgtagctgttacaacacctactgtgtcatcaggtcaagcaacacctacatcacctattaaaaagtttccaaccacagctacaaaaatttctcccaaagaagaagagagaaaagatgagtctcctgcaacttggaggttaggacttagaaagacgggcagctatggtgcacttgctgaaatcacagcatctaaagagggtcagaaagaaaaagatactgcaggtgttacacgttcagcttcaagtcccagactttcctcctctttggataataaagaaaaggagaaagatagtaaaggaactaggcttgcatatgttgcacctacaataccaagacgactagccagtacatctgacattgaagagaaagaaaacagagattcttcaagtttgcgaacaagtagttcatatacaaggagaaaatgggaagatgatcttaaaaaaaatagctcagttaatgaaggatcaacgtatcataaaagttgctcctttggtagaagacaagatgatttgattagttctagtgttccaagcaccacatcaacaccaacagttacctctgcagctgggcttcagaaaagcctgctttccagcacaagcactactacaaagattacaacgggttcttcctcagcaggcacacaaagcagtacctcaaatcgtttgtgggctgaggatagtactgagaaagaaaaggacagtgttcctacggcagtgaccattcctgttgctccaactgttgtaaatgctgcagcttctaccacaaccctgactacaactactgctggcactgtctcctccacaacagaggtcagggagagacgcagatcatacctcactcctgttagggatgaagagtctgaatcccaaagaaaagcaagatctagacaagcaagacaatctagaagatcaacacagggagtgacattaactgatcttcaagaagctgagaaaacaataggaagaagtcgttctacccgaaccagagaacaagaaaatgaagaaaaagaaaaagaggaaaaagagaaacaagataaagagaaacaagaagaaaagaaggagtcagaaacatctagagaagatgaatataaacaaaagtactccagaacgtatgatgagacttaccagcgttataggccagtatcaacttcaagttcaaccactccatcctcttcactttctactatgagcagttcactgtatgcttcaagtcaactaaacaggccaaatagtcttgtaggcataacttctgcttactccagaggaataacaaaagaaaatgaaagagagggagaaaaaagagaagaggagaaagaaggagaagataaatcacaacctaaatcaatcagagaacgacgacgaccaagagagaaaagaagatctacaggagtttcattttggacacaagatagtgatgaaaatgaacaagaacaacaatcagacacagaagagggatccaataagaaagaaactcagacggattccatttctagatatgaaaccagttctacatcagctggtgatcgatatgattccttgctgggtcgctctggatcatacagttacttagaagaaagaaaaccttacagcagcaggctagaaaaggatgactcaactgactttaaaaagctttatgaacaaattctagctgaaaatgaaaagctgaaggcacagctacatgatacaaatatggaactaacagatcttaaattacagttggaaaaggccacccagagacaagaaagatttgctgatagatcactgttggaaatggaaaaaagggaacgaagagctctagaaagaagaatatctgaaatggaagaagagctcaaaatgttaccagacctaaaagcagacaaccagaggctaaaggatgaaaatggggccttgatcagagttataagcaaactttccaaataaaaaaaaaaaaagcagcaagtaatggaattgcacatattagtaacccagtggaccataattggcagtcactggaagtctgggaagaatccttggagactgtcattttcggatatcctgccaaatgccctcttatctagaatttttgtttcattttgtttaattttctggggtgtttttgttgttgttggtttgttttttgttttttttttttaatcaagaccattgtttcatgttaatgcagctgctgagaagatttttttttaatgactgagaaaacttgtttacagctccagcatataaggaaagtgttcaaggccagatatgcctcagatatttaaccagtaagccttagttgtacataaatacttttgtgtcaacaaaaactttcagctctcacagaagacagttactcaacattttttgatgtgccacagtttcgagtttttcgatatttaaattttttggcttttcatctaagtttgggtttgtattttttccttctaaactcttcatgtggcagagtcttctatgttttcacagctttttcattacagaaaagaacacttgctcttctgtgattattgtcatgtattaggctaatgctgtgttgtctcccacctggaactgaattgcttggtggaacatatgctttcactgtttgtgcaatatgcatttatttcttatatgaatgctttaaagtcatttgaggttagatcttttaattcctattttctgcttcattggtcactttttttttattgtagtataagatgttagattctgtaatcttcacattcattttagcaggtactgagtgatgctgtatatacaaataagtgtattgttttgatttttagaccaccacatggcatgcttgactatttcttatttcaaatgtctgctaatgcagagtaggctactccatgatagtgttaaaaaacaaaatttgctaacaatgtgatataaagactttaaaagttacacattatgtggagccctatctttacaaaagtttcctactgtaaagtgcttttattttcagttttcacttgatagtactcaaccataattaaagttgcataagataattgctttacatttcacatacctatatttatctgagtgctgtctaaaactgttgtgctagccaaagtaatgctatgaaatcatttgcagaattaacccgtgagttaatgttaaatgcactgttattgccatgtgaagaggcatcgactttgataccaccatcatgttcagaccattttatacatttcagtggcctttttttttttttaaggaaaaaaaagcgcaaaaccaagtacatagtgacgatggcttttatttggacaaatagcttttatattttcattaaaccatgcaaaaaatactacatctttctggcacataactgtctccttaaccactgaacagttcagccatttgaataaattgtacattgtaaagcttatagtagctgattgtattattgattgtattgtatactatattaaatgtgaatttgtaccccttcattttaaaaggtcattgtgttctactgcctattttagattactttggggttggggaagggtgttttggtaagcaggattttaagtcctctctctctcgattggttttatgaagatataaggttatgctcttactaccaagctcaggattcttgattttaaaggtacaaggatagttgtgggagttttatttttggttatatttgaactgtatgaatggtaggtctgaatattgagaatttccatggtcttatgtggaggtaaaatatacagataactgatcagtttgagtgactgcaacatgttctggttgcacaacagttaggcatgctatggtttatatttgtgaagtttggatgcctgtgaagaatgattaaatacatgtttctaatattttagtgttttgtatttaggttatttattctttgtatctaaaactgaacagctactgtgctatattgattttattggtagtattgagcagaccttgtttctgcatgaaactagttgcaaaacccactattttggaaataaaaatgtattttgacatatacaaataaaatgaataaaactattttaaatgtgtgaacttttaatgaagacattttaaattttgttctgagatatttaaattctgcatgggtattttttcactaattgctttacttggataccaatttgaataatttctgaaattgtaatattgtgataatttgcacagcattgtacatgcacatctgtaaatgcaatcttaattgccatatttatgcaatctgtgtaccaatttggacaaatgtttatatattttacataaagctgtctgtatgcagaatctga

SEQ ID NO: 1738 - DNA, 3301 bp, Homo Sapiens
  NM_002482
gatgggcggggcgaagggtcctcgtatataaaagggccccggccgcgcggggtctctaatctgccattttctgtccctgagtgagtctctggcgtcccaaattgcctgtttttctcgcaggctctattccgttcgctggttcgccacctcaggggaacgatggccatggagtccacagccactgccgccgtcgccgcggagctggtttctgccgacaaaattgaagatgttcctgctccttctacatctgcagataaagtggagagtctggatgtggatagtgaagctaagaaactattgggtttaggacagaaacatctggtgatgggggatattccagcagctgtcaatgcattccaggaagcagctagtcttttaggtaagaagtatggagagacagctaatgagtgtggagaagccttctttttctatgggaaatcacttctggagttggcaagaatggagaatggtgtgttgggaaacgccttggaaggtgtgcatgtggaagaggaagaaggagaaaaaacagaagatgaatctctggtagaaaataatgataacatagatgaggaagcaagggaagagttgagagaacaggtttatgacgccatgggagaaaaagaagaagccaaaaaaacagaagacaagtctttggcaaagcctgaaactgataaagaacaggacagtgaaatggagaagggtggaagagaagatatggatataagtaaatctgcagaggagccacaggaaaaagttgacttgactctagattggttaactgaaacctctgaagaggcaaaaggaggagcagcaccagaaggaccgaatgaagctgaggtcacttctgggaagccagaacaggaagtaccagatgctgaggaagaaaaatcagtttctggaactgatgtccaagaagagtgcagagaaaaaggaggtcaggagaagcagggagaggtaattgtgagcatagaggagaagccaaaagaagtttcagaagagcagcctgtggtgactctagaaaagcagggcactgcagtggaggtagaagcagagtctttagacccgacagtcaagccagtggatgtgggtggggacgagccagaggagaaggtagttacctctgaaaacgaggcaggaaaggcggttcttgaacaactggtaggtcaagaagtaccacctgctgaagagtcaccagaggtgacaacagaggctgcagaggcctcagctgtagaggctggatcagaagtctctgaaaagcctgggcaggaggctccagttctccctaaggatggtgcagtcaatggaccgtcagttgtaggagatcagactcctattgaaccacagacttctatagaaagactgacagaaacaaaagatggctcaggactagaggagaaggtcagggcaaagctggttcctagtcaggaggagactaagctgtctgtagaagagtctgaggcagctggagatggggttgataccaaggtagcccagggagctactgagaaatcacctgaagacaaagttcagatagctgctaatgaagagacacaagagagagaagaacagatgaaagagggtgaagaaactgaaggctcagaagaggatgataaagaaaatgataagaccgaagaaatgccaaatgattcagtccttgaaaacaagtctcttcaagaaaatgaggaggaggagattgggaacctagagcttgcctgggatatgctggatttagcaaagatcatttttaaaaggcaagaaacaaaagaagcacagctttatgctgcccaggcacatcttaaactcggagaagttagtgttgaatctgaaaactatgtgcaagctgtggaggagttccagtcctgccttaacctgcaggaacagtacctggaagcccacgaccgtctccttgcagagacccactaccagctgggcttggcttatgggtacaactctcagtatgatgaggcagtggcacagttcagcaaatctattgaagtcattgagaacagaatggctgtactaaacgagcaggtgaaggaggctgaaggatcgtctgctgaatacaagaaagaaattgaggaactaaaggaactgctacccgaaattagagagaagatagaagatgcaaaggagtctcagcgtagtgggaatgtagctgaactggctctgaaagctactctggtggagagttctacttcaggtttcactcctggtggaggaggctcttcagtctccatgattgccagtagaaagccaacagacggtgcttcctcatcaaattgtgtgactgatatttcccaccttgtcagaaagaagaggaaaccagaggaagagagtccccggaaagatgatgcaaagaaagccaaacaagagccggaggtgaacggaggcagtggggatgctgtccccagtggaaatgaagtttcggaaaacatggaggaggaggctgagaatcaggctgaaagccgggcagcagtggaggggacagtggaggctggagctacagttgaaagcactgcatgttaagagggggcacagccctcctcccaagggaaagtgtttttgtatataatgtattttttcacttttggaggattctttttgtataacttcaataaagattgtaagcaaaggttgaggctttgatggtttttttcttaattattggctgaatctgccttggagcactgctggttttatatattagccaaaggttttgttctggccttctgtactgatctgtgttcctgatcctaattcctatctgtctaacgtggaggtgatcaagtgtggctgtaggcctttgttttccaatggtgctatattctgttttcaaacacttcactgaacccagctgtcttgcaaactttcagtggtgctgtccctggatgggggctacaaaaacaagaattggtgaagatcttgctcttcagtgctgaaaatggatgatggactttggctgtgagccaggcctaggatggttcttgtcctatatccacctagtcttcacctggggctataattctgtcctggaaaaagaactctgaaaacctgggtcaggggaatgattcctaaggaaaacggtctgcatttgagctctggtttgaaagtagccaaggggactgatggtggacactccagatgtggttggaagcatatgtggggaggctggctggttgagttttgttattttctgtatagaaaggttgagatatatcaacacttggaattgttacccatctgcagaattgacttctcaaataaagatgctaaaaatctccttgtctggaaaaaaaaaaaa

SEQ ID NO: 1739 - DNA, 2631 bp, Homo Sapiens
  NM_002483
gaccctgggaaatgcttctatccctgagaggaggctcagcacagaaggaggaaggacagcagggccaacagtcacagcagccctgaccagagcattcctggagctcaagctcctctacaaagaggtggacagagaagacagcagagaccatgggacccccctcagcccctccctgcagattgcatgtcccctggaaggaggtcctgctcacagcctcacttctaaccttctggaacccacccaccactgccaagctcactattgaatccacgccgttcaatgtcgcagaggggaaggaggttcttctactcgcccacaacctgccccagaatcgtattggttacagctggtacaaaggcgaaagagtggatggcaacagtctaattgtaggatatgtaataggaactcaacaagctaccccagggcccgcatacagtggtcgagagacaatataccccaatgcatccctgctgatccagaacgtcacccagaatgacacaggattctataccctacaagtcataaagtcagatcttgtgaatgaagaagcaaccggacagttccatgtatacccggagctgcccaagccctccatctccagcaacaactccaaccccgtggaggacaaggatgctgtggccttcacctgtgaacctgaggttcagaacacaacctacctgtggtgggtaaatggtcagagcctcccggtcagtcccaggctgcagctgtccaatggcaacatgaccctcactctactcagcgtcaaaaggaacgatgcaggatcctatgaatgtgaaatacagaacccagcgagtgccaaccgcagtgacccagtcaccctgaatgtcctctatggcccagatggccccaccatttccccctcaaaggccaattaccgtccaggggaaaatctgaacctctcctgccacgcagcctctaacccacctgcacagtactcttggtttatcaatgggacgttccagcaatccacacaagagctctttatccccaacatcactgtgaataatagcggatcctatatgtgccaagcccataactcagccactggcctcaataggaccacagtcacgatgatcacagtctctggaagtgctcctgtcctctcagctgtggccaccgtcggcatcacgattggagtgctggccagggtggctctgatatagcagccctggtgtattttcgatatttcaggaagactggcagattggaccagaccctgaattcttctagctcctccaatcccattttatcccatggaaccactaaaaacaaggtctgctctgctcctgaagccctatatgctggagatggacaactcaatgaaaatttaaagggaaaaccctcaggcctgaggtgtgtgccactcagagacttcacctaactagagacaggcaaactgcaaaccatggtgagaaattgacgacttcacactatggacagcttttcccaagatgtcaaaacaagactcctcatcatgataaggctcttacccccttttaatttgtccttgcttatgcctgcctctttcgcttggcaggatgatgctgtcattagtatttcacaagaagtagcttcagagggtaacttaacagagtatcagatctatcttgtcaatcccaacgttttacataaaataagagatcctttagtgcacccagtgactgacattagcagcatctttaacacagccgtgtgttcaaatgtacagtggtccttttcagagttggacttctagactcacctgttctcactccctgttttaattcaacccagccatgcaatgccaaataatagaattgctccctaccagctgaacagggaggagtctgtgcagtttctgacacttgttgttgaacatggctaaatacaatgggtatcgctgagactaagttgtagaaattaacaaatgtgctgcttggttaaaatggctacactcatctgactcattctttattctattttagttggtttgtatcttgcctaaggtgcgtagtccaactcttggtattaccctcctaatagtcatactagtagtcatactccctggtgtagtgtattctctaaaagctttaaatgtctgcatgcagccagccatcaaatagtgaatggtctctctttggctggaattacaaaactcagagaaatgtgtcatcaggagaacatcataacccatgaaggataaaagccccaaatggtggtaactgataatagcactaatgctttaagatttggtcacactctcacctaggtgagcgcattgagccagtggtgctaaatgctacatactccaactgaaatgttaaggaagaagatagatccaattaaaaaaaattaaaaccaatttaaaaaaaaaaagaacacaggagattccagtctacttgagttagcataatacagaagtcccctctactttaacttttacaaaaaagtaacctgaactaatctgatgttaaccaatgtatttatttctgtggttctgtttccttgttccaatttgacaaaacccactgttcttgtattgtattgcccagggggagctatcactgtacttgtagagtggtgctgctttaattcataaatcacaaataaaagccaattagctctataact

SEQ ID NO: 1740 - DNA, 1265 bp, Homo Sapiens
  NM_002484
acgaaggcggcaaaggcgacggaatggaggaggtgcctcacgactgtccaggggccgacagcgcccaggcgggcagaggggcttcatgtcagggatgccccaaccagcggctgtgcgcttctggagcgggggccactccggacacggctatagaggaaatcaaagagaaaatgaagactgtaaaacacaaaatcttggtattgtctgggaaaggcggtgttgggaaaagcacattcagcgcccaccttgcccatggcctagcagaggatgaaaacacacagattgctcttctagacatcgatatatgtgggccatcgattcccaagataatgggattggaaggagagcaggttcaccagagtggctcaggctggtctccagtgtacgtggaagacaacctgggggtgatgtcagtgggcttcctgctcagcagtcctgatgatgctgttatctggaggggacccaagaaaaacggcatgatcaagcagttcctccgagatgtggactggggagaggtcgactacctcattgtggacaccccacctgggacgtcggatgaacacctctcggtcgtccggtacctggccacagcacacatcgatggagcagtgatcatcaccactccccaggaggtgtcactccaggatgtccggaaagaaatcaacttctgccgcaaggtgaagctgcccatcatcggggtggtggagaacatgagtggcttcatctgtcctaagtgcaagaaagaatctcagatattccctcccacaaccgggggcgcggagctcatgtgccaggacttggaggtccctctcctcggcagagtgcccctggatccgctcataggtaagaattgtgacaaaggccagtcttttttcattgacgccccagattccccagccacgttagcctacagaagtataattcagagaatccaagagttttgtaatctccatcagtcaaaagaagagaacctcatcagttcctgaaacgagagaatgttcaggaccaagcagttaccgagcgaggcactcactgggcagcacatccagccagacccgaccagctccgggatggggtgggtcacagcaaaaggaccagatgctggtgtggtccgaagccactttctcagagacactttaatcattgagtatttgtacacttttctttagaacatatataaagggcattctctacaaatgtgccgttttaagaataaaaccccctcaaatctcaaaaaaaaaaaaaaaaaaaaaaaaaaaaaaaaa

SEQ ID NO: 1741 - DNA, 4639 bp, Homo Sapiens
  NM_002485
gagcgcgcacgtcccggagcccatgccgaccgcaggcgccgtatccgcgctcgtctagcagccccggttacgcggttgcacgtcggccccagccctgaggagccggaccgatgtggaaactgctgcccgccgcgggcccggcaggaggagaaccatacagacttttgactggcgttgagtacgttgttggaaggaaaaactgtgccattctgattgaaaatgatcagtcgatcagccgaaatcatgctgtgttaactgctaacttttctgtaaccaacctgagtcaaacagatgaaatccctgtattgacattaaaagataattctaagtatggtacctttgttaatgaggaaaaaatgcagaatggcttttcccgaactttgaagtcgggggatggtattacttttggagtgtttggaagtaaattcagaatagagtatgagcctttggttgcatgctcttcttgtttagatgtctctgggaaaactgctttaaatcaagctatattgcaacttggaggatttactgtaaacaattggacagaagaatgcactcaccttgtcatggtatcagtgaaagttaccattaaaacaatatgtgcactcatttgtggacgtccaattgtaaagccagaatattttactgaattcctgaaagcagttgagtccaagaagcagcctccacaaattgaaagtttttacccacctcttgatgaaccatctattggaagtaaaaatgttgatctgtcaggacggcaggaaagaaaacaaatcttcaaagggaaaacatttatatttttgaatgccaaacagcataagaaattgagttccgcagttgtctttggaggtggggaagctaggttgataacagaagagaatgaagaagaacataatttctttttggctccgggaacgtgtgttgttgatacaggaataacaaactcacagaccttaattcctgactgtcagaagaaatggattcagtcaataatggatatgctccaaaggcaaggtcttagacctattcctgaagcagaaattggattggcggtgattttcatgactacaaagaattactgtgatcctcagggccatcccagtacaggattaaagacaacaactccaggaccaagcctttcacaaggcgtgtcagttgatgaaaaactaatgccaagcgccccagtgaacactacaacatacgtagctgacacagaatcagagcaagcagatacatgggatttgagtgaaaggccaaaagaaatcaaagtctccaaaatggaacaaaaattcagaatgctttcacaagatgcacccactgtaaaggagtcctgcaaaacaagctctaataataatagtatggtatcaaatactttggctaagatgagaatcccaaactatcagctttcaccaactaaattgccaagtataaataaaagtaaagatagggcttctcagcagcagcagaccaactccatcagaaactactttcagccgtctaccaaaaaaagggaaagggatgaagaaaatcaagaaatgtcttcatgcaaatcagcaagaatagaaacgtcttgttctcttttagaacaaacacaacctgctacaccctcattgtggaaaaataaggagcagcatctatctgagaatgagcctgtggacacaaactcagacaataacttatttacagatacagatttaaaatctattgtgaaaaattctgccagtaaatctcatgctgcagaaaagctaagatcaaataaaaaaagggaaatggatgatgtggccatagaagatgaagtattggaacagttattcaaggacacaaaaccagagttagaaattgatgtgaaagttcaaaaacaggaggaagatgtcaatgttagaaaaaggccaaggatggatatagaaacaaatgacactttcagtgatgaagcagtaccagaaagtagcaaaatatctcaagaaaatgaaattgggaagaaacgtgaactcaaggaagactcactatggtcagctaaagaaatatctaacaatgacaaacttcaggatgatagtgagatgcttccaaaaaagctgttattgactgaatttagatcactggtgattaaaaactctacttccagaaatccatctggcataaatgatgattatggtcaactaaaaaatttcaagaaattcaaaaaggtcacatatcctggagcaggaaaacttccacacatcattggaggatcagatctaatagctcatcatgctcgaaagaatacagaactagaagagtggctaaggcaggaaatggaggtacaaaatcaacatgcaaaagaagagtctcttgctgatgatctttttagatacaatccttatttaaaaaggagaagataactgaggattttaaaaagaagccatggaaaaacttcctagtaagcatctacttcaggccaacaaggttatatgaatatatagtgtatagaagcgatttaagttacaatgttttatggcctaaatttattaaataaaatgcacaaaactttgattcttttgtatgtaacaattgtttgttctgttttcaggctttgtcattgcatctttttttcatttttaaatgtgttttgtttattaaatagttaatatagtcacagttcaaaattctaaatgtacgtaaggtaaagactaaagtcacccttccaccattgtcctagctacttggttcccctcagaaaaaaattcatgatactcatttcttatgaatctttccagggatttttgagtcctattcaaattcctatttttaaataatttcctacacaaatgatagcataacatatgcagtgttctacaccttgcttttttacttagtagattaaaaattataggaatatcaatataatgtttttaatattttttcttttccattatgctgtagtcttacctaaactctggtgatccaaacaaaatggcttcagtggtgcagatgtcacctacatgttattctagtactagaaactgaagaccatgtggagacttcatcaaacatgggtttagttttcaccagaatggaaagacctgtacccctttttggtggtcttactgagctgggtgggtgtctgttttgagcttatttagagtcctagttttcctacttataaagtagaaatggtgagattgttttctttttctaccttaaagggagatggtaagaaacaatgaatgtcttttttcaaactttattgacaagtgattttcaagtctgtgttcaaaaatatattcatgtacctgtgatccagcaagaagggagttccagtcaagagtcactacaactgattagttgtttagagaatgagaaatggaacagtgaggaatggaggccatatttccatgacttcccttgtaaacagaagcaacagaagggacaagaggctggcctctacatcactctcaccttccaaatcttgtggaagtgcatctacttgccagaaccaaattaacttacttccaagttctggctgcttgcaggtggaactccagctgcaagggagttagggaaatgaaggtctttttttaaaagcttctcagccttcctagggaacagaaattgggtgagccaatctgcaatttctactacaggcattgagaccagttagattattgaaatattatagagagttatgaacacttaaattatgatagtggtatgacattggatagaacatgggatactttagaagtagaattgacagggcatattagttgatgaaatggagtcatttgagtctcttaatagccatgtatcataattaccaagtgaagctggtggaacatatggtctccattttacagttaaggaatataatggacagattaatattgttctctgtcatgcccacaatccctttctaaggaagactgccctactatagcagtttttatatttgtcaatttatgaatataatgaatgagagttctggtacctcctgtctttacaaatattggtgttgtcagtatttttcctttttaaccattccaatcggtgtgtagtgatgtttcattttggttttaatttgtatatccctgatagctataattgggtcatagaaattctttatacattctagatgcaagtctcttgtcggatatatgtattgagatattacacctagtctgtggcttgactgttttctttatgtcttttgatgaatagaagttttaaattttgacaaggtcaaatttatttttttcttttgtttgatattttttctctccaatttaaccccaagatttcagatattctgctctattatataaactttatatttttatatttgtgatctaccttgaattgatatgtatgttgtgaattatggatcagggttctttttttcccccatacaagtatccagtcattgtaacactgtttattgaaagaattatcctttcctcattaaattaccttgccaattagtaaaaaatcaattaaccataatggtggatctgtttctggactttctgtttggttacactgaaatgtttgtccatccttgcactcactcataccatactgccttgaattactgtagctgcatagatgctccttaagttgggattacattgtaataaacgcaatgtaagttaaaaaaaaaaaaaaaaaa

SEQ ID NO: 1742 - DNA, 5381 bp, Homo Sapiens
  NM_002486
attgagaggccaccgggaaaccattgagaagccccggaggaccggcctgagcggaggcggagactagagcggccgccggcacgacccgccttcaggcgtacgacgaccgcggcccgggggctctgagtggccaaagcggcggcactttctgcgtggccccggaaggacatagagcggaaggcgggagaaagaagtagccggcaggcggaggcagcccgagggggcggttgcatgtgtgccagacgttcgtagcccactgagcttcctcacgccggctgtcgcagcgcctagccccacccggcggcctctcctgcgcttccggggccgtggcgagctagtgcgcctgcgtgccggcccatccgcgcgccttgcagctgtccttgcgtcggccagcggccagacagttcctgcagcgcttaccgcctggcctctcggttccgcggcgcaccggagggcagcatgtcgcggcggcggcacagcgacgagaacgacggtgggcagcctcacaaaaggagaaagacctctgatgcaaatgaaactgaagatcatttggaatctttaatatgtaaagtaggagaaaagagtgcctgctctttggagagcaacctagaaggcttggctggtgttttggaagctgatcttcctaactacaagagcaagatcttaaggcttctttgtacagttgcacgcctattacctgagaagctgacaatttatacaacattagttggactactgaatgccaggaattacaattttggtggagaatttgtagaagccatgattcgtcaacttaaagaatcattgaaagcaaacaattataatgaagccgtgtatttggtccgttttttatctgatcttgtgaattgtcatgtgattgccgccccatcaatggttgctatgtttgaaaattttgtaagcgtaactcaggaagaagatgtacctcaggtgcgacgagattggtatgtgtatgcatttctgtcatctttgccctgggttggaaaggagttgtacgaaaagaaagatgcagagatggaccgcatctttgccaacactgaaagctatcttaaaagacgccaaaagactcatgtacccatgttacaggtatggactgctgataaaccacatccacaagaagagtatttagattgcctgtgggcccagattcagaaattgaaaaaggatcgctggcaggaacggcacatcctaagaccttatcttgcctttgacagcatcctgtgtgaagcactgcagcacaatctgcctccttttacaccacctcctcacactgaagattcagtgtacccaatgccaagggtcatcttcagaatgtttgattacacagatgatcccgagggtcctgtcatgccagggagtcattcagtggaaagatttgtaatagaagagaatcttcactgcatcattaagtcccactggaaggaaaggaagacttgtgctgcacagttagtgagctatccagggaagaacaagatccccttgaactaccacatagttgaggtgatctttgcagagctgtttcaacttccagcaccccctcacattgatgtgatgtacacaacactcctcattgaactgtgcaaacttcaacctggctctctaccccaagttcttgcacaggcaactgaaatgctatacatgcgtttggacacaatgaacactacctgtgtagacaggtttattaattggttttctcatcatctaagtaacttccagttccgttggagctgggaagattggtcagattgtcttagtcaagatcctgaaagtcccaaaccgaagtttgtaagagaagttctagaaaaatgtatgaggttgtcttaccatcagcgtatattagatattgttcctcctaccttctcagctctgtgtcctgcaaacccaacctgcatttacaagtatggagatgaaagtagcaattctcttcctggacattctgttgccctctgtttagctgttgcctttaaaagtaaggcaaccaatgatgaaatcttcagcattctgaaagatgtaccaaatcctaaccaggatgatgacgacgatgaaggattcagttttaacccattgaaaatagaagtctttgtacagactctgctacacttggcagccaaatcattcagccactccttcagtgctcttgcaaagtttcatgaagtcttcaaaaccctagctgaaagtgatgaaggaaagttacatgtgctaagagttatgtttgaggtctggaggaaccatccacagatgattgctgtactagtggataagatgattcgtacacaaatagttgattgtgctgccgtagcaaattggatcttctcttcagaactatctcgtgactttaccagattgtttgtttgggaaattttgcactctacaattcgtaagatgaacaaacatgtcctgaagatccagaaagagctggaagaagctaaagagaaacttgctaggcaacacaaacggcgaagtgatgatgacgacagaagcagtgacaggaaagacggggttcttgaggaacaaatagaacgacttcaggaaaaagtggaatctgctcagagtgaacaaaagaatcttttcctcgttatatttcagcggtttatcatgatcttgaccgagcacctagtacgatgcgaaactgatgggaccagtgtattaacaccatggtataagaactgtatagagaggctgcagcagatcttcctacagcatcaccaaataatccagcagtacatggtgaccctggagaaccttctcttcactgctgaattagaccctcatatcttggccgtgttccagcagttctgtgccctgcaggcctaagggtcattttttcctcatgtcaaggttttttttgatatcttaaaataatttgtcttattttttgatggtttgaatgcttgctttcttgtagtatcctttcacttcttaaaggaaacaaaggggaagaggacagtgaatgaacatggcattacttttaattgccctgaaaagcaaatacttcctaacggcagtaatgtgactatgaccatgatatattatatatgtgacagatacaaattctctgtgatcagtttgttattttttttctccttaaggcacaaaataattggtttgaggtatgtgaaacactagaggtcaaccttacatagtatatagaactgatgggtttacccagctacccagtagcataacttttcacagctcggggatgaattaacatggctgaaataaaactaaaagtatggtttttaaactttggcatttcatgatttatcatctcactctactctaaaactggtggtttcttactgaaggtgttctccatttgaaattttatcttcaaagtatttttaagtagtatctttaagacatgacttgttagtaataaaagtgttactagttggaagagtagctctcaaatttgtcttaatgtaaatcacctgggaatctttcaagttattttgaaatttaaaccaccgtctgggggtggaacgcagacatcctcagtaatccttaaagtttccccaggtgattccaggtttggtcaccattatcttagagcatctactcacttcctctagccttggggttatttgtccaaggtcttgtagtgagttacagaatactaaagtggatgtagaagtggtcagattgactgaaactataccctgaattagatgtgagtttagattttgtttatatggaacctgatccaaaaaactacgaagtcctgagcttgtttcctgtatagtactgatgctgaaataagatgacagcagtttgtaaaataatacacaaatatgaggaattgtctgacattccaaatttcgaggatttttagacttttttcattaaaccttagaaaaaaattaccagtaatcctacaactactggtagtgttgttgtgcatttgcacaaaataggtataattttttcttattacatcccaagtttatgatgcattaagcgttttgcatattttgatatatttttgctttggtttaccatacattttagtggctacagaatgtagtctgcttaataaatgggaattcctagaatgtttaaataccatactatttaagacaaaatacaaaatatccagaaaaatccaggttgcgtggctggttagtaaaggactaaaacccaggttcttggctaaatgttttcgtttatactgtttatctttcccattgcttaagcacagcacaaactatgtaattatatataattacagttgacccttgaacaacatgggtttgaactgtgtgagtctccttacacacaggttttcttccacccctgagatggcaagaccagccccttgtcttcctcagcctgctcaacgtgaagatgatgaggatgaagacctttatgatgatccacttctacttattaaatagtaaatatatttttttcttatgattttattttcttttctctagcttcataagaatatagcatatgggctgggcgcagtggctcacgcctgtaatcccagcactttgggaggctgaggcgggcggatcacaaggtcaggagattgagaccatcctggctaacacagtgaaaccctgtctctactaaaaacacaaaaacttagccaggcgtggtggtacatggctgtagtcccagctacttgggaggctgagacaggagaatcgcttgaacctgggaggtggaggtttcagtgagccaagattgtgccactgcactccagcctgggtgatggagcgaggctctgtctcaaaaaagaaaaaaaatatatagcatataacatacaaaatgagtttatcaactgtttgttattggtaagtcagcagtgggctattggtggttaagttttgggggagtcaaaagttacatgcaaattttttactgtgcggggtgtcagcatccctaaccccatgttgttcaagggtcaactgtagtttaaaatgactcctgtctcaaaaaaccaaaggataacctttaagggattggtaactttgactcaaaactgctttgtaatcttttcacaatgtactgaaaagtgtggctagttatgtttgatccacattctagagaaatttgtaggttttaatttcttttctcttggtcctctcttcatgtataatggttgcttttaacagctgttcgctgatgtggtcctgctctgtcccagtctagcagctttagtgtatggaaaaattgaactaggaattgagttttgaagaaataaaggtgtaagagcaaacattcaacagttgctgtccccagtaatgaagttcatacagacaaaagatggcatgtcactgtacatcataccttgcaataaatattctgttaaattgtgctggtgcaatttaacatgcttttgtcaaagtaaa

SEQ ID NO: 1743 - DNA, 2058 bp, Homo Sapiens
  NM_002489
gggtccttcaggtaggaggtcctgggtgactttggaagtccgtagtgtctcattgcagataatttttagcttagggcctggtggctaggtcggttctctcctttccagtcggagacctctgccgcaaacatgctccgccagatcatcggtcaggccaagaagcatccgagcttgatccccctctttgtatttattggaactggagctactggagcaacactgtatctcttgcgtctggcattgttcaatccagatgtttgttgggacagaaataacccagagccctggaacaaactgggtcccaatgatcaatacaagttctactcagtgaatgtggattacagcaagctgaagaaggaacgtccagatttctaaatgaaatgtttcactataacgctgctttagaatgaaggtcttccagaagccacatccgcacaattttccacttaaccaggaaatatttctcctctaaatgcatgaaatcatgttggagatctctattgtaatctctattggagattacaatgattaaatcaataaataactgaaacttgatatgtgtcacttttttatgctgaaagtatgctctgaactttagagtataggaaattaactattagaatttaaagaatttcttgaatttctgtagtttgaaaatacgactttaagctgctttagtaaaacacttccattttgtgtatagactgttggtaacttcactagagcatacataacaactggaactggaaattatacaaaagtaaattgggaaggatactccagcatctgacactggcaaaatggaaacctttgagtttctcttactggctgttgaagtgtgtgcagtttttaacaatggtttttacttggcatctctttgttgtgattttcaaggttataagttgctttggtcctaggattgaagttgaaatctgagtttatcagtgctaaccatggtgctagtagtcaagagatcttgagaattttggctgctgagtcttggtgcagggtgcaggttttcttttcttttttcttttttttttttttgagatagtctctgtcacccaggctggagtgcagtggtacaaacatggatcactgcagcctctacctcccgggcttaagtgatcctcctgcctcagcccctaagtagccgggactacaggtatgtgccaccatgcccagttaatttttgtaattttttttagagacagggttttgccatgttgcccaggctggtctcaaactcttgagctcaagcgatccattctcctcagcctcccagggtgctgggattacaggcgtgagccattgcgcttagccatggtgcaggttttcaaaggccaggaagtatattcataattttaagatggggaatatagcaagttttcacataggtgtgtgtaagtcatcacatcatagaaacttgaggaattcagtgacattaattttggattttcatacgtaagtatacaattaaatgtttacagggtagtagaagcacattttaaatgtcaggaactgaactaagtatttgaattacgtggattatctcaaaaattttgaaattgttaaacgagttgaattacttgaattcattctgttagtcaaatggtggatatttacacccatgtagttttgaatttagagtgtgtagagtgttttcagttaccagactccatgcttttacctcctatgtgtcaggtataatttgaacctctaagaacagggtttctcaaccttgccactgttgactatttctgaaagacagtttggtttagcagaccatcccatgcgctttagcttgtttagtagctaacttgggctctgccactacagacaaaaagcactctttccctccaattcccacaggctatgagaagaatggagacattaccaaatgtccattggtgggcaaaattgcttcattcctacctctgttgagaattactctagatcctttggcacaaattacctcaaagtttaaaattgtgtaaacaaacagtgtgtcatgtaattgaaaaacattaagcaactccaaataaatgctacattaag

SEQ ID NO: 1744 - DNA, 770 bp, Homo Sapiens
  NM_002491
agtatgccggcagccccgccctgtgtgcggtgtctaaggattccgtccccaagcaaggacaacatattatcttccccgcccttctcttttctacagtatctgttacctcagtcagattgaggatgcacatatactgggaaaataatcgacttccagcgtccctcatgtagtctctacctgattcaggaatctctaacccagtatcggaacgttaagcggcttctccgctttcctgccgtgagaaactcgaggtgacaacctccgtttccggttggctccggttgcagagttgagtgtcctgagaggtcagattgctgtcagacatggcccatgaacatggacatgagcatggacatcataaaatggaacttccagattatagacaatggaagatagaagggacaccattagaaactatccagaagaagctggctgcaaaagggctaagggatccatggggccgcaatgaagcttggagatacatgggtggctttgcaaagagtgtttccttttctgatgtattctttaaaggattcaaatggggatttgctgcatttgtggtagctgtaggagctgaatattacctggagtccctgaataaagataagaagcatcactgaagataatacctggaagcatcatagtggtttcttaactctccaaaataagatttcttctctgtagcctacttgtctggtttatcccttacagaatattagtaagatttaatcaattaaaatatatatatatgccaaaaaaaaaaaaaaaaa

SEQ ID NO: 1745 - DNA, 676 bp, Homo Sapiens
  NM_002495
tttcatcctggcgtttgcctgcagcaagatggcggcggtgtcaatgtcagtggtactgaggcagacgttgtggcggagaagggcagtggctgtagctgccctttccgtttccagggttccgaccaggtcgttgaggacttccacatggagattggcacaggaccagactcaagacacacaactcataacagttgatgaaaaattggatatcactactttaactggagttccagaagagcatataaaaactagaaaagtcaggatctttgttcctgctcgcaataacatgcagtctggagtaaacaacacaaagaaatggaagatggagtttgataccagagagcgatgggaaaatcctttgatgggttgggcatcaacggctgatcccttatccaacatggttctaaccttcagtactaaagaagatgcagtttcctttgcagaaaaaaatggatggagctatgacattgaagagaggaaggttccaaaacccaagtccaagtcttatggtgcaaacttttcttggaacaaaagaacaagagtatccacaaaataggttggcactgactatatctctgcttgactgtgaataaagtcagctgtgcagtatttatagtccatgtataataaatacatctcttaatctcctaataaattggacctttaaactacagat

SEQ ID NO: 1746 - DNA, 824 bp, Homo Sapiens
  NM_002496
aagcatcaatacagaaaagggggaacccgctggcccaatggcagcgtcctacagtgtagcctccgcctcccgattgactggcctgcttggcaaggcaagtagcggcggcgcttcaagatgcgctgcctgaccacgcctatgctgctgcgggccctggcccaggctgcacgtgcaggacctcctggtggccggagcctccacagcagtgcagtggcagccacctacaagtatgtgaacatgcaggatcccgagatggacatgaagtcagtgactgaccgggcagcccgcaccctgctgtggactgagctcttccgaggcctgggcatgaccctgagctacctgttccgggaaccggccaccatcaactacccgttcgagaagggcccgctgagccctcgcttccgtggggagcatgcgctgcgccggtacccatccggggaggagcgttgcattgcctgcaagctctgcgaggccatctgccccgcccaggccatcaccatcgaggctgagccaagagctgatggcagccgccggaccacccgctatgacatcgacatgaccaagtgcatctactgcggcttctgccaggaggcctgtcccgtggatgccatcgtcgagggccccaactttgagttctccacggagacccatgaggagctgctgtacaacaaggagaagttgctcaacaacggggacaagtgggaggccgagatcgccgccaacatccaggctgactacttgtatcggtgacgccccaccggcccgcagcccctgctgcccaataaaaccactccgaccccacggaaaaaaaaaaaaaaaaaaaa

SEQ ID NO: 1747 - DNA, 5576 bp, Homo Sapiens
  NM_002501
gcggccgccgcctgccgggcctcccctcgccgcggccggccgccgcgctcccgcccgggcgcccagctatgtactccccgtactgcctcacccaggatgagttccacccgttcatcgaggcactgctgcctcacgtccgcgctttctcctacacctggttcaacctgcaggcgcggaagcgcaagtacttcaagaagcatgaaaagcggatgtcgaaggacgaggagcgggcggtgaaggacgagctgctgggcgagaagcccgagatcaagcagaagtgggcatcccggctgctggccaagctgcgcaaggacatccggcccgagttccgcgaggacttcgtgctgaccatcacgggcaagaagcccccctgctgcgtgctctccaaccccgaccagaagggcaagatccggcggattgactgcctgcgccaggctgacaaggtgtggcggctggacctggtcatggtgattttgtttaaggggatccccctggaaagtactgatggggagcggctctacaagtcgcctcagtgctcgaaccccggcctgtgcgtccagccacatcacattggagtcacaatcaaagaactggatctttatctggcttactttgtccacactccggaatccggacaatcagatagttcaaaccagcaaggagatgcggacatcaaaccactgcccaacgggcacttaagtttccaggactgttttgtgacttccggggtctggaatgtgacggagctggtgagagtatcacagactcctgttgcaacagcatcagggcccaacttctccctggcggacctggagagtcccagctactacaacatcaaccaggtgaccctggggcggcggtccatcacctcccctccttccaccagcaccaccaagcgccccaagtccatcgatgacagtgagatggagagccctgttgatgacgtgttctatcccgggacaggccgttccccagcagctggcagcagccagtccagcgggtggcccaacgatgtggatgcaggcccggcttctctaaagaagtcaggaaagctggacttctgcagtgccctctcctctcagggcagctccccgcgcatggctttcacccaccacccgctgcctgtgcttgctggagtcagaccagggagcccccgggccacagcatcagccctgcacttcccctccacgtccatcatccagcagtcgagcccgtatttcacgcacccgaccatccgctaccaccaccaccacgggcaggactcactgaaggagtttgtgcagtttgtgtgctcggatggctcgggccaggccaccggacagcattcgcaacgacaggcgcctcctctgccaaccggtttgtcagcatcggaccccgggacggcaactttctgaacatcccacagcagtctcagtcctggttcctctgataagatcgacaaaagaaacaacaaaatgagaagaagaggttcctcgaaaggggggagaagaaattttgagaatggaaaaatcccccagcccagcccagccccaccgaaaagcaaaaattacacgtcgtcagccactcagcccttctctcctccagcccggggacccccgcgggccccagaagcagcccagttctcagagagcccttggaaggggtctcggtggagctgtgcaccagcagccaagcagaaagaaacacgcgacatggactctgtcaagtagaggacagaaagcaagaaaggatgcagaactgccttcctccccctgaccccgccccggccttctggggaaggaacaaagtccccaaacaaagcaaccagcacaattctgaaggggcctggcctccaccctcaccccttcctaggggaaccccaccctccacacagccggagctgccctagggagcctggagggccagcttgtaaagatgatggggtttagatccctcaggctctcccctccagactccgcccttccctccctccctccctccctccctctctgccaaggctccagcttcttcccccagctgctcccgaccaggagggggagagcagcctccacttaccccaccccacccttgggctaaaagcccccaggcgggcagggggtgacccctggagctagttgcgtgtcccagaatggagggtgttctgacaccccaccctgagccgcaagagcagtcctggggccctggacccctctgtacagtccgtaggaaaaagtcggaatgctctcgacggcctcgtcccagcctgggacaggccccctttcccctctctctgcaggccaggagggcctccttcctgccacgagggaggggagtcgggccccaggtcgcccccgcccccagccctgcatgcaggtgccctcgctccgccccatcagttcctgcccctgcccctcatgcagactgccctgctggggccgggccggagggtggagcagaaaggggaccccggagccgagcgaggaggaccaggcagccgccgctgccgcgctaagccaccacctgcgcttaggtaggcgtcctgctcgccgactttcagttccttgggagggtgttgggtgtcgtccttttcaaaagtgttttggagctttctgtgccccccgactttcccccgcctccccgccccccacgtggccacttttctctggattttagctgtaatgtctttactctttatttaggggtggggcattcattgtttgggtcttttgctgttggaatgggaactcctcctccatttgagcaacttgggaacaatttggtaacacaccacaggaagtagctctcccccccagccccctcctccctcaagggagggttggggggcctgtccagagggtcttcagaagcccccctgggagggaggggaggatgagcacgcccagctcccctccagggtgtgacttggcccctctggcttgtctttctgtgccttactcctcctcctgcgtctcccgttcctggccccttcttgagtccttgtgcctctctctttctctctctttcttaattgtatgaaaacacaaagcacaggtcaggatcctctgagagaaaatcaacattgcaccacgtaggggtgggctatgggctgtatttattgtgaatctagtttgtgaggctgtggccccgagctggcggagggagggaagaggagggagtgacgggaggggaggaggtcagcgacctggggccgtagcggcaggcgaacggtgcctgctacccagctggaagccacaaggtggctggctccaggggcggcttttgttggaagttgagtgaagccctccccctgtcctcagcgtgcagccctagaggaccccagggctgaggggcagtggatcctgcgggagtctcccggggcgtggggagtaaggccccgggggtggggggccgggtgggccgggcgtgacgcgcggtcaaagtgcaatgatttttcagttcggttggctaaacagggtcagagctgagagcgaagcagaaggggctccctgtccggcccacgtgccctttccctcgacgacagtcgagggctcgggctctgtgggactgtgggagctagggtctgcggggcgcctgcccgggcgaggtcggaagctgcaggccagctgggcccgggccggagcgtgcccggcggggctgcccgggcgggcagggggtgggggctgctcctttcccaagtggtgttgtgaggggcaatgagggcaacaggagatgtggggacgtgttaggagagaaaaaaaaaaaaacaaaaatatatatgggggaaattaacttttttttttcattgaaccaagtgcaatgcatcagagagttttcctatctttgtatgttaagagattaagaaaaaaaaattctatttttgttgtaatgtcctcgcggctctggggacgctaaaagaaccgggcctgccccgccctgcgcggggataacgaaagctgagtgtttttcccttttttttgttcgtttttagtttttttttttttaagtcgttttcctgcgttgacgaggatgatctggggtttttatttgtttcgtcgttcgttctgtttcggtgggagggctgaaggaaacgttcacattttagagtttaaaaaaaacacctcgacatttaaaaaatcaaccaacacaagatcaaaaaggaaaaggacgagagaaaaattatttttaagataattaaacataaaaccctggtgcttcttacattataaagtacgttttaaagaacccacaaactattatacataagtttatgaatcaattaaatatcctgcacttgttaggaatacgcatatcccttctttgttgagtttaacggaacgggacagcggcgtgcccccggcggctggactgctccggccgcgggtctccccgggcgcccctccctggggcccagcacccctcctcgccccatccccgtccgggtacgggggcgcggcaggggtccccggcccctcccccgcagaggtcaatgccaacgaacaaacgtcccctccctccctccctctccgccccgagcgcccttctttgagccagacgccaacttgaccctcaccagcattatcaggagcgcgctcagcaagttggtagtttcctcccccctttcccggcgcccctcccgcccccattcaacatctctcatcctatccccgaccccctccggggaacaccgggaaggctcgacgctccaggacaggaccagccacgcagacaggtcgatttgcccaggcccgcgcccgcacgcacgcacgcacacggccccgcacacagccccgccccaccccgcaaccagccctgtcgactgccttatacacccgcccccgcgctggccggccgacctagtgccttgttctcacccccgtgctggcggagcggacgccgcgctctgggtcccagaggggccgggtggctcagacgacccaccactcccccaccctgaccgtgctgaacagacccccccacacgagagaaaataaaggagcaataaagtcacgagaactttcgtcccccaatcgagagcccgaggggcaccccagccccgcctctgctcccccccaccccacccaccctcggggcgcccccctccccccgcaagccagcctgggccagccccgcttcggcccctcccgggagatccgtgcgcccgaccagcaccagcatcgcggaccgcaaaggccgcccgtcccgtcaaacaagtttcttcttaggctaagaaacgcagtatatacgagtatctctatatatagtactaatggatttggtgtgcttcccccttagcgtccccctccctctgctcctcctccttcagcctggtctccccctcttctctgccctccacccccgtctctgcactgagatacataagaaacaagggtagtttactgtctgttttgttttctgggttttcagtgtcctagcggaatgcaagtaggcagccagcccgtctgttccctctccgccccgccccgccccgcccccgtcactgcgcttctgttataccatctttgcctgactctctccggcttctccattgaatggctaatgtgtatgtgaaataaagaaataaagaaaaacaaacgcga

SEQ ID NO: 1748 - DNA, 1198 bp, Homo Sapiens
  NM_002503
ccggcaaagcccagctacaggcgggcgactgcggggggcccctgaggcggcgggggccatggctggggtcgcgtgcttgggaaaagctgccgacgcagatgaatggtgcgacagcggcctgggctccctgggtccggacgcagcggcccccggaggacctgggttgggcgcggagttgggcccggggctgtcgtgggctcccctcgtcttcggctacgtcactgaggatggggacacggcactgcacttggctgtgattcatcagcatgaacccttcctggattttcttctaggcttctcggccggcactgagtacatggacctgcagaatgacctaggccagacagccctgcacctggcagccatcctgggggagacatccacggtggagaagctgtacgcagcaggcgccgggctgtgtgtggcggagcgtaggggccacacggcgctgcacctggcctgccgtgtgggggcacacgcctgtgcccgtgccctgcttcagccccgcccccggcgccccagggaagcccccgacacctacctcgctcagggccctgaccgtactcccgacaccaaccatacccctgtcgccttgtaccccgattccgacttggagaaggaagaagaggagagtgaggaggactggaagctgcagctggaggctgaaaactacgagggccacaccccactccacgtggccgttatccacaaagatgtggagatggtccggctgctccgagatgctggagctgaccttgacaaaccggagcccacgtgcggccggagcccccttcatttggcagtggaggcccaggcagccgatgtgctggagcttctcctgagggcaggcgcgaaccctgctgcccgcatgtacggtggccgcaccccactcggcagtgccatgctccggcccaaccccatcctcgcccgcctcctccgtgcacacggagcccctgagcccgagggcgaggacgagaaatccggcccctgcagcagcagtagcgacagcgacagcggagacgagggcgatgaatacgacgacattgtggttcacagcagccgcagccaaacccggctgcctcccaccccagcctcaaaacctcttcctgacgacccccgccccgtgtgatttgtttcattgttaatataatttccagtttaataaacaaaaccctagttctgacaaccagaaaaaaaa

SEQ ID NO: 1749 - DNA, 4721 bp, Homo Sapiens
  NM_002504
aacgcgccacacagattcgggctgcgcaacctctgtggccgtctacacggcgcgcagatgcgaatattctcgcggcgccggaagtccggggcacgtgacctggtgacagtgctgacttggctgtacagctcgatctaggttctgcggcacgggatggcggaggcgcctcctgtctcaggtacttttaaattcaatacagatgctgctgaattcattcctcaggagaaaaaaaattctggtctaaattgtgggactcaaaggagactagactctaataggattggtagaagaaattacagttcaccacctccctgtcacctttccaggcaggtcccttatgatgaaatctctgctgttcatcagcatagttatcatccgtcaggaagcaaacctaagagtcagcagacgtctttccagtcctctccttgtaataaatcgcccaagagccatggccttcagaatcaaccttggcagaaattgaggaatgagaagcaccatatcagagtcaagaaagcacagagtcttgctgagcagacctcagatacagctggattagagagctcgaccagatcagagagtgggacagacctcagagagcatagtccttctgagagtgagaaggaagttgtgggtgcagatcccaggggagcaaaacccaaaaaagcaacacagtttgtatacagctatggtagaggaccaaaagtcaaggggaaactcaaatgtgaatggagtaaccgaacaactccaaaaccggaggatgctggacccgaaagtaccaaacctgtgggggttttccaccctgactcttcagaggcatcctctagaaaaggagtattggatgggtatggagccagacgaaatgagcagagaagatacccacagaaaaggcctccctgggaagtggagggggccaggccacgaccaggcagaaatccaccaaaacaggagggccaccgacatacaaacgcaggacacagaaacaacatgggccccattccaaaggatgacctcaatgaaagaccagcaaaatctacctgtgacagtgagaacttggcagtcatcaacaagtcttccaggagggttgaccaagagaaatgcactgtacggaggcaggatcctcaagtagtatctcctttctcccgaggcaaacagaaccatgtgctaaagaatgtggaaacgcacacaggttctctaattgaacaactaacaacagaaaaatacgagtgcatggtgtgctgtgaattggttcgtgtcacggccccagtgtggagttgtcagagctgttaccatgtgtttcatttgaactgcataaagaaatgggcaaggtctccagcatctcaagcagatggccagagtggttggaggtgccctgcctgtcagaatgtttctgcacatgttcctaatacctacacttgtttctgtggcaaggtaaagaatcctgagtggagcagaaatgaaattccacatagctgtggtgaggtttgtagaaagaaacagcctggccaggactgcccacattcctgtaaccttctctgccatccaggaccctgcccaccctgccctgcctttatgacaaaaacatgtgaatgtggacgaaccaggcacacagttcgctgtggtcaggctgtctcagtccactgttctaacccatgtgagaatattttgaactgtggtcagcaccagtgtgctgagctgtgccatgggggtcagtgccagccttgccagatcattttgaaccaggtatgctattgcggcagcacctcccgagatgtgttatgtggaaccgatgtaggaaagtctgatggatttggggatttcagctgtttaaagatatgtggcaaggacttgaaatgcggtaaccatacatgttcgcaagtgtgccaccctcagccctgccagcaatgcccacggctcccccagctggtgcgctgttgcccctgtggccaaactcctctcagccaattgctagaacttggaagtagtagtcggaaaacatgcatggaccctgtgccttcatgtggaaaagtgtgcggcaagcctctgccttgtggttccttagatttcattcatacctgtgaaaagctctgccatgaaggagactgtggaccatgctctcgcacatcagttatttcctgcagatgctctttcagaacaaaggagcttccatgtaccagtctcaaaagtgaagatgctacatttatgtgtgacaagcggtgtaacaagaaacggttgtgtggacggcataaatgtaatgagatatgctgtgtggataaggagcacaagtgtcctttgatttgtgggaggaaactccgttgtggccttcataggtgtgaagaaccttgtcatcgtggaaactgccagacatgctggcaagccagttttgatgaattaacctgccattgtggtgcatcagtgatttaccctccagttccctgtggtactaggccccctgaatgtacccaaacctgcgctagagtccatgagtgtgaccatccagtatatcattcttgtcatagtgaggagaagtgtcccccttgcactttcctaactcagaagtggtgcatgggcaagcatgagtttcggagcaacatcccctgtcacctggttgatatctcttgcggattaccctgcagtgccacgctaccatgtgggatgcacaaatgtcagagactctgtcacaaaggggagtgtcttgtggatgagccctgcaagcagccctgcaccacccccagagctgactgtggtcacccgtgtatggcaccctgccataccagctcaccctgccctgtgactgcttgtaaagctaaggtagagctacagtgtgaatgtggacgaagaaaagagatggtgatttgctctgaagcatctagtacttatcaaagaatagctgcaatctccatggcctctaagataacagacatgcagcttggaggttcagtggagatcagcaagttaattaccaaaaaggaagttcatcaagccaggctggagtgtgatgaggagtgttcagccttggaaaggaaaaagagattagcagaggcatttcatatcagtgaggattctgatcctttcaatatacgttcttcagggtcaaaattcagtgatagtttgaaagaagatgccaggaaggacttaaagtttgtcagtgacgttgagaaggaaatggaaaccctcgtggaggccgtgaataagggaaagaatagtaagaaaagccacagcttccctcccatgaacagagaccaccgccggatcatccatgacttggcccaagtttatggcctggagagcgtgagctatgacagtgaaccgaagcgcaatgtggtggtcactgccatcagggggaagtccgtttgtcctcctaccacgctgacaggtgtgcttgaaagggaaatgcaggcacggcctccaccaccgattcctcatcacagacatcagtcagacaagaatcctgggagcagtaatttacagaaaataaccaaggagccaataattgactattttgacgtccaggactaagaagatcatgatgcacttagataaaagaatgattaggtatagtggagacttatttgccagcagataaatcatgcccgttcccctctgcctggcagaatcacagtctcacatactgtcttgtactgacacatccaaagcatgagtgtgtcagaaatcccttgtctattcctgtctgtataaagtgtttcattatgaccagatctctgattgtatggtcactaggtatgcaatcacgcattcaaagaggctctttacaccatcactgtgattgctctgagagttgagggactattgggctttatttggacaaaccaaacttttagcctgaaaccaactttatgccactaagtcatagcctcagttgtcccagttatttgtcctcctgaaaatgcctgaaacatcagacagacattgcttgctttacccaaactgatcaaaatctttaggagcacaaatgaattttttagtctgaaataccaaataatgaattggtataccatatccggaatcacacatgttatcttaaacccagccatcatacctaagtcttttgccaaaacctctcataggtatatctagctgaacttattttggcattttcaatgtgatcagttctagacctagaagggggtcaggctgctttacagaattctatttccttaagtccctggcacttctcataccacatcactgaacctgttcagtaacaatcagtttggccgtcccccatgatggtaggaaatatagagagcaagttcttctgccagggtcacactgtggtctctgaactgaccagtatatccctaactcctctttgatagagaaagagtctcaaatggacaactgtcctgtgttgctttccctaggccttcagcagcctattggctctccctgcctctgagctctggactctgtttgaatattccaagtagtatatggacagtccagggcttatgcccagcagcccactggaggcattcttcaggctcctttaaggcaggtgcattgatagttccattagtgtgacccttgcattggcacccctccagcctggaggccaggcttccagcaacttccttctgccctagagcaagccatgagccccagagcagtagcaggagacttgagaagtagagtgacaaaaacaagcacttaattaaattataaaatttaactttaaaaaaaaaaaaaaaaaaaaaaaaaaa

SEQ ID NO: 1750 - DNA, 846 bp, Homo Sapiens
  NM_002512
tgcctggcgagggcgcgccccggctgggcgtggacactgttctccggccgcgtcgggccgggcgggtggggcgttcctgcgggttgggcggctgggccctccggggtgtggccaccccgcgctccgccctgcgcccctcctccgccgccggctcccgggtgtggtggtcgcaccagctctctgctctcccagcgcagcgccgccgcccggcccctccagcttcccggaccatggccaacctggagcgcaccttcatcgccatcaagccggacggcgtgcagcgcggcctggtgggcgagatcatcaagcgcttcgagcagaagggattccgcctcgtggccatgaagttcctccgggcctctgaagaacacctgaagcagcactacattgacctgaaagaccgaccattcttccctgggctggtgaagtacatgaactcagggccggttgtggccatggtctgggaggggctgaacgtggtgaagacaggccgagtgatgcttggggagaccaatccagcagattcaaagccaggcaccattcgtggggacttctgcattcaggttggcaggaacatcattcatggcagtgattcagtaaaaagtgctgaaaaagaaatcagcctatggtttaagcctgaagaactggttgactacaagtcttgtgctcatgactgggtctatgaataagaggtggacacaacagcagtctccttcagcacggcgtggtgtgtccctggacacagctcttcattccattgacttagaggcaacaggattgatcattcttttatagagcatatttgccaataaagcttttggaagccggaaaaaaaaaaaaaaaaaa

SEQ ID NO: 1751 - DNA, 1038 bp, Homo Sapiens
  NM_002513
aggagacttggcctccgcagctgccctccggccccccacggctgccgggttccggggtgcaagtgaagcagcctccccgcggaggccgcagcgccccgaccaggcctctttaagcgcaggccccgccccgggcgccaccgccccgccccgcggatcccgctcccgcaccgccatcatgatctgcctggtgctgaccatcttcgctaacctcttccccgcggcctgcaccggcgcacacgaacgcaccttcctggccgtgaagccggacggcgtgcagcggcggctggtgggcgagattgtgcggcgcttcgagaggaagggcttcaagttggtggcgctgaagctggtgcaggcctccgaggagctgctgcgtgagcactacgccgagctgcgtgaacgcccgttctacggccgccttgtcaagtatatggcctccgggccggtggtggccatggtatggcaggggctggacgtggtgcgcacctcgcgggcgctcatcggagccacgaacccggccgacgccccgcccggcaccatccgcggggatttctgcatcgaggttggcaagaacctgattcacggcagcgactcggtggagagtgcccgccgcgagatcgctctctggttccgcgcagacgagctcctctgctgggaggacagcgctgggcactggctgtatgagtagcccggcagatgcgcgtcacagaggctctcacactccagcctcctccagggcccaggtgggcgggcttctggccccaccccacagcgcttggagcatccctttggacgggctgctgaacatccacctgtctggacgttgcatggagggtggcgcaggcctctccaatccctggcgtacagggtttcctgcccgaggagctgctccaggagcctgcgcggctcgcctggaaacgtgccaggacactgtcctggtgcccagcccaacgtggtccaacgtttttttataataaagtcctcgttttcgtttcggtttgggcccaggaacaggcaaaaaaaaaaaaaaaaaaaaaaaaa

SEQ ID NO: 1752 - DNA, 2601 bp, Homo Sapiens
  NM_002514
aattgccatggcaaccccggggttcgttccacttccccacccagccgatctcccccctcctccctgcactgcagccaaccggcttgtgcgcgtcccaggagcgcgctataaaacctgtgctgggcgtgatcggcaagcaccggaccagggggaaggcgagcagtgccaatctacagcgaagaaagtctcgtttggtaaaagcgagaggggaaagcctgagcatgcagagtgtgcagagcacgagcttttgtctccgaaagcagtgcctttgcctgaccttcctgcttctccatctcctgggacaggtcgctgcgactcagcgctgccctccccagtgcccgggccggtgccctgcgacgccgccgacctgcgcccccggggtgcgcgcggtgctggacggctgctcatgctgtctggtgtgtgcccgccagcgtggcgagagctgctcagatctggagccatgcgacgagagcagtggcctctactgtgatcgcagcgcggaccccagcaaccagactggcatctgcacggcggtagagggagataactgtgtgttcgatggggtcatctaccgcagtggagagaaatttcagccaagctgcaaattccagtgcacctgcagagatgggcagattggctgtgtgccccgctgtcagctggatgtgctactgcctgagcctaactgcccagctccaagaaaagttgaggtgcctggagagtgctgtgaaaagtggatctgtggcccagatgaggaggattcactgggaggccttacccttgcagcttacaggccagaagccaccctaggagtagaagtctctgactcaagtgtcaactgcattgaacagaccacagagtggacagcatgctccaagagctgtggtatggggttctccacccgggtcaccaataggaaccgtcaatgtgagatgctgaaacagactcggctctgcatggtgcggccctgtgaacaagagccagagcagccaacagataagaaaggaaaaaagtgtctccgcaccaagaagtcactcaaagccatccacctgcagttcaagaactgcaccagcctgcacacctacaagcccaggttctgtggggtctgcagtgatggccgctgctgcactccccacaataccaaaaccatccaggcagagtttcagtgctccccagggcaaatagtcaagaagccagtgatggtcattgggacctgcacctgtcacaccaactgtcctaagaacaatgaggccttcctccaggagctggagctgaagactaccagagggaaaatgtaacctgtcactcaagaagcacacctacagagcacctgtagctgctgcgccacccaccatcaaaggaatataagaaaagtaatgaagaatcacgatttcatccttgaatcctatgtattttcctaatgtgatcatatgaggacctttatatctgtcttttatttaacaaaaaatgtaattaactgtaaacttggaatcaaggtaagctcaggatatggcttaggaatgacttactttcctgtggttttattacaaatgcaaatttctataaatttaagaaaacaagtatataatttactttgtagactgtttcacattgcactcatcatattttgttgtgcactagtgcaattccaagaaaatatcactgtaatgagtcagtgaagtctagaatcatacttaacatttcattgtacaagtattacaaccatatattgaggttcattgggaagattctctattggctccctttttgggtaaaccagctctgaacttccaagctccaaatccaaggaaacatgcagctcttcaacatgacatccagagatgactattacttttctgtttagttttacactaggaaacgtgttgtatctacagtaatgaaatgtttactaagtggactggtgtcataaactttctccatttaagacacattgactcctttccaatagaaagaaactaaacagaaaactcccaatacaaagatgactggtccctcatagccctcagacatttatatattggaagctgctgaggcccccaagttttttaattaagcagaaacagcatattagcagggattctctcatctaactgatgagtaaactgaggcccaaagcacttgcttacatcctctgatagctgtttcaaatgtgcattttgtggaattttgagaaaaatagagcaaaatcaacatgactggtggtgagagaccacacattttatgagagtttggaattattgtagacatgcccaaaacttatccttgggccataattatgaaaactcatgatcaagatatatgtgtatacatacatgtatctggtttgtcaggctacaaggtaggctgcaaaattaaatctagacattcttttaatgccaccacacgtgttccgcttctctcttttaaagtatttataaaaatataaattgtacattttgtaaaatattatgtttgatttctctacttgtcatatcactaaataaacacgattttattgctgcgtgactctgtattactttggtgcataaaagttgaacattgttgtttactgaaaataaaattaaaatttatgaattaaatgag

SEQ ID NO: 1753 - DNA, 5962 bp, Homo Sapiens
  NM_002519
agtgccgccactggaaccaggagatgcggcgcaggagctgtcgctgtgtttgctttaacctgagtcttgttccttattgtggttcctgctgtggttttgatcatgttgttaccctcggacgtagcccggcttgtattgggttacttacagcaagaaaacctcatttctacctgccagacttttattttggaaagttcagatttaaaagaatatgcagaacattgtacagatgaagggtttattccagcctgcttactgtccttatttggaaaaaacttgacaacaattttaaatgagtatgtagctatgaaaacaaaagaaacatcaaataatgtcccagcaataatgtcatctctatggaagaaattggaccatacactttctcagatcaggagcatgcaaagttccccaaggtttgctggcagtcagagagcccgaacgagaactggaattgcagaaatcaaacggcagagaaagcttgcatctcaaacagctccagccagtgcagagttgctcactttaccttacctttcaggacagtttaccactcctccttccacaggtacacaggttactcgaccaagtggccaaatttcagatccatcgaggtcatattttgtagtggtcaaccactcacagtcacaagatactgtaaccactggagaagctttaaatgtcattcctggtgctcaggaaaagaaagcacatgccagtttaatgtctcccggtagacgcaaaagtgaatctcagagaaaaagtaccactttgtctggccctcattcaacaatacggaatttccaagatccaaacgcttttgcagtagaaaaacaaatggttattgaaaatgcacgagaaaaaatactaagcaacaaatctcttcaagaaaagctagcagaaaacataaataaatttttaactagtgataacaatattgcccaagtacctaagcaaacagataacaaccctacggagccagagacttcaattgatgaattcctaggacttccgagtgaaattcacatgtctgaagaagctatacaggacatattggaacagacagaatcagacccagcatttcaggcactctttgatctctttgactatggcaaaacaaagaataataaaaatatatcacaaagtatttccagtcaacctatggaatccaatcccagtatagtcttagcagatgaaactaatctagcagttaaaggttcttttgaaacagaagaatctgatggtcagtctggtcagcccgctttttgtacatcctatcagaatgatgacccattaaatgctttgaagaatagcaacaaccatgatgtgcttagacaagaagaccaggaaaatttttcccaaataagtaccagcatacagaaaaaggcctttaaaacagctgtacccactgaacagaagtgtgacattgacattacctttgagtccgtgcctaatttgaatgactttaaccaaagagggaattctaatgctgaatgtaatccacattgtgctgaattatacaccaatcagatgtccactgaaactgaaatggctatagggattgaaaagaactctttgtcttcaaatgtaccgagtgaatctcagttacagcctgatcagcctgatataccaataacttcatttgtttcacttggttgtgaagctaacaatgaaaacttaattctctctgggaagagttctcaacttttatcccaagatacttcattaactggaaagccatctaaaaaaagtcaattttgtgaaaattctaatgatacagtaaaacttaaaattaattttcatggttccaagtcatcagattctagtgaagttcacaagagtaaaatagaaattaatgtgttagaaccagttatgtcacagctatcaaattgccaagataattcttgtcttcaaagtgaaatactacctgtgtctgttgaaagttcacatttaaatgtatctggacaagtagaaattcatcttggagattcgctgtcttctactaaacaaccatctaatgattcagcatctgttgagttaaatcatacagaaaatgaagctcaggcatccaagtctgagaattcacaggagccttcatcttctgtaaaagaagagaatactatttttctctctttaggtggaaatgctaactgtgagaaagttgcactgacgcctccagaaggcactcctgtagaaaacagtcactctcttcctccagaatctgtgtgttcttcagtgggagattctcaccctgagtcccaaaatactgatgataaaccttctagcaacaactcagcagagatagatgcatcaaatatcgtctctctcaaagttatcattagtgatgatccatttgtttcctcagatactgaacttaccagtgctgtttctagtattaatggagaaaacctgccaactataatcttgtcttctcctactaaatcacctactaaaaatgcagaactagttaaatgcctatcttcagaagaaactgtaggtgctgttgtatatgccgaagtaggggattcagcctcaatggaacagagtcttttaacattcaaatctgaagactctgcagtaaacaatactcagaatgaagatggcattgctttttcagctaatgttacaccatgtgtttccaaggatggaggatatatacagttgatgccagccacaagcacagcttttggcaattcaaataacattctgatagctacctgtgtgactgatccaacagcgttaggaacatctgtaagtcagtctaatgtagtggtgttgcctggaaattctgcacctatgactgctcaacctctaccacctcagttacagacaccaccaaggtcaaacagtgtatttgctgtcaaccaagctgtgtcaccaaacttttcacaaggatctgccataataattgcctctccagtccagcctgtactccaaggaatggtagggatgatcccagtatctgtggttggacagaatggaaataacttttctactcctcctcggcaggttcttcatatgcctttgacagcacctgtatgcaatagaagtatccctcaattccccgtccctccaaaatctcagaaggctcagggactaagaaacaagccttgtataggaaaacaagtaaataatttggtggattcgtcaggtcattcagttggatgtcatgcacaaaaaactgaagtttctgacaaaagtattgccacagatcttgggaaaaaatcagaagaaaccacagttcccttcccagaagagagtatagttccagctgctaaaccatgccacagacgtgtactctgtttcgacagcactactgctcctgtggcaaatacgcaggggccaaaccataagatggtgtcccaaaacaaagaaaggaatgcagtctcttttcctaatcttgactcacccaatgtgtcctccaccttaaaacccccttctaataatgctatcaaaagagagaaagagaagcctcctctgcctaagattttatctaaatcggaaagtgccattagccggcataccaccataagagaaactcaatcagaaaagaaagtttcaccaacagaaattgtgcttgaatctttccataaagcaacagctaataaggagaatgaattatgcagcgatgtagaaagacagaaaaatccagaaaattcaaaactatctattgggcagcaaaatgggggtttgcgaagtgagaaatctatagcttcactgcaagaaatgaccaaaaaacaaggcacatcttcaaacaataaaaatgtactttcagtaggtacagctgtgaaggatctaaaacaagaacaaactaaatccgccagttctttgattaccacagaaatgttacaggatatacagaggcacagctcagtaagtaggcttgctgatagtagtgatttacctgtgccccggacacctggctcaggggcaggggaaaaacataaagaagaacctatagatattatcaaggccccctctagtaggcgtttcagtgaagacagtagtacatcaaaagtaatggtccctcctgtcaccccagacttgcctgcctgcagccctgccagtgaaacaggaagtgaaaacagtgtaaatatggctgcccacacattaatgattctctccagggcagccatttctaggactacttcagcaactcctctgaaagataacacacaacagtttagagcatcttcaaggagcaccacaaaaaagcggaaaattgaggaattagatgaacgtgagcgaaactctcgtccttctagtaaaaatcttacaaattcatcaataccaatgaaaaagaagaaaattaagaaaaagaagcttcccagttcatttccagcaggaatggatgtagacaaatttttgttatcattgcattatgatgagtaaacattctggacacataagaacagtaggtgttaaaaactcatatcccttaaactgagtgtagggaatgggatattgacagaatctgaaagcatgacctgcactttcattgtactgaaacttcactttatatctaaatcatgctgtttctgaaacagcttcctagtttgtaaatagacttacttggtatatttttattttgggaaaaacgtttgcagaaatgtaagtaaagccaatctgcaaaactgtatagctttgacaattccatattgtaaatactgtgtaaatcttgttgaaatagaggttaaatcaacctaatgttcttacactgtgttttttgacttcttatgatccctaattctgagacttactcatctggaatagtttctcacttgttttggaggaaaatgatgcttattcttataaattaccttcagtaactattcaataagacatttaaatacacaatcactaagtactacaaaataataaccacctcaactgatagcaaaatatctaattagaaatcaacagtttgatgagtttttttcctagagtgaatactacccctttcttataattgctgtaagtattatatttctggaatttcacactttacctactctgatcactctgttctctttgttttaaagagagaattttgtaaaccatttattgaatgttctgatctttcatttataacttaagattttttacagaactttaagtggttagactattgagccataaaattttggtttgtagtagagatttctcggtatgtacttttcccctaaatgctggggatttaaagaattgcactaattcatagaactctttacattgtagtgaccaatgcacatataatttaaatcttgtgttctatgtgagagtttatgtggaggattatcttctggtgttgtgtccatcataagatgtaaaaagagaaatcatagttttatattttagtttctcctacaatgggtatgttaaataactatatctatacttagatatagtgcattgtctgtgtcccttaaagtgttacaaagagtttctctcaaaaggtccttaaggagagtgagagatgagagaggtgccttctctgtattagactcacacacatcagtccagttgaagaattggtttaaacttttaaatgagaacagaaattataattagtacctgaccaattgtgcctagatattaaagtatgttctctttagtactttccgttcaattaaatatcagtatattagggatttttttctacaggtgtatattttgttgaagagtcactttcctcaaccatttttttgtactgggcctttaaaaaaataaatccatccaactttaacacaacatttctcagtgtagaaatcatgtcttcttaattgctgaaccttactgcaaaaacttgtgatgtaagaaatttgtatggtgtggcagtggtctattcctaaggaactaaatatcatatagttaatgtttatttaactcagcttgagactgtactacagttaggtttgaataaatattttcattaacttcaaaaaaaaaaaaaaaaaaaaaaaaaaaa

SEQ ID NO: 1754 - DNA, 4461 bp, Homo Sapiens
  NM_002524
gaaacgtcccgtgtgggaggggcgggtctgggtgcggcctgccgcatgactcgtggttcggaggcccacgtggccggggcggggactcaggcgcctggggcgccgactgattacgtagcgggcggggccggaagtgccgctccttggtgggggctgttcatggcggttccggggtctccaacatttttcccggctgtggtcctaaatctgtccaaagcagaggcagtggagcttgaggttcttgctggtgtgaaatgactgagtacaaactggtggtggttggagcaggtggtgttgggaaaagcgcactgacaatccagctaatccagaaccactttgtagatgaatatgatcccaccatagaggattcttacagaaaacaagtggttatagatggtgaaacctgtttgttggacatactggatacagctggacaagaagagtacagtgccatgagagaccaatacatgaggacaggcgaaggcttcctctgtgtatttgccatcaataatagcaagtcatttgcggatattaacctctacagggagcagattaagcgagtaaaagactcggatgatgtacctatggtgctagtgggaaacaagtgtgatttgccaacaaggacagttgatacaaaacaagcccacgaactggccaagagttacgggattccattcattgaaacctcagccaagaccagacagggtgttgaagatgctttttacacactggtaagagaaatacgccagtaccgaatgaaaaaactcaacagcagtgatgatgggactcagggttgtatgggattgccatgtgtggtgatgtaacaagatacttttaaagttttgtcagaaaagagccactttcaagctgcactgacaccctggtcctgacttccctggaggagaagtattcctgttgctgtcttcagtctcacagagaagctcctgctacttccccagctctcagtagtttagtacaataatctctatttgagaagttctcagaataactacctcctcacttggctgtctgaccagagaatgcacctcttgttactccctgttatttttctgccctgggttcttccacagcacaaacacacctctgccaccccaggtttttcatctgaaaagcagttcatgtctgaaacagagaaccaaaccgcaaacgtgaaattctattgaaaacagtgtcttgagctctaaagtagcaactgctggtgattttttttttctttttactgttgaacttagaactatgctaatttttggagaaatgtcataaattactgttttgccaagaatatagttattattgctgtttggtttgtttataatgttatcggctctattctctaaactggcatctgctctagattcataaatacaaaaatgaatactgaattttgagtctatcctagtcttcacaactttgacgtaattaaatccaactttcacagtgaagtgcctttttcctagaagtggtttgtagacttcctttataatatttcagtggaatagatgtctcaaaaatccttatgcatgaaatgaatgtctgagatacgtctgtgacttatctaccattgaaggaaagctatatctatttgagagcagatgccattttgtacatgtatgaaattggttttccagaggcctgttttggggctttcccaggagaaagatgaaactgaaagcacatgaataatttcacttaataatttttacctaatctccacttttttcataggttactacctatacaatgtatgtaatttgtttcccctagcttactgataaacctaatattcaatgaacttccatttgtattcaaatttgtgtcataccagaaagctctacatttgcagatgttcaaatattgtaaaactttggtgcattgttatttaatagctgtgatcagtgattttcaaacctcaaatatagtatattaacaaattacattttcactgtatatcatggtatcttaatgatgtatataattgccttcaatccccttctcaccccaccctctacagcttcccccacagcaataggggcttgattatttcagttgagtaaagcatggtgctaatggaccagggtcacagtttcaaaacttgaacaatccagttagcatcacagagaaagaaattcttctgcatttgctcattgcaccagtaactccagctagtaattttgctaggtagctgcagttagccctgcaaggaaagaagaggtcagttagcacaaaccctttaccatgactggaaaactcagtatcacgtatttaaacatttttttttcttttagccatgtagaaactctaaattaagccaatattctcatttgagaatgaggatgtctcagctgagaaacgttttaaattctctttattcataatgttctttgaagggtttaaaacaagatgttgataaatctaagctgatgagtttgctcaaaacaggaagttgaaattgttgagacaggaatggaaaatataattaattgatacctatgaggatttggaggcttggcattttaatttgcagataataccctggtaattctcatgaaaaatagacttggataacttttgataaaagactaattccaaaatggccactttgttcctgtctttaatatctaaatacttactgaggtcctccatcttctatattatgaattttcatttattaagcaaatgtcatattaccttgaaattcagaagagaagaaacatatactgtgtccagagtataatgaacctgcagagttgtgcttcttactgctaattctgggagctttcacagtactgtcatcatttgtaaatggaaattctgcttttctgtttctgctccttctggagcagtgctactctgtaattttcctgaggcttatcacctcagtcatttcttttttaaatgtctgtgactggcagtgattctttttcttaaaaatctattaaatttgatgtcaaattagggagaaagatagttactcatcttgggctcttgtgccaatagcccttgtatgtatgtacttagagttttccaagtatgttctaagcacagaagtttctaaatggggccaaaattcagacttgagtatgttctttgaataccttaagaagttacaattagccgggcatggtggcccgtgcctgtagtcccagctacttgagaggctgaggcaggagaatcacttcaacccaggaggtggaggttacagtgagcagagatcgtgccactgcactccagcctgggtgacaagagagacttgtctccaaaaaaaaagttacacctaggtgtgaattttggcacaaaggagtgacaaacttatagttaaaagctgaataacttcagtgtggtataaaacgtggtttttaggctatgtttgtgattgctgaaaagaattctagtttacctcaaaatccttctctttccccaaattaagtgcctggccagctgtcataaattacatattccttttggtttttttaaaggttacatgttcaagagtgaaaataagatgttctgtctgaaggctaccatgccggatctgtaaatgaacctgttaaatgctgtatttgctccaacggcttactatagaatgttacttaatacaatatcatacttattacaatttttactataggagtgtaataggtaaaattaatctctattttagtgggcccatgtttagtctttcaccatcctttaaactgctgtgaatttttttgtcatgacttgaaagcaaggatagagaaacactttagagatatgtggggtttttttaccattccagagcttgtgagcataatcatatttgctttatatttatagtcatgaactcctaagttggcagctacaaccaagaaccaaaaaatggtgcgttctgcttcttgtaattcatctctgctaataaattataagaagcaaggaaaattagggaaaatattttatttggatggtttctataaacaagggactataattcttgtacattatttttcatctttgctgtttctttgagcagtctaatgtgccacacaattatctaaggtatttgttttctataagaattgttttaaaagtattcttgttaccagagtagttgtattatatttcaaaacgtaagatgatttttaaaagcctgagtactgacctaagatggaattgtatgaactctgctctggagggaggggaggatgtccgtggaagttgtaagacttttatttttttgtgccatcaaatataggtaaaaataattgtgcaattctgctgtttaaacaggaactattggcctccttggccctaaatggaagggccgatattttaagttgattattttattgtaaattaatccaacctagttctttttaatttggttgaatgttttttcttgttaaatgatgtttaaaaaataaaaactggaagttcttggcttagtcataattcttatattca

SEQ ID NO: 1755 - DNA, 4040 bp, Homo Sapiens
  NM_002525
actttgggtttcgaaatgttcgctggctgttccgagaatcagtccgggtcacgttggtgcctctcctttcctgttctgattggttgcttacgtgagcgtgactactttcttgcctcatgattggctgaaatcagtagcgtcatcggcggccgggagggcggagggacgagggaagtcggcgagagggagactgggttgggggaggggttcaggcctgttccccgcggctgcggcagcaccagggccggccgccaccgcctctagaacgcggaggaggtgggtcctgggaagcgggatgtccatcgctccagcttggtggtgaatgctgaggagagtcactgttgctgcagtctgtgccacccggaggaagttgtgtgaggccgggcgggagctcgcggcgctctggggaatcgaaacgcggggtcggtgcgaagactctgctgctgccagaccctttcctattctggccatgcctggaaggaacaaggcgaagtctacctgcagctgccctgacctgcagcccaatggacaggatctgggcgagaacagccgggttgcccgtctaggagcggatgaatctgaggaagagggacggagggggtctctcagtaatgctggggaccctgagatcgtcaagtctcccagcgaccccaagcaataccgatacatcaaattacagaatggcttgcaggcacttctgatttcagacctaagtaatatggaaggtaaaacaggaaatacaacagatgatgaagaagaagaggaggtggaggaagaagaagaagatgatgatgaagattctggagctgaaatagaagatgacgatgaagagggttttgatgatgaagatgagtttgatgatgaacatgatgatgatcttgatactgaggataatgaattggaagaattagaagagagagcagaagctagaaaaaaaactactgaaaaacagcaattgcagagcctgtttttgctgtggtcaaagctgactgatagactgtggtttaagtcaacttattcaaaaatgtcttcaaccctgctggtcgagacaagaaatctttatggggtagttggagctgaaagcaggtctgcacctgttcagcatttggcaggatggcaagcggaggagcagcagggtgaaactgacacagttctgtctgcagcggctctttgtgttggagttgggagtttcgctgatccagatgacctgccggggctggcacactttttggagcacatggtattcatgggtagtttgaaatatccagatgagaatggatttgatgccttcctgaagaagcatgggggtagtgataatgcctcaactgattgtgaacgcactgtctttcagtttgatgtccagaggaagtacttcaaggaagctcttgatagatgggcgcagttcttcatccacccactaatgatcagagatgcaattgaccgtgaagttgaagctgttgatagtgaatatcaacttgcaaggccttctgatgcaaacagaaaggaaatgttgtttggaagccttgctagacctggacatcctatgggaaaatttttttggggaaatgctgagacgctcaagcatgagccaagaaagaataatattgatacacatgctagattgagagaattctggatgcgttactactcttctcattacatgactttagtggttcaatccaaagaaacactggatactttggaaaagtgggtgactgaaatcttctctcagataccaaacaatgggttacccagaccaaactttggccatttaacggatccatttgacacaccagcatttaacaaactttatagagttgttccaatcagaaaaattcatgctctgaccatcacatgggcacttcctcctcaacagcaacattacagggtgaagccacttcattatatatcctggctggttggacatgaaggcaaaggcagcattctttctttccttaggaaaaaatgctgggctcttgcactgtttggtggaaatggtgagacaggatttgagcaaaattctacttattcagtgttcagcatttctattacattgactgatgagggttatgaacatttttatgaggttgcttacactgtctttcagtatttaaaaatgctgcagaagctaggcccagaaaaaagaatttttgaagagattcggaaaattgaggataatgaatttcattaccaagaacagacagatccagttgagtatgtggaaaacatgtgtgagaacatgcagctgtacccattgcaggacattctcactggagatcagcttctttttgaatacaagccagaagtcattggtgaagccttgaatcagctagttcctcaaaaagcaaatcttgttttactgtctggtgctaatgagggaaaatgtgacctcaaggagaaatggtttggaactcaatatagtatagaagatattgaaaactcttgggctgaactgtggaatagtaatttcgaattaaatccagatcttcatcttccagctgaaaacaagtacatagccacggactttacgttgaaggctttcgattgcccggaaacagaatacccagttaaaattgtgaatactccacaaggttgcctgtggtataagaaagacaacaaattcaaaatccccaaagcatatatacgtttccatctaatttcaccgttgatacagaaatctgcagcaaatgtggtcctctttgatatctttgtcaatatccttacgcataaccttgcggaaccagcttatgaagcagatgtggcacagctggagtataaactggtagctggagaacatggtttaattattcgagtgaaaggatttaaccacaaactacctctactgtttcagctcattattgactacttagctgagttcaattccacaccagctgtctttacaatgataactgagcagttgaagaagacctactttaacatcctcatcaagcccgagactttggccaaagatgtacggcttttaatcttggaatatgcccgttggtctatgattgacaagtaccaggctttgatggacggcctttcccttgagtctctgctgagcttcgtcaaagaattcaaatcccagctctttgtggagggcctggtacaagggaatgtcacaagcacagaatctatggatttcctgaaatatgttgttgacaaactaaacttcaagcctctggagcaggagatgcctgtgcagttccaggtggtagagctgcccagtggccaccatctatgcaaagtgaaagctctgaacaagggtgatgccaactctgaagtcactgtgtactaccagtcaggtaccaggagtctaagagaatatacgcttatggagctgcttgtgatgcacatggaagaaccttgttttgacttccttcgaaccaagcagacccttgggtaccatgtctaccctacctgtaggaacacatccgggattctaggattttctgtcactgtggggactcaggcaaccaaatacaattctgaagttgttgataagaagatagaagagtttctttctagctttgaggagaagattgagaacctcactgaagaggcattcaacacccaggtcacagctctcatcaagctgaaggagtgtgaggatacccaccttggggaggaggtggataggaactggaatgaagtggttacacagcagtacctctttgaccgccttgcccacgagattgaagcactgaagtcattctcaaaatcagacctggtcaactggttcaaggcccatagagggccaggaagtaaaatgctcagcgttcatgttgttggatatgggaagtatgaactggaagaggatggtaccccttctagtgaggattcaaattcttcttgtgaagtgatgcagctgacctacctgccaacctctcctctgctggcagattgtatcatccccattactgatatcagggctttcacaacaacactcaaccttctcccctaccataaaatagtcaaataaataaactgcagtcacgttggcctgaagcaatgtgtattttaaaaaaaaaaaaaaaaaa

SEQ ID NO: 1756 - DNA, 4087 bp, Homo Sapiens
  NM_002526
actcctcctctctgcccctcagctcgctcatctttcttcccgccccctctcttttccttctttggttctttgaagtgatgagctagcgcaaccacaaaccatacattccttttgtagaaaaacccgtgcctcgaatgaggcgagactcagagaggacccaggcgcggggcggacccctccaattccttcctcgcgcccccgaaagagcggcgcaccagcagccgaactgccggcgcccaggctccctggtccggccgggatgcggccggtacccgctccccgccgggaacaacctctccactcttcctgcagggagctggtgccagccgacagccgcgccagggccgctccgggtaccagggtcggatcgggtgacgtcgcgaacttgcgcctggccgccaagccggcctccaggctgaagaaggacccgccccggccttgacccgggccccgcccctccagccggggcaccgagccccggccctagctgctcgcccctactcgccggcactcgcccggctcgcccgctttcgcacccagttcacgcgccacagctatgtgtccccgagccgcgcgggcgcccgcgacgctactcctcgccctgggcgcggtgctgtggcctgcggctggcgcctgggagcttacgattttgcacaccaacgacgtgcacagccggctggagcagaccagcgaggactccagcaagtgcgtcaacgccagccgctgcatgggtggcgtggctcggctcttcaccaaggttcagcagatccgccgcgccgaacccaacgtgctgctgctggacgccggcgaccagtaccagggcactatctggttcaccgtgtacaagggcgccgaggtggcgcacttcatgaacgccctgcgctacgatgccatggcactgggaaatcatgaatttgataatggtgtggaaggactgatcgagccactcctcaaagaggccaaatttccaattctgagtgcaaacattaaagcaaaggggccactagcatctcaaatatcaggactttatttgccatataaagttcttcctgttggtgatgaagttgtgggaatcgttggatacacttccaaagaaaccccttttctctcaaatccagggacaaatttagtgtttgaagatgaaatcactgcattacaacctgaagtagataagttaaaaactctaaatgtgaacaaaattattgcactgggacattcgggttttgaaatggataaactcatcgctcagaaagtgaggggtgtggacgtcgtggtgggaggacactccaacacatttctttacacaggcaatccaccttccaaagaggtgcctgctgggaagtacccattcatagtcacttctgatgatgggcggaaggttcctgtagtccaggcctatgcttttggcaaatacctaggctatctgaagatcgagtttgatgaaagaggaaacgtcatctcttcccatggaaatcccattcttctaaacagcagcattcctgaagatccaagcataaaagcagacattaacaaatggaggataaaattggataattattctacccaggaattagggaaaacaattgtctatctggatggctcctctcaatcatgccgctttagagaatgcaacatgggcaacctgatttgtgatgcaatgattaacaacaacctgagacacacggatgaaatgttctggaaccacgtatccatgtgcattttaaatggaggtggtatccggtcgcccattgatgaacgcaacaatggcacaattacctgggagaacctggctgctgtattgccctttggaggcacatttgacctagtccagttaaaaggttccaccctgaagaaggcctttgagcatagcgtgcaccgctacggccagtccactggagagttcctgcaggtgggcggaatccatgtggtgtatgatctttcccgaaaacctggagacagagtagtcaaattagatgttctttgcaccaagtgtcgagtgcccagttatgaccctctcaaaatggacgaggtatataaggtgatcctcccaaacttcctggccaatggtggagatgggttccagatgataaaagatgaattattaagacatgactctggtgaccaagatatcaacgtggtttctacatatatctccaaaatgaaagtaatttatccagcagttgaaggtcggatcaagttttccacaggaagtcactgccatggaagcttttctttaatatttctttcactttgggcagtgatctttgttttataccaatagccaaaaattctccttgcctttaatgtgtgaaactgcattttttcaagtgagattcaaatctgccttttaggacctggctttgtgacagcaaaaaccatctttacaggctcctagaagctgaaggttagagcattataaaatgaagagacagacatgattactcagggtcagcaacctagtgagttagaaaaaaaattaacatagggccctataaggagaaagccaactatgttaagtttacgtgtccaaattttaatgaaattttactaacaattttaaaccatatttttcttcttcatatccatttctaatccatcaaacagcttatgtttacataaaattttatcattcacaaggaagttttaagcacactgtctcatttgatatccacaacttatttttggtaggaaagagagatgtttttcccacctgtcagatgaaaaaactgaagctcaaaaagggttgacttgaccatacagctaatgctgacagatccaagacctagacctaggtcttttgaactcaagtccagcattctcaactatatcaagttactgttcagaatacttaatatctcctctcttcataattatcaatagccccaagctcatggatgacaaatctctgctttatttcttgtctctattttttcactttatagctcctgttataatagcaagtttaatggtataaacacaggataccatcctctcttgcaacacccatgtgcctttgatgagtcaggtagcaagctgtagtagataatgagaaaggccagaggctgcaaaagacagtcaaaggacacgagagaaaggaaggggaagaacaggactccaggactgttttatattatagaaaagcaagagctaaagagcatttacacatgttaaacagatacttgttaagcatagtgcctgacacacggcattagctgttattttatgagattccatcagctctgcctctgtcctctttcttctaacatgaaggtatcatgagaagagaaccttctaacataagctgtaattctaaacctgcacttgtccctctccagcaagaggctagcactgaattcattctactcatactacacacccagttatggaatgtccagagttctcgaagaaaataaatgactttaggaagaggtatacattttttaagtcgctctgcctccaaatctgaacagtcactgtaaatcattcttaagcccagatatgagaacttctgctggaaagtgggaccctctgagtgggtggtcagaaaatacccatgctgatgaaatgacctatgcccaaagaacaaatacttaacgtgggagtggaaccacatgagcctgctcagctctgcataagtaattcaagaaatgggaggcttcaccttaaaaacagtgtgcaaatggcagctagaggttttgataggaagtatgtttgtttcttagtgtttacaaatattaagtactcttgatacaaaatatacttttaaacttcataacctttttataaaagttgttgcagcaaaataatagcctcggttctatgcatatatggattagctataaaaaatgtcaataagattgtacaaggaaaattagagaaagtcacatttagggtttattttttacacttggccagtaaaatagggtaaatcctattagaattttttaaagaactttttttaagtttcctaaatctgtgtgtgtattgtgaagtggtataagaaatgactttgaaccactttgcaattgtagattcccaacaataaaattgaagataaaaaaaaaaaaaaaaaaaaaaaaaaaaaaaa

SEQ ID NO: 1757 - DNA, 1067 bp, Homo Sapiens
  NM_002528
ggccgcatgggccgccgggatgtgtagtccgcaggagtccggcatgaccgccttgagcgcgaggatgctgacccggagccggagcctgggacccggggctgggccgcgggggtgtagggaggagcccgggcctctccggagaagagaggctgcagcagaagcgaggaaaagccacagccccgtgaagcgtccgcggaaagcacagagactgcgtgtggcctatgagggctcggacagtgagaaaggtgagggggctgagcccctcaaggtgccagtctgggagccccaggactggcagcaacagctggtcaacatccgtgccatgaggaacaaaaaggatgcacctgtggaccatctggggactgagcactgctatgactccagtgcccccccaaaggtacgcaggtaccaggtgctgctgtcactgatgctctccagccaaaccaaagaccaggtgacggcgggcgccatgcagcgactgcgggcgcggggcctgacggtggacagcatcctgcagacagatgatgccacgctgggcaagctcatctaccccgtcggtttctggaggagcaaggtgaaatacatcaagcagaccagcgccatcctgcagcagcactacggtggggacatcccagcctctgtggccgagctggtggcgctgccgggtgttgggcccaagatggcacacctggctatggctgtggcctggggcactgtgtcaggcattgcagtggacacgcatgtgcacagaatcgccaacaggctgaggtggaccaagaaggcaaccaagtccccagaggagacccgcgccgccctggaggagtggctgcctagggagctgtggcacgagatcaatggactcttggtgggcttcggccagcagacctgtctgcctgtgcaccctcgctgccacgcctgcctcaaccaagccctctgcccggccgcccagggtctctgatggccgcatggctctggccgaggtgccgctgtggccaccgtctgtgaagtggctttacgcttcaggaagccacgcctgttgaataaagctttggtgtgtttgcagatgg

SEQ ID NO: 1758 - DNA, 4158 bp, Homo Sapiens
  NM_002531
caagctcgccccgcgcagcccgagccgggctgggcgctgtcctcgggggcctggggaaccgcgcggtttggagatcggaggcacctggaacccgtggcaagcgccgagccgggagacagcccgaggaaccacgggttctggagctaggagccggaagctgggagtccggaggagagcggagcccggagcccggagcccggggcggcgcgtctgggtctggcgcttcccgactggacggcgcgcccgctggtcttcgccacgcgccctcccctgggctcccgttcatcggtccccgcctgagacgcgcccactcctgcccggacttccagccccggaggcgccggacagagccgcggactccagcgcccaccatgcgcctcaacagctccgcgccgggaaccccgggcacgccggccgccgaccccttccagcgggcgcaggccggactggaggaggcgctgctggccccgggcttcggcaacgcttcgggcaacgcgtcggagcgcgtcctggcggcacccagcagcgagctggacgtgaacaccgacatctactccaaggtgctggtgaccgccgtgtacctggcgctcttcgtggtgggcacggtgggcaacacggtgacggcgttcacgctggcgcggaagaagtcgctgcagagcctgcagagcacggtgcattaccacctgggcagcctggcgctgtccgacctgctcaccctgctgctggccatgcccgtggagctgtacaacttcatctgggtgcaccacccctgggccttcggcgacgccggctgccgcggctactacttcctgcgcgacgcctgcacctacgccacggccctcaacgtggccagcctgagtgtggagcgctacctggccatctgccaccccttcaaggccaagaccctcatgtcccgaagccgcaccaagaagttcatcagcgccatctggctcgcctcggccctgctggcggtgcctatgctgttcaccatgggcgagcagaaccgcagcgccgacggccagcacgccggcggcctggtgtgcacccccaccatccacactgccaccgtcaaggtcgtcatacaggtcaacaccttcatgtccttcatattccccatggtggtcatctcggtcctgaacaccatcatcgccaacaagctgaccgtcatggtacgccaggcggccgagcagggccaagtgtgcacggtcgggggcgagcacagcacattcagcatggccatcgagcctggcagggtccaggccctgcggcacggcgtgcgcgtcctacgtgcagtggtcatcgcctttgtggtctgctggctgccctaccacgtgcggcgcctcatgttctgctacatctcggatgagcagtggactccgttcctctatgacttctaccactacttctacatggtgaccaacgcactcttctacgtcagctccaccatcaaccccatcctgtacaacctcgtctctgccaacttccgccacatcttcctggccacactggcctgcctctgcccggtgtggcggcgcaggaggaagaggccagccttctcgaggaaggccgacagcgtgtccagcaaccacaccctctccagcaatgccacccgcgagacgctgtactaggctgtgcgccccggaacgtgtccaggaggagcctggccatgggtccttgcccccgacagacagagcagcccccacccgggagccttgatgggggtcaggcagaggccagcctgcactggagtctgaggcctgggacccccccctcccaccccctaacccatgtttctcattagtgtctcccgggcctgtccccaactcctccccacccctcccccatctcctctttgaaagccagaacaagagagcgctcctctcccagataggaaaagggcctctaacaaggagaaattagtgtgcggcaaaaggcagttttctttgttctcagactaatggatggttccagagaaggaaatgaaaggtgctgggtggggccgggcctccggcggcccggctgctgttcccatgtccacatctctgaggcctgcaccccctctgtctagctcggggagtccagccccagtcccgcaggctccgtggctttgggcctcacgtgcagaccctgccatgcagacccatgcccccctcccccaggcagctccaagaaagctccctgactcgccccttcaggcctggcaagctgggggcccatcgccgtggggagtccctcccaccaccctcgccgcaggcagctgcagcccccagaggggaccacaagcccaaaaaggacaaaaatgggctggcctggaatggcccagaccccagcctcccctcctccctcccatcctcacccaggccaaggcccaggggctctgccaggacaccacatgggagggggctcaggcctcagcctcaagatcttcagctgtggcctctcgggctcggcagaagggacgccggatcaggggcctggtctccagcacctgcccgagtggccgtggccaggatggggtgcgcattccgtgtgctttgcttgtggctgtgcaggctgaggtctggagccaggcccagagctggcttcagggtggggccttgagaaggggaatgtgggacaggggcgatggtgcctggtctctgagtaagatgccaggtcccaggaactcaggcttcaggtgagaaggagcggtgtgtccaggcaccgctggccggcagccctgggctgaggcacagactcatttgtcaccttctggcggcggcagccctggccccggcctccaagcagttgaaaaagctggcgcctccttggtctctaggatccaggctccacagagcacatgactagccaggcccctggcttaagaaggtcgcctaagcctaagagaagacagtcccaggagaagctggccgggaccagccaggagctgggagccacaggaagcaaaagtcagccttttcttcaagggatttccctgtctcagagcagcctttgccccagggaaatgggctctgggctggctgcctgcaccggccatgtcgacccaggacccggacacctggtcttgggctgtgttcagccactttgccttctctggactcagtttccccgtctgagaaatgagagtcgaatgctacagtatctgcagtcgcttggatctggctgttgagttgacgggttccttgaaccccacaaaatccctctccaaccacaggacccttcggctcaccaagaacagggcccaggggagtcaggcctattcgctgcacttcctgccaaactttgcccccacaagcctggtcatcagccaggcagccctcccagtgcccaagggccaccaaccccagggaaacagggccagcacagaggggccttcctcccccacagagcccccatgacatagtctgctctgggcggaagagctttgctgccagccagggatgtccagaggtcagtgcagcccctacccctgctcaggagtgggctcagagtctagcaaatgctaaggcccctcaggctgggctctgaacgaggacctggactcagagccagacagggcagcctcagacccttctctggggctcctggaccttgggccataatttctgagcctcggtttccccatctaaggaacagatgtggtcgttccgccctctcagctggatgagactgtcctggaggatccaccccggaacagacagaatggtgtctctcaggatggtgctctgagagagggcagagtggatgccccactgccctagaccctcggtagacgtggggtctctggggcggggtctgtggctgtgactgaagtcggcttttcccgttgatgtcttgatgctcctatctgtgcacttaccgtaggtagggacacgtgtccacgcaccacagacacacccacgacacctgatctcgtatcactagcttgcggccaggtcatgatgtggccccggaagctggccctgcgtgccatgagtgcgtcggtcatggagtccggagcccctgagccggcccctggtgacggcacagccctcacagctcaaacgcccacccccactcccaccatctgcaggtggtgaaaacaaaccccgtgtatctctcaataaaggtggccgaagggcctcgatgtggaaaaaaaaaaaaaaaaaaaaaaaaaaa

SEQ ID NO: 1759 - DNA, 2518 bp, Homo Sapiens
  NM_002532
attggccgaaacagtgagtggacggccgcggattggctgtgctcagcggcgggctgagcaactggagtgaggggagcagttgggccaagatggcggccgccgagggaccggtgggcgacggcgagctgtggcagacctggcttcctaaccacgtcgtgttcttgcggctccgggagggactgaaaaaccagagtccaaccgaagctgagaaaccagcttcttcgtcgttgccttcgtcgccgccgccgcagttgctgacgagaaacgtggtctttggcctcggcggagagcttttcctgtgggacggagaagacagctccttcttagtcgttcgccttcggggccccagcggcggcggcgaagagcccgccctgtcccagtaccagagattgctttgcataaatccacccctgtttgaaatctatcaagtcttgttaagcccaacacaacatcatgtagcacttataggaataaaaggacttatggtattagaattacctaaaagatgggggaagaattctgaatttgaaggtggaaaatcaacagtgaattgtagtaccactccagttgcggagagatttttcaccagttccacctctctgactctaaagcatgctgcatggtatccaagtgaaatcctggatccccacgtagtgctgttaacatcagacaacgtaatcagaatttactcactacgtgagccgcagacacccactaacgtgataatactttcagaagccgaagaggaaagtctagtactcaataaaggaagggcgtataccgcatctctaggagagacagcagttgcatttgactttgggccattggcagcagtcccaaagactctatttggacaaaacggcaaagatgaagtagtggcatacccactgtacatcttatatgaaaatggagagactttcctgacatacatcagtctgttacacagccctggaaatattggaaagctgttgggtccattgcccatgcatcctgcggctgaagataactatggttatgatgcgtgtgctgtactctgcttaccctgtgtccccaatatcttagtgatcgctactgaatcaggaatgctgtatcactgtgtcgtgctagaaggggaagaagaagatgaccacacgtcagaaaagtcctgggattccaggattgacctcattccttctctgtatgtgtttgaatgtgttgagttggagcttgctttgaaactggcatctggagaggatgacccttttgattctgacttttcttgtccagtcaaacttcatagagatcccaagtgtccttcaagatatcactgtactcatgaagctggtgtacatagtgttgggctaacttggattcataaacttcacaaatttcttggatcagatgaagaagataaggatagtttacaggaactctctacagaacagaaatgctttgttgaacacatcctttgtacgaagccattgccctgcaggcagccagctccaattcgaggattttggattgtacctgacattctgggacccacgatgatctgcatcaccagtacctatgaatgcctcatatggccgttattaagtacagtccatccagcgtctcctcccctgctttgtactcgagaagatgttgaagtggcagagtctcccctccgtgttctggctgaaaccccagattcctttgaaaagcatattagaagcattttgcaacgtagtgttgccaatccagcatttttgaaagcttctgaaaaggacatagcccctcctcctgaagaatgccttcagctcctcagcagagccacccaggtgttcagagagcagtacattctcaaacaggacttggcaaaggaggagattcagcggagggtcaaattattatgtgaccaaaaaaagaaacaactagaagatctcagttattgtcgagaagagaggaaaagtctgcgggaaatggctgagcgtttagctgacaaatatgaggaagctaaagaaaaacaagaggatatcatgaacaggatgaaaaaactacttcacagttttcactctgagctcccagttctctctgatagtgagcgagacatgaagaaagaattacagctgatacctgatcaacttcgacatttgggcaatgccatcaaacaggttactatgaaaaaggattatcaacagcaaaagatggagaaggtgttgagtcttccaaaacccaccattattctcagtgcctaccagcgaaagtgcattcagtccatcctgaaagaggagggtgaacatataagggaaatggtgaagcaaatcaatgatatccgcaatcatgtaaacttctgacaccaccaggagctgactcacacctgaactgaacaccattgaaggcttaaacccatattgtaaaacaggtagaattatctaatttataaaaaggtgttttgatgacctttggtgtggttcatctttttaaatatgttgttttataataattgagtaaatgcttttatttaaaatttggaaaaaaaaaaaaaaaaaaaaaaaaa

SEQ ID NO: 1760 - DNA, 3772 bp, Homo Sapiens
  NM_002540
gagccagactgcatccgccgcggcgtctccatggcacgaccctggcctccgacttcaacgacttcataaggcggcgtttctgggcgcagccgtgtcgctcctggacagttgctgtgcgacttggacagtagaggagcgcctcccaagttttcatccaactgccaaccccaaagcttccacccttctcccctcagagaggacgtttgatgccgggccccttgagaggctcattgacaagcctgcccctctgggtccccctgagcagagcctgctgacccaattgcccacctttgcggctttgatgcctagccatgtctgcctcatcctcaggcggctcccccaggtttccatcgtgtgggaagaacggagtaacgagtctcacgcagaaaaaggtcttgagagcaccttgtggcgcacccagtgtaactgtgacgttgagatcactgtgtagaaggatccgcctgctttccgctgtgcttcactaaatccaaggaggagctgtgcattccagcaggtttagaggagatccagccctaagaaccctggggccggcgtctgggatctgttctggaacggaagccaaccatgaaggaccgctcttcaactccccccttacatgttcacgtggatgagaacacccctgtccacgtccacataaaaaaactcccgaaaccatcagcgaccagcagccagaaatctcacaagcgaggaatgaaaggggacactgtgaatgtgcggcggagtgtccgggtgaaaaccaagaatccacctcattgcctggagatcacgccaccatcttcagaaaagctggtctcagtgatgcggttaagtgacctctctacagaagatgatgactcaggtcactgtaaaatgaaccgttatgataagaagattgatagtctaatgaatgcggttggttgtctgaagtctgaggtcaagatgcaaaaaggtgagcgccagatggccaaaaggttcctggaggaacggaaggaagagctggaggaggtggcccacgaactggctgagactgagcacgagaacacggtgttgaggcacaacatcgagcgcatgaaggaggagaaggacttcaccatacttcagaagaaacacctacaacaggagaaggagtgcctcatgtccaagctggtggaggcggaaatggatggggctgcggctgccaagcaggtcatggccttgaaggataccatcgggaagctgaaaacggagaaacaaatgacctgcacggacatcaacaccctgacaaggcagaaggaacttctcctgcagaagctgagcacatttgaggagaccaaccgcaccctccgagacctcctgagggaacagcactgcaaagaggattctgaaagactaatggagcaacaaggagcactgctgaaacggctggcggaggccgactcagagaaagcgcgcctgctgttactgctgcaagacaaggacaaggaggtggaagagctccttcaggaaatacaatgtgagaaggctcaagcaaagacagcctctgagctttctaaatccatggagtccatgcgtgggcatttgcaggcacagcttcggtccaaagaggctgagaacagtcgcctgtgcatgcagattaagaatctggagcgcagcgggaatcagcataaggcagaagtggaggccatcatggagcagctgaaggagttgaagcagaagggagaccgagacaaagagagcttgaagaaggccatccgagcccagaaggagcgagccgagaagagcgaggagtatgctgagcagctacacgtgcaactcgctgacaaggatctttatgtcgctgaagctttatccactctggaatcctggaggagccgctacaaccaagttgtaaaagaaaagggagaccttgagctggaaattattgtcctgaatgaccgggtaacagatcttgtaaaccaacaacaaaccctggaggagaagatgcgggaagaccgggatagcctggtggagagactacaccgtcagactgctgagtattccgcattcaagctggagaatgagaggctgaaggccagctttgctccaatggaggacaaactcaaccaggcacacctcgaggtccagcagctgaaggcctcagtgaagaactatgaggggatgattgacaactataagagtcaggtgatgaagaccagattggaggctgatgaagtagctgcccagctagaacgctgtgacaaagagaacaagatccttaaagatgagatgaacaaagagattgaggcggcacgaaggcagttccagtctcagctggctgacctgcagcagctccctgacatcctgaagatcacggaggcgaagctggctgagtgccaagaccaactgcagggctatgagcggaagaacatcgacctcacagccatcatatcagacctgcgcagccggatcgaacaccagggggacaagctggagatggcgagagagaaacatcaggcttcccagaaggaaaataaacagctgagtctgaaggtggatgaactggagaggaaactggaggcgaccagtgcccagaatatcgagttcctacaggtgattgccaagagggaggaggcaatccaccagtcccagctgcggctggaggagaaaacacgggaatgtgggaccctggcaaggcagttggagagtgccattgaagatgcgaggaggcaggtggaacaaaccaaggagcacgcactctccaaggagcgagcagcccagaacaaaatcctggaccttgagacccagctgagcagaaccaaaacggaattgagccagctgcggcggagccgtgatgatgcggaccgccgctaccagagccggctgcaagacctgaaagatcgcctggagcagtccgagagcaccaaccgcagcatgcagaactacgtccagttcctcaaatcatcatacgccaacgtgtttggggatggtccctattccaccttcctgactagctctcccatccgctcccgatctcctcctgcctgaggccacttatcagggcctggagccctgatggaagccataggaactccagagttgccaagccatagctgagaagcctggtggttttcctctcccagtgaaaaaatgggttcagggtcttgtccttagctactagctctagaaaagtcccaaaagcagcagaaggtgaagcaggaagcacttggttttctccttcctgatatagtcacctgttggaagtgttaaaatttcctcgacaggccttaaatttactactacattagggtaccacattttaacttaccatgactttgctccttcctttcctgagaaaatatttccactggattttttccaccagtccccttacagccctcattgttttaggaatctctctcaggttttttctgacctaaaccagcaggaagtcgtcctgggctgtaagcaccatcacttgctttttttttttttctgatttcacaagtgtggtgttttcccaaggctcccttcccaagctcagtgcaaacctctcactcccaagtttctttgaggccacttgcccccaagcacttcacaatagaccctcgagggcttgtgtccatttggccttttacaagtgtaatgccaatttcattgatttttgtttcttttggcctgatttgtatctctggaatgcatttattcttgaaatatttgtgtgattttacaaaaagcttttgtaatcagttaaaaaaaaaaaaaaaaaaaaaaaaaaaaaaaaaaaaaaaaaaaaaaaaaaaaaaaaaaaaaaaaa

SEQ ID NO: 1761 - DNA, 1652 bp, Homo Sapiens
  NM_002542
ctacttccggtggtgctgtggtctgcccctggagaacccagaagaacacagctgtgcgcgcccacaggctctgggggcgggagaagataagtcgcaaggagggggcgggacctacacctcaggaaagccggagaattggggcacgaagcggggctttgatgacccgcaaagggcgaggcatgcaggaggtggaggaattaagtgaaacagggaaggttgttaaacagcaccgtgtgggcgaggccttaagggtcgtggtccttgtctgggcggggtctttgggcgtcgacgaggcctggttctgggtaggcggggctactacggggcggtgcctgctgtggaaatgcctgcccgcgcgcttctgcccaggcgcatggggcatcgtactctagcctccactcctgccctgtgggcctccatcccgtgccctcgctctgagctgcgcctggacctggttctgccttctggacaatctttccggtggagggagcaaagtcctgcacactggagtggtgtactagcggatcaagtatggacactgactcagactgaggagcagctccactgcactgtgtaccgaggagacaagagccaggctagcaggcccacaccagacgagctggaggccgtgcgcaagtacttccagctagatgttaccctggctcaactgtatcaccactggggttccgtggactcccacttccaagaggtggctcagaaattccaaggtgtgcgactgctgcgacaagaccccatcgaatgccttttctcttttatctgttcctccaacaacaacatcgcccgcatcactggcatggtggagcggctgtgccaggcttttggacctcggctcatccagcttgatgatgtcacctaccatggcttccccagcctgcaggccctggctgggccagaggtggaggctcatctcaggaagctgggcctgggctatcgtgcccgttacgtgagtgccagtgcccgagccatcctggaagaacagggcgggctagcctggctgcagcagctacgagagtcctcatatgaggaggcccacaaggccctctgcatcctgcctggagtgggcaccaaggtggctgactgcatctgcctgatggccctagacaagccccaggctgtgcccgtggatgtccatatgtggcacattgcccaacgtgactacagctggcaccctaccacgtcccaggcgaagggaccgagcccccagaccaacaaggaactgggaaactttttccggagcctgtggggaccttatgctggctgggcccaagcggtgctgttcagtgccgacctgcgccaatcccgccatgctcaggagccaccagcaaagcgcagaaagggttccaaagggccggaaggctagatggggcaccctggacaaagaaattccccaagcaccttcccctccattccccacttctctctccccatccccacccagtctcatgttggggaggggcctccctgtgactacctcaaaggccaggcacccccaaatcaagcagtcagtttgcacaacaagatggggtgggggatattgagggagacagcgctaaggatggttttatcttccctttattacaagaaggaacaataaaatagaaacatttgtatggaaaaaaaaaaaaaaaaaa

SEQ ID NO: 1762 - DNA, 2533 bp, Homo Sapiens
  NM_002543
attcttctattagataacagtagctatttaaatacttctgcagaagctcacatatttttagtttgttgaagttcgtgactgcttcactctctcattcttagcttgaatttggaaatgacttttgatgacctaaagatccagactgtgaaggaccagcctgatgagaagtcaaatggaaaaaaagctaaaggtcttcagtttctttactctccatggtggtgcctggctgctgcgactctaggggtcctttgcctgggattagtagtgaccattatggtgctgggcatgcaattatcccaggtgtctgacctcctaacacaagagcaagcaaacctaactcaccagaaaaagaaactggagggacagatctcagcccggcaacaagcagaagaagcttcacaggagtcagaaaacgaactcaaggaaatgatagaaacccttgctcggaagctgaatgagaaatccaaagagcaaatggaacttcaccaccagaatctgaatctccaagaaacactgaagagagtagcaaattgttcagctccttgtccgcaagactggatctggcatggagaaaactgttacctattttcctcgggctcatttaactgggaaaagagccaagagaagtgcttgtctttggatgccaagttgctgaaaattaatagcacagctgatctggacttcatccagcaagcaatttcctattccagttttccattctggatggggctgtctcggaggaaccccagctacccatggctctgggaggacggttctcctttgatgccccacttatttagagtccgaggcgctgtctcccagacatacccttcaggtacctgtgcatatatacaacgaggagctgtttatgcggaaaactgcattttagctgccttcagtatatgtcagaagaaggcaaacctaagagcacagtgaatttgaaggctctggaagaaaagaaaaaagtctttgagttttattctggaatttaagctattctttgtcacttgggtgccaaacatgagagcccagaaaactgtcatttagctggctgcagaactcctttgcagaaactggggttccaggtgcctggcacctttatgtcaacatttttgattctagctacctgtattatttcacctagcttgtcccaagcttccctgccagcctgaagtccattttcccctttttattttaaaatttgactcctcttcaagcttgaaaaccctctgaactcagtcttctttacctcattatcaccttcccctcacactcctaaaattgcatgaaagacagaacatggagaacttgctcaagtgcaggcagagagcaaaaaggggaaatatgtctgggaaaaagtgcacgtgaagaaacaaagaaggacagaggccattccgaaatcaagaaactcatgttcttaactttaaaaaaggtatcaatccttggtttttaaactgtggtccatctccagactctaccacttacggacagacagacagacagacacacacacacacacacacacacattttgggacaagtggggagcccaagaaagtaattagtaagtgagtggtcttttctgtaagctaatccacaacctgttaccacttcctgaatcagttattatttcttcatttttttttctaccagaggacagattaatagatttaacccttcacaacagttcttgttagaatcatgggatgtgtggcccagaggtaagaatagaatttctttccctaaagaacataccttttgtagatgaactcttctcaactctgttttgctatgctataattccgaaacatacaagacaaaaaaaatgaagacactcaatctagaacaaactaagccaggtatgcaaatatcgctgaatagaaacagatggaattagaaatatatcttctatttttaggcttctatttcctttccacccactcttcacaggctattctactttaaaggaagcctttttattttgctgcacacaatctagcaggaatctttttttttttttaagagctgtgtcatccttatgtaggcaagagatgtttgcttttgttaaaagctttattgagatataattaacataaaataaactgaacatatttaaagtgtactatttgataagttttcacaccttgtggagaacatgcatactacaattaagagagtgaacatatccatcatccctcaaagtgtcacaatgctcctcctgatgactcctccccagaaaaccaccaatcggctttcattttgcattttgtagttttatgtgaatggaatcatatagtatgtcttttttttttgtctggcttctttcactttgcataattattttgagattcatatgtctccatcttgatgctcgtatgaattcattcttttaaatgttgaatattcccttgtatggatataccacaattcatttacccatttacttgttgatgacatttgggttgttttagttttgggatattacaaataaagctgctgtgaacatttgtgtacaagaaaaaaaaaaaaaaaaa

SEQ ID NO: 1763 - DNA, 1945 bp, Homo Sapiens
  NM_002544
ataaatttgagtcagcaccagcgacagctctgcagtcctcctatgtggtactgatcaggtggttgcagagcttcagctcacagcaacacaatgcagctgagcaggcaagcacagcccacagccagaaacagttccgactctacagaacaagacgacctttaagtttcccagagaaaatgagatgctgatgttgaagacgacaccacggctttgatggaatatcagatattgaaaatgtctctctgcctgttcatccttctgtttctcacacctggtattttatgcatttgtcctctccaatgtatatgcacagagaggcacaggcatgtggactgttcaggcagaaacttgtctacattaccatctggactgcaagagaatattatacatttaaacctgtcttataaccactttactgatctgcataaccagttaacccaatataccaatctgaggaccctggacatttcaaacaacaggcttgaaagcctgcctgctcacttacctcggtctctgtggaacatgtctgctgctaacaacaacattaaacttcttgacaaatctgatactgcttatcagtggaatcttaaatatctggatgtttctaagaacatgctggaaaaggttgtcctcattaaaaatacactaagaagtctcgaggttctcaacctcagtagtaacaaactttggacagttccaaccaacatgccctccaaactacatatcgtggacctgtctaataattctttgacacaaattcttccaggtacattaataaacctgacaaatctcacacatctttacctgcacaacaataagttcacattcattccagaccaatcttttgaccaactctttcagttgcaagagataaccctttacaataacaggtggtcatgtgaccacaaacaaaacattacttacttactgaagtggatgatggaaacaaaagcccatgtgatagggactccatgttctacccaaatatcatctttaaaggaacataacatgtatcccacaccttctggatttacctcaagcttattcactgtaagtgggatgcagacagtggacaccattaactctctgagtgtggtaactcaacccaaagtgaccaaaatacccaaacaatatcgaacaaaggaaacaacgtttggtgccactctaagcaaagacaccacctttactagcactgataaggcttttgtgccctatccagaagatacatccacagagactatcaattcacatgaagcagcagctgcaactctaactattcatctccaagatggaatggtcacaaacacaagcctcactagctcaacaaaatcatccccaacacccatgaccctaagtatcactagtggcatgccaaataatttctctgaaatgcctcaacaaagcacaacccttaacttatggagggaagagacaaccacaaatgtaaagactccattaccttctgtggcaaatgcttggaaagtaaatgcttcatttctcttattgctcaatgttgtggtcatgctggctgtctgagggtctgcattttctgaaactaatgaaagcactcctccctgatgtacagttgggaaaatatgtccatatctaaccagtgattcgagctatatttaagtattcaagaaagccagtcttaacatttctaactctgatgtaaatgaagtaacttgtcttaaataaaagaaatgcacaatgtcttggtacttgctgctattttactgtcttaattaagtaaactaatgagtttcttttataaaaaaaatgaaatgttttaaggcttcaatttattgcacaaaatataaagcatctaaactttaatatgtattttatgtatgtttacactgtcaaacatctggaaaataaaaggtctatgctcaaaaaaaaaaaaaaaaaaaaaaaaaaaaaaaaaaaaaaaaaaaaaaaaaaa

SEQ ID NO: 1764 - DNA, 1968 bp, Homo Sapiens
  NM_002553
agcccggcagcgcaggctcctcccacgacgctgcgggtccggtttccggcgggagcgtgggccgccagactcgggagaggctccgtcttgtgcaagggtcctgtgggctggctgcactggcctctgcggtggtgcctgccagaatgccccacttggaaaacgtggtgctttgtcgcgagtctcaagtgtccatcttgcagtccttgtttggagagagacatcatttcagctttccatccatttttatttatggacatactgctagtggaaagacctatgtaacacaaacgttgttgaaaactttagagctcccacatgtgtttgtgaattgtgttgaatgctttacattgaggctgcttttggaacaaattttaaacaaattgaatcatcttagttcttcagaggatggatgttctactgaaataacctgtgaaacatttaatgactttgttcgcttgtttaaacaagtaaccacagctgaaaatcttaaagatcagactgtatatattgttctagataaagcagagtatctaagagatatggaagcaaatcttttgcctggatttcttagattacaagaattggctgacagaaatgtgactgttctctttctcagtgaaattgtttgggaaaagtttcgtccaaatactggatgctttgagccgtttgtcttatatttccctgattacagcataggcaaccttcaaaagatcctgtcccatgatcatcctccagagtattcagctgatttctatgctgcctacattaacattcttcttggagttttctacactgtttgtcgagatttgaaagagctcagacatctggcagtacttaattttcctaaatattgtgaacccgtggttaaaggagaagcaagtgaacgtgatactcgcaaactgtggagaaatattgaacctcatttgaagaaagctatgcagactgtttatctcagggaaatatcaagttcccagtgggaaaagctacagaaagatgacacagatccggggcaactgaaaggcctctcagcgcatactcatgtggaacttccatattactctaagttcattctaattgctgcataccttgcttcatacaatccagcaagaactgacaagaggttttttcttaagcatcatggaaaaatcaagaaaaccaactttctaaaaaaacacgaaaagacaagcaatcatctccttgggccaaaaccatttccactagacagattattagcaatattatatagtatcgtggacagcagagttgctccaacagcaaatattttttcccagattacctctctagtgacccttcagctgttaaccctggttggccatgacgatcagcttgatggaccaaaatacaaatgcacagtgtctctagacttcatcagagctattgcaaggacggtgaactttgacataataaaatacttgtatgatttcttgtgaaaacaagcttcaaagccatatggacactgtgacaatgactaagccaagctgtgttcatccagctacttagctggccaaggagaggagttctttggctctattggatttgtccaaacaggtgctggcccagcatggaatctgatgaaaatattctgattggtctgggtggatgtgagcagaagactatttaccagggaccctggagtatttggaagcaacgtgttaattataaacagcagggtttgagcacaatctgttctactcttaatgatgttatcttaacactgaaattgcctgaaacccatttacttaggactacattttgctctgtgaactatcccctgcgctttgaacgtgccagcagcccttgtttatatgcccattcttttcacttcctctccacaggagcctctgcagtcgcttgccaaagcagattttcctaaggccactgttttaaaagatcatagttgcaaaatataataaatacaagttctttttaaaatccaaaaaaaaaaaa

SEQ ID NO: 1765 - DNA, 5083 bp, Homo Sapiens
  NM_002556
agaagagcgatgggagggggtgacgtggcagtgacaggcgcataaactgaaatgaatggcggaaacagcagccaatcggcgatcagattggccgggcattccgcattctcccgtcctccctgagcgctggaaacttcaggaaagcaccaatgagcttccccaaaagtctgattggcctttatctgaaccaatcaaaggtgggtctggcggacgcgtcccaccccaggctctcactgggcgctgtagaatgacaggcccgagagaaatgccaatatccgcggggtcttcctcaagtgacactcagcggcaccaatcgacgtccttcttcccggcggccgagccctcctccccgcggctggccgggcggggcggggacgctgcgcggcggtggctgatgcggtagccgtgtggggcgctccgggcggcgacggcggctctcgtaggcggttccggtcttgtatctccaggcggcggcggctcatggcggcgacggagctgagaggagtggtggggccaggcccggcagccattgcagcacttggcggcggcggcgccggtcccccagtggtgggaggaggcggcggccgcggagatgcggggccaggctccggggccgcgtcagggacggtggtcgcggcggcggcgggaggcccgggcccgggggccgggggagtggcggcggctggcccggcccctgcgccgccgactgggggctcgggcggctcgggcgctgggggttcgggctcggctcgagagggctggctcttcaaatggaccaattatatcaaaggctaccagcggcgatggttcgtgctgagcaacgggctcctgagctactacagatcaaaggcagaaatgagacatacctgccgtggtaccatcaacctcgccacagccaacatcaccgtggaggactcctgcaacttcatcatttccaatgggggtgctcagacctaccatctgaaagctagttcagaagttgagcggcagcgctgggtgacggccctggaactggccaaggccaaagctgtgaagatgctggcagagtcagatgaatcaggagatgaagagtctgtctcacaaactgacaagactgagctgcagaatacccttcggaccctctctagcaaagtagaggacttgagcacgtgcaatgacttgatagctaagcatggcacagctctgcagcgttctctcagtgagctggagtccctgaagttgcctgctgagagcaatgaaaagatcaaacaggtcaacgaacgagccacactctttaggataacatccaatgccatgatcaacgcctgcagagatttcctcatgttagcccagacccatagtaaaaaatggcaaaagtcactacagtatgaaagagaccagcgtatccgactggaagaaaccctcgagcagctggcgaagcagcataatcacctggagagggccttccgaggagccacggtgctgccggcaaacactcctggcaatgtgggttctggtaaagatcagtgctgctctggcaaaggggacatgagcgatgaagatgatgagaatgaattttttgatgcacctgagatcatcaccatgcctgaaaatttgggccacaaacgtactggcagcaatatcagtggagccagcagtgacatcagccttgatgaacagtacaagcatcagctggaggagaccaaaaaggaaaagagaaccagaataccatacaagccaaactatagcctcaatttatggagcatcatgaagaactgcattggaaaagaactctctaagatccccatgccggtaaactttaatgagcccttgtccatgcttcagcgccttactgaagatctggaataccatgagctgttagaccgagctgcaaaatgtgagaattctctagaacagctctgttatgttgcagctttcaccgtgtcctcctactccactactgtcttccgcaccagtaagccattcaacccactgcttggggagacctttgagctggaccgattagaggagaatgggtaccgatccctctgtgaacaggtgagtcatcatccccctgctgctgcgcaccatgctgagtccaaaaatggctggacattgcgtcaggaaatcaaaatcaccagcaagtttcgaggcaaatacctctccattatgcccctcggtaccattcattgtattttccatgcaactgggcaccactacacttggaagaaagttaccacaactgtacacaacattattgtgggcaagttgtggatagatcagtctggcgaaattgatattgtgaatcacaagacaggagacaagtgtaatcttaaatttgttccttatagctacttctctcgggatgtagcaagaaaggtgacgggggaagtgacagatccatcaggaaaagtccactttgctcttctggggacgtgggatgagaaaatggaatgtttcaaagtacagccagtcattggggaaaatgggggtgatgctcgacagagaggccatgaagcagaggaaagcagggtcatgctgtggaaaaggaatcctttaccgaagaatgcagaaaacatgtactacttctcagagcttgctctgactctcaatgcttgggaaagtggcactgcccccacagacagccggttacgacctgaccagagactgatggaaaatggacgctgggatgaagcaaatgcggagaagcagcgcctggaggaaaaacaaagactttccagaaagaagagagaagcggaagctatgaaagccacagaggatggcacaccatatgatccctataaggcactgtggtttgagcggaagaaggaccctgttaccaaggagttaacccatatttataggggagaatactgggagtgtaaagaaaaacaggactggagctcatgcccggacattttctgaaacggcagtaacaaaaaagaggagcatataatggagaagaggacagaggatgtgtgggaaagctggaagttgtgactctcttaccaagtgctttcctcaagtttgtctctcttgaccaatcattttttccaaatcaatcaccagaaggagacaccagtggtggtgattggctggttgccttagctgattgaaactgaaatcgacataggagatactatgtctgtaagggagaggtttagtggccgaaggttagtgttattccacatccacgaagtcaagtattcttggctcttctttctccctctgcccccatttaagacaatgtcactcaccctccccttgtagtatcctgctcagccaagatctgcctaagattatgattcaggggcattttggtgctgttaaaagcaagagccgaatttagaagttcccttaaaaagaaacacataagacttaccaatggaggcattgtgaatggttgcagtggagcttaggtataacatcatcaagtgtgttcacacgcggggtcggtttaatggagtgtccacgcggagataactgcgatattggaacacctgtgagagagattgttctatagggctggaatattcagagttacattcttggaagtttctgtttttacttgcatcaaacacccctctgttgttctccatcatctttaatagcaactggagaccactttggtcattggtaagggggtgcattctcctcacaaaggggttttatggacttcctcaggcggagagcttctgagaacacaggcaggatggaaaaagactactagccacttttgctttcccaaccccccttaatgccatccttcattgtctttctggcttctcttcttctggcacagtaccattttgggtctgtgccccagtgtggagcaaaacattgcctgtcccattctgatatacttcagaatttgagagcagaagttaatgtggaacaaaagttttcaccatctctcaagccccaaggactggagccacctctggaataatgtgttaaatatctgtatattatatatatgtagagaaaaatctaattttttggtttgatttccttcccattaagaatcttgttttttgatacccttgtctccctgagactctttcttggacacgtgttgatgtggatggcactcctgctctccatcttttatgggcagagagatttcaaaacctgagcaggatcatgtctggcagttactaaacagggactttgtccatggtttgtatcatggggtgcctactgctgtctaaactctgctctcctaattagctgactcttgaaaatgaaatcctaacctctttcctgcctcttttctttctcttttcaggaagagtgtgggtagaaagtccggagggcaacttccaatttaattctgctctgtccggcgcataggctgaattccaaaagaactttcttcctaggatgtggggcttaaagcaccgtcatgtggggtggatcagataattgctcctgtggggccctggcttccttctctgtttgtgcagtatttgtttttgttgtcttgttgagaaatatcccctgtgcaacccacccttggttgaggatcacaaattgaggtgccttccttgtatgctttttgttagtattttttgtttttgttccttaactgctgagcctcagccagcgtgggtcctgggggaaataccattccaaaggaagccatccctatggggaaattggttttactgggtaaattaatacttttatttcttcccctatcccttccttcctagttgtgataaacatgggagaggagtgactttgactgctggggaatttcctcctaagaaccttattcccaaaataagccagggattatgtcaaggcttctttcaaggaggctcataaaagcagtgacctcatccggggctttggatagagtgagaattccccaactaaattggacttctctgctttatccccttctcttccttcaccatctgcactacatttctggctgatcccaatcagattcccgctaatggaagaagtttagaatctttcaggtggaataaagtcacatgaaaacaaaacacaactatatatattttcagtttttttgccttattgatttttttccaaaaaaaaaaaactactaaattaaataattttttaaaagtca

SEQ ID NO: 1766 - DNA, 2258 bp, Homo Sapiens
  NM_002557
agggaagctcctataaagggctgcatctctggactcacagctatcagaccattgagatgtggaagctgttgctgtgggttgggctggttcttgtgctgaaacaccacgatggtgctgcccataaactcgtgtgttatttcaccaactgggcacacagtcggccaggccctgcctcgatcttgccccatgacctggacccctttctctgcacccacctgatatttgcctttgcctcaatgaacaacaatcagattgttgctaaggatctccaggatgagaaaattctctacccagagttcaacaaactaaaggagaggaacagagagctgaaaacactactgtccatcggcgggtggaactttggcacctcaagattcaccactatgttgtccacatttgccaaccgtgaaaagtttattgcttcagttatatcccttctgaggacacatgactttgatggtcttgaccttttcttcttatatcctggactaagaggcagccccatgcatgaccggtggacttttctcttcttaattgaagagctcctgtttgccttccggaaggaggcactgctcaccatgcgcccgaggctgctgctgtctgctgctgtttctggggtcccacacatcgtccaaacatcctatgatgtgcgctttctaggaagactcctggatttcatcaatgtcttgtcttatgacttacatggaagttgggaaaggttcacaggacataatagccccctcttctctctgcctgaagaccccaaatcttcggcatatgctatgaattattggagaaagcttggggcaccctcagagaagctcatcatggggatccccacctatggacgtacctttcgcctcctcaaagcctctaagaatgggttgcaggccagagcgatcggaccagcatctccagggaagtacaccaagcaagaaggcttcttggcttattttgagatttgttcctttgtctggggagcgaagaagcactggattgattaccagtatgtcccgtatgccaacaaggggaaagagtgggttggctatgacaatgccatcagcttcagttacaaggcatggtttataaggcgagagcattttgggggggccatggtgtggacattggacatggatgacgtcaggggcacgttctgtggcactggccctttcccccttgtctacgtattgaatgatatcctggtgcgggctgagttcagttcaacttctttaccacaattttggctgtcatctgctgtgaattcttcaagcactgaccctgaaaggctggctgtgaccacggcatggaccactgatagtaagattttgcccccaggaggagaggctggggtcactgagatccacggaaagtgtgaaaatatgactataacccctagaggtacaactgtgacccctacaaaggaaactgtatcccttggaaagcacactgtagctctaggagagaagactgagatcactggggcaatgaccatgacttctgtgggtcatcagtccatgacccctggagagaaggccctgacccctgtgggtcatcaatctgtgaccactggacagaagaccctgacctctgtgggttatcagtctgtgacccctggggaaaagaccctgacccctgtgggtcatcagtctgtgacccctgtgagtcatcagtctgtgagccctggaggaacgactatgacccctgtccattttcagactgagacccttagacagaatacagtggcccctagaaggaaggctgtggcccgtgaaaaggtgactgtcccctccagaaacatatcagtcacccctgaagggcagactatgcctttaagaggggagaatttgacttctgaggtgggcactcaccccaggatgggtaacttgggtcttcagatggaagctgaaaacaggatgatgctgtcctccagccccgtcatccagctcccggaacaaactcctctagcttttgacaaccgctttgttcccatctatggaaaccattcctctgtcaactcagtaacccctcaaacaagtcctctttctctaaaaaaagaaatcccagaaaactctgctgtggatgaagaagcctaagcccctctggtgtcagaaaccagggaaaacccttgtcttttcttctaagtgacatgttggaagccttctcatcccggggcaaagcaggcatcaaaaccagaataggccaatctcttttccattaaataaactgtaaacacaagaacccaaaaaaaaaaaaaaaaa

SEQ ID NO: 1767 - DNA, 2910 bp, Homo Sapiens
  NM_002558
acttgaggagtcgactgagagctttatctttgcccctgtgacgggtggcctgtggtttcctgccaacaactcctgtttccggaggcccaacaaggcccacgcagagccaggaggggcagtggggctgggcctgggtggccccaccagccccgccccatctatctttgggaatttatttgtccatgggcgaggctggcctgcagtctgttgccttccaggggccaagagctgctctgatcacccagggattctctctccaacccaagtgcctccagctgacctctggctcctgtcctctggctccacctgcaccgccctgctcttcctaaggggccaggaagcccccagaagctctaccatcgacgtgggtggtggcacccggctcaccctgagagcagaggccgtgcagggggctcagttctgagccccagccggcccaccatggcacggcggttccaggaggagctggccgccttcctcttcgagtatgacaccccccgcatggtgctggtgcgtaataagaaggtgggcgttatcttccgactgatccagctggtggtcctggtctacgtcatcgggtgggtgtttctctatgagaagggctaccagacctcgagcggcctcatcagcagtgtctctgtgaaactcaagggcctggccgtgacccagctccctggcctcggcccccaggtctgggatgtggctgactacgtcttcccagcccagggggacaactccttcgtggtcatgaccaatttcatcgtgaccccgaagcagactcaaggctactgcgcagagcacccagaagggggcatatgcaaggaagacagtggctgtacccctgggaaggccaagaggaaggcccaaggcatccgcacgggcaagtgtgtggccttcaacgacactgtgaagacgtgtgagatctttggctggtgccccgtggaggtggatgacgacatcccgcgccctgcccttctccgagaggccgagaacttcactcttttcatcaagaacagcatcagctttccacgcttcaaggtcaacaggcgcaacctggtggaggaggtgaatgctgcccacatgaagacctgcctctttcacaagaccctgcaccccctgtgcccagtcttccagcttggctacgtggtgcaagagtcaggccagaacttcagcaccctggctgagaagggtggagtggttggcatcaccatcgactggcactgtgacctggactggcacgtacggcactgcagacccatctatgagttccatgggctgtacgaagagaaaaatctctccccaggcttcaacttcaggtttgccaggcactttgtggagaacgggaccaactaccgtcacctcttcaaggtgtttgggattcgctttgacatcctggtggacggcaaggccgggaagtttgacatcatccctacaatgaccaccatcggctctggaattggcatctttggggtggccacagttctctgtgacctgctgctgcttcacatcctgcctaagaggcactactacaagcagaagaagttcaaatacgctgaggacatggggccaggggcggctgagcgtgacctcgcagctaccagctccaccctgggcctgcaggagaacatgaggacatcctgatgctcgggccccaactcctgactgggtgcagcgtgaggcttcagcctggagccctggtgggtcccagccagggcagaggggcctccccaggaagtctcctaccctctcagccaggcagagagcagtttgccagaagctcagggtgcatagtaggagagacctgtgcaaatctgagctccggctccgaccccacacaccctgagggagccctaccctagcctcagccgctcctggtggggaatggctggggctgggcaggaccctcccacacacctgcaccctagcttcgtgcttctctctccggactctcattatccaacccgctgcctccatttctctagatctgtgctctccgatgtggcagtcagtaaccataggtgactaaattaaactaaaataaaatagaatgaaacacaaaattcaattcctcggctgaactagccacatttcaactgctcagtagatacgtgtggttagtggctgccatactggacagctcggggcattttcactgtcaaagaaagttctattagacagccctgcttgagccctgtttcttcctggccttcggtttccctggggaacttatcgacaatgcaagctcctgggcccacccccagacctcctgaaccaaaagctccagggctggccgtatgatctgtgtggatggcaaactccccaggccattctgggacctaagtttaagaagtgccgtcctcgaactttctgactctaagctcctgagcgggagtcagacttagccctgagcctgcacttcctgttcaggtgcagacactgaacagggtctcaaacaccttcagcatgtgtgttgtgtgctcacgtgccacacagtgtctcatgcacacaacccagtgtacacaccacctacgtgcacacagcatccttccacactgtgtatgtgaacagcttgggccctgcaaacacaaccatctacacacatctacacccccaagcacacacacatggtccgtgccatgtcacctccatagggaaaggcttctctccaagtgtgccaggccaggacagccctcccagccatgaatccttactcagctacctcgggttggggtgggagccccagccaaatcctgggctccctgcctgtggctcagccccagctcccaaggcctgcctggctctgtctgaacagaaggtctgggggaagcgacgggtggagtacaataaagggaatgaggacaaacaaaaaaaaaaaaaaaaaaaaaaaaaaaaaaaaaaaaaaaaaaaaaa

SEQ ID NO: 1768 - DNA, 3680 bp, Homo Sapiens
  NM_002562
gtcattggaggagcttgaagttaaagactcctgctaaaaaccagtacgtttcattttgcagttactgggagggggcttgctgtggccctgtcaggaagagtagagctctggtccagctccgcgcagggagggaggctgtcaccatgccggcctgctgcagctgcagtgatgttttccagtatgagacgaacaaagtcactcggatccagagcatgaattatggcaccattaagtggttcttccacgtgatcatcttttcctacgtttgctttgctctggtgagtgacaagctgtaccagcggaaagagcctgtcatcagttctgtgcacaccaaggtgaaggggatagcagaggtgaaagaggagatcgtggagaatggagtgaagaagttggtgcacagtgtctttgacaccgcagactacaccttccctttgcaggggaactctttcttcgtgatgacaaactttctcaaaacagaaggccaagagcagcggttgtgtcccgagtatcccacccgcaggacgctctgttcctctgaccgaggttgtaaaaagggatggatggacccgcagagcaaaggaattcagaccggaaggtgtgtagtgtatgaagggaaccagaagacctgtgaagtctctgcctggtgccccatcgaggcagtggaagaggccccccggcctgctctcttgaacagtgccgaaaacttcactgtgctcatcaagaacaatatcgacttccccggccacaactacaccacgagaaacatcctgccaggtttaaacatcacttgtaccttccacaagactcagaatccacagtgtcccattttccgactaggagacatcttccgagaaacaggcgataatttttcagatgtggcaattcagggcggaataatgggcattgagatctactgggactgcaacctagaccgttggttccatcactgccgtcccaaatacagtttccgtcgccttgacgacaagaccaccaacgtgtccttgtaccctggctacaacttcagatacgccaagtactacaaggaaaacaatgttgagaaacggactctgataaaagtcttcgggatccgttttgacatcctggtttttggcaccggaggaaaatttgacattatccagctggttgtgtacatcggctcaaccctctcctacttcggtctggccgctgtgttcatcgacttcctcatcgacacttactccagtaactgctgtcgctcccatatttatccctggtgcaagtgctgtcagccctgtgtggtcaacgaatactactacaggaagaagtgcgagtccattgtggagccaaagccgacattaaagtatgtgtcctttgtggatgaatcccacattaggatggtgaaccagcagctactagggagaagtctgcaagatgtcaagggccaagaagtcccaagacctgcgatggacttcacagatttgtccaggctgcccctggccctccatgacacacccccgattcctggacaaccagaggagatacagctgcttagaaaggaggcgactcctagatccagggatagccccgtctggtgccagtgtggaagctgcctcccatctcaactccctgagagccacaggtgcctggaggagctgtgctgccggaaaaagccgggggcctgcatcaccacctcagagctgttcaggaagctggtcctgtccagacacgtcctgcagttcctcctgctctaccaggagcccttgctggcgctggatgtggattccaccaacagccggctgcggcactgtgcctacaggtgctacgccacctggcgcttcggctcccaggacatggctgactttgccatcctgcccagctgctgccgctggaggatccggaaagagtttccgaagagtgaagggcagtacagtggcttcaagagtccttactgaagccaggcaccgtggctcacgtctgtaatcccagcgctttgggaggccgaggcaggcagatcacctgaggtcgggagttggagacccgcctggctaacaaggcgaaatcctgtctgtactaaaaatacaaaaatcagccagacatggtggcatgcacctgcaatcccagctactcgggaggctgaggcacaagaatcacttgaacccgggaggcagaggttgtagtgagcccagattgtgccactgctctccagcctgggaggcacagcaaactgtcccccaaaaaaaaaaaagagtccttaccaatagcaggggctgcagtagccatgttaacatgacatttaccagcaacttgaacttcacctgcaaagctctgtggccacattttcagccaaagggaaatatgctttcatcttctgttgctctctgtgtctgagagcaaagtgacctggttaaacaaaccagaatccctctacatggactcagagaaaagagattgagatgtaagtctcaactctgtccccaggaagttgtgtgaccctaggcctctcacctctgtgcctctgtctccttgttgcccaactactatctcagagatattgtgaggacaaattgagacagtgcacatgaactgtcttttaatgtgtaaagatctacatgaatgcaaaacatttcattatgaggtcagactaggataatgtccaactaaaaacaaacccttttcatcctggctggagaatgtggagaactaaaggtggccacaaattctttgacactcaagtcccccaagacctaagggttttatctcctccccttgaatatgggtggctctgattgctttatccaaaagtggaagtgacattgtgtcagtttcagatcctgatcttaagaggctgacagcttctacttgctgtcccttggaactcttgctatcggggaagccagacgccatttaaaagtctgcctatcctggccaggtgtggtggctcacacctgtaatcccagcactttgggagaccaaggcgggcggatcacttaaagtcaggagtccaagaccagactcgccaacatggtgaaaccgtatctctaataaaaatacaaaaattagctgggcatggtgcgggcacctgtagtcctagctatcaagaggctgagacaggagaaacacttgaacctgggaggtggaggttgcattgagctgagatcgtgccactgcactccaggctgggtgacagagcgagactccatctcaaaaaaaaaaaaaagaaaaaaaaaatgtctgcctatcctgagactgccctgctgtgaggaagcccaagcagtcacgtggacagtgcctgaccagccccagctttcaagccatccaagcccagtcaccaaacatgagagagaagaagccttcaggtgattctggactccactaacatatgactgataccgcatgatacatcccaagtgagaactgccccataaatccagaaaaccacattgctatcttaagtccctaagtttggggcttatttgttccacagcaacaggtaactggaacagagggcaagcctgatgaatgggcacacagactcagcccataccttccctggttctaatgttctcagggagcccggaccaaccctgggagcctcaggaacttaggtttccactggacagttctagaagggctatagaccaaatcaggtaactcaccagaccagccttggaatctatcaaatctaactgctgagctaccca

SEQ ID NO: 1769 - DNA, 1977 bp, Homo Sapiens
  NM_002566
tttcagcagatgagcttgaacctcaggagggttgtggcacaatgaggaaggaaacgtgggtggaaaggcacgctggcctgctctgctggctgggccagtaactggggatggggctggggcagggcccactaagccactggtgactgggggaggggctggggaactgggtagcagacacaggctgaggatcggcacgggagcatggcagccaacgtctcgggtgccaagtcctgccctgccaacttcttggcagctgccgacgacaaactcagtgggttccagggggacttcctgtggcccatactggtggttgagttcctggtggccgtggccagcaatggcctggccctgtaccgcttcagcatccggaagcagcgcccatggcaccccgccgtggtcttctctgtccagctggcagtcagcgacctgctctgcgccctgacgctgcccccgctggccgcctacctctatccccccaagcactggcgctatggggaggccgcgtgccgcctggagcgcttcctcttcacctgcaacctgctgggcagcgtcatcttcatcacctgcatcagcctcaaccgctacctgggcatcgtgcaccccttcttcgcccgaagccacctgcgacccaagcacgcctgggccgtgagcgctgccggctgggtcctggccgccctgctggccatgcccacactcagcttctcccacctgaagaggccgcagcagggggcgggcaactgcagcgtggccaggcccgaggcctgcatcaagtgtctggggacagcagaccacgggctggcggcctacagagcgtatagcctggtgctggcggggttgggctgcggcctgccgctgctgctcacgctggcagcctacggcgccctcgggcgggccgtgctacgcagcccaggcatgactgtggccgagaagctgcgtgtggcagcgttggtggccagtggtgtggccctctacgccagctcctatgtgccctaccacatcatgcgggtgctcaacgtggatgctcggcggcgctggagcacccgctgcccgagctttgcagacatagcccaggccacagcagccctggagctggggccctacgtgggctaccaggtgatgcggggcctcatgcccctggccttctgtgtccaccctctactctacatggccgcagtgcccagcctgggctgctgctgccgacactgccccggctacagggacagctggaacccagaggacgccaagagcactggccaagccctgcccctcaatgccacagccgcccctaaaccgtcagagccccagtcccgtgagctgagccaatgatgtggcctagcggaagctgcctcctcaccctaggtgttgctggagaaccctgagggcagggcccgagccccgacacatcccttcccccaaaaagcaacacctgtgcttgcagccaggtcaggcccagctgcagcccaggcaggagcagtcgcctttcccacccacagcgctggccacagggctccctgcagggtcagggaccagaccacgcccagaggaggggaggcactggcccccgccacaggactggagacgcaagaacaaaaagaaccaagtagagagagtggagctgctttattgcccttggagcccgcgctctcggaggctgtcttctgtcgccaagggtcccggaccgagtacacagtggcagctggcttagttggtggacggcctggggtaggggagggtggcaggtataagacttctgggggcaccccaagaccccagacacccaagtggcatcttgggggtgggtgggcagaggacggggtaatgtgaggacgaagcgggcacggagccagatggccagtctccaggcctggtccacggactggcagggaccccaggcacaagagctgccacccctctgcccggttttggaaaaaaacaataaaggactgtcccctcaaaaccagccgggggactgttaaa

SEQ ID NO: 1770 - DNA, 1507 bp, Homo Sapiens
  NM_002567
tgggcggcggctgaggcgcgtgctctcgcgtggtcgctgggtctgcgtcttcccgagccagtgtgctgagctctccgcgtcgcctctgtcgcccgcgcctggcctaccgcggcactcccggctgcacgctctgcttggcctcgccatgccggtggacctcagcaagtggtccgggcccttgagcctgcaagaagtggacgagcagccgcagcacccgctgcatgtcacctacgccggggcggcggtggacgagctgggcaaagtgctgacgcccacccaggttaagaatagacccaccagcatttcgtgggatggtcttgattcagggaagctctacaccttggtcctgacagacccggatgctcccagcaggaaggatcccaaatacagagaatggcatcatttcctggtggtcaacatgaagggcaatgacatcagcagtggcacagtcctctccgattatgtgggctcggggcctcccaagggcacaggcctccaccgctatgtctggctggtttacgagcaggacaggccgctaaagtgtgacgagcccatcctcagcaaccgatctggagaccaccgtggcaaattcaaggtggcgtccttccgtaaaaagtatgagctcagggccccggtggctggcacgtgttaccaggccgagtgggatgactatgtgcccaaactgtacgagcagctgtctgggaagtagggggttagcttggggacctgaactgtcctggaggccccaagccatgttccccagttcagtgttgcatgtataatagatttctcctcttcctgccccccttggcatgggtgagacctgaccagtcagatggtagttgagggtgacttttcctgctgcctggcctttataattttactcactcactctgatttatgttttgatcaaatttgaacttcattttggggggtattttggtactgtgatggggtcatcaaattattaatctgaaaatagcaacccagaatgtaaaaaagaaaaaactggggggaaaaagaccaggtctacagtgatagagcaaagcatcaaagaatctttaagggaggtttaaaaaaaaaaaaaaaaaaaaagattggttgcctctgcctttgtgatcctgagtccagaatggtacacaatgtgattttatggtgatgtcactcacctagacaaccagaggctggcattgaggctaacctccaacacagtgcatctcagatgcctcagtaggcatcagtatgtcactctggtccctttaaagagcaatcctggaagaagcaggagggagggtggctttgctgttgttgggacatggcaatctagaccggtagcagcgctcgctgacagcttgggaggaaacctgagatctgtgttttttaaattgatcgttcttcatgggggtaagaaaagctggtctggagttgctgaatgttgcattaattgtgctgtttgcttgtagttgaataaaaatagaaacctgaatgaagaaaaaaaaaaaaaaaa

SEQ ID NO: 1771 - DNA, 2869 bp, Homo Sapiens
  NM_002568
cccttctccccggcggttagtgctgagagtgcggagtgtgtgctccgggctcggaacacacatttattattaaaaaatccaaaaaaaatctaaaaaaatcttttaaaaaaccccaaaaaaatttacaaaaaatccgcgtctcccccgccggagacttttattttttttcttcctcttttataaaataacccggtgaagcagccgagaccgacccgcccgcccgcggccccgcagcagctccaagaaggaaccaagagaccgaggccttcccgctgcccggacccgacaccgccaccctcgctccccgccggcagccggcagccagcggcagtggatcgaccccgttctgcggccgttgagtagttttcaattccggttgatttttgtccctctgcgcttgctccccgctcccctccccccggctccggcccccagccccggcactcgctctcctcctctcacggaaaggtcgcggcctgtggccctgcgggcagccgtgccgagatgaaccccagtgcccccagctaccccatggcctcgctctacgtgggggacctccaccccgacgtgaccgaggcgatgctctacgagaagttcagcccggccgggcccatcctctccatccgggtctgcagggacatgatcacccgccgctccttgggctacgcgtatgtgaacttccagcagccggcggacgcggagcgtgctttggacaccatgaattttgatgttataaagggcaagccagtacgcatcatgtggtctcagcgtgatccatcacttcgcaaaagtggagtaggcaacatattcattaaaaatctggacaaatccattgataataaagcactgtatgatacattttctgcttttggtaacatcctttcatgtaaggtggtttgtgatgaaaatggttccaagggctatggatttgtacactttgagacgcaggaagcagctgaaagagctattgaaaaaatgaatggaatgctcctaaatgatcgcaaagtatttgttggacgatttaagtctcgtaaagaacgagaagctgaacttggagctagggcaaaagaattcaccaatgtttacatcaagaattttggagaagacatggatgatgagcgccttaaggatctctttggcaagtttgggcctgccttaagtgtgaaagtaatgactgatgaaagtggaaaatccaaaggatttggatttgtaagctttgaaaggcatgaagatgcacagaaagctgtggatgagatgaacggaaaggagctcaatggaaaacaaatttatgttggtcgagctcagaaaaaggtggaacggcagacggaacttaagcgcaaatttgaacagatgaaacaagataggatcaccagataccagggtgttaatctttatgtgaaaaatcttgatgatggtattgatgatgaacgtctccggaaagagttttctccatttggtacaatcactagtgcaaaggttatgatggagggtggtcgcagcaaagggtttggttttgtatgtttctcctccccagaagaagccactaaagcagttacagaaatgaacggtagaattgtggccacaaagccattgtatgtagctttagctcagcgcaaagaagagcgccaggctcacctcactaaccagtatatgcagagaatggcaagtgtacgagctgttcccaaccctgtaatcaacccctaccagccagcacctccttcaggttacttcatggcagctatcccacagactcagaaccgtgctgcatactatcctcctagccaaattgctcaactaagaccaagtcctcgctggactgctcagggtgccagacctcatccattccaaaatatgcccggtgctatccgcccagctgctcctagaccaccatttagtactatgagaccagcttcttcacaggttccacgagtcatgtcaacacagcgtgttgctaacacatcaacacagacaatgggtccacgtcctgcagctgcagccgctgcagctactcctgctgtccgcaccgttccacagtataaatatgctgcaggagttcgcaatcctcagcaacatcttaatgcacagccacaagttacaatgcaacagcctgctgttcatgtacaaggtcaggaacctttgactgcttccatgttggcatctgcccctcctcaagagcaaaagcaaatgttgggtgaacggctgtttcctcttattcaagccatgcaccctactcttgctggtaaaatcactggcatgttgttggagattgataattcagaacttcttcatatgctcgagtctccagagtcactccgttctaaggttgatgaagctgtagctgtactacaagcccaccaagctaaagaggctgcccagaaagcagttaacagtgccaccggtgttccaactgtttaaaattgatcagggaccatgaaaagaaacttgtgcttcaccgaagaaaaatatctaaacatcgaaaaacttaaatattatggaaaaaaaacattgcaaaatataaaataaataaaaaaaggaaaggaaactttgaaccttatgtaccgagcaaatgccaggtctagcaaacataatgctagtcctagattacttattgatttaaaaacaaaaaaacacaaaaaaatagtaaaatataaaaacaaattaatgttttatagaccctgggaaaaagaattttcagcaaagtacaaaaatttaaagcattcctttctttaattttgtaattctttactgtggaatagctcagaatgtcagttctgttttaagtaacagaattgataactgagcaaggaaacgtaatttggattataaaattcttgctttaataaaaattccttaaacagtgaaaaaaaaa

SEQ ID NO: 1772 - DNA, 4180 bp, Homo Sapiens
  NM_002569
gcggggaagcagcagcggccaggatgaatcccaggtgctctggagctggatggtgaaggtcggcactcttcaccctcccgagccctgcccgtctcggccccatgcccccaccagtcagccccgggccacaggcagtgagcaggcacctgggagccgaggccctgtgaccaggccaaggagacgggcgctccagggtcccagccacctgtcccccccatggagctgaggccctggttgctatgggtggtagcagcaacaggaaccttggtcctgctagcagctgatgctcagggccagaaggtcttcaccaacacgtgggctgtgcgcatccctggaggcccagcggtggccaacagtgtggcacggaagcatgggttcctcaacctgggccagatcttcggggactattaccacttctggcatcgaggagtgacgaagcggtccctgtcgcctcaccgcccgcggcacagccggctgcagagggagcctcaagtacagtggctggaacagcaggtggcaaagcgacggactaaacgggacgtgtaccaggagcccacagaccccaagtttcctcagcagtggtacctgtctggtgtcactcagcgggacctgaatgtgaaggcggcctgggcgcagggctacacagggcacggcattgtggtctccattctggacgatggcatcgagaagaaccacccggacttggcaggcaattatgatcctggggccagttttgatgtcaatgaccaggaccctgacccccagcctcggtacacacagatgaatgacaacaggcacggcacacggtgtgcgggggaagtggctgcggtggccaacaacggtgtctgtggtgtaggtgtggcctacaacgcccgcattggaggggtgcgcatgctggatggcgaggtgacagatgcagtggaggcacgctcgctgggcctgaaccccaaccacatccacatctacagtgccagctggggccccgaggatgacggcaagacagtggatgggccagcccgcctcgccgaggaggccttcttccgtggggttagccagggccgaggggggctgggctccatctttgtctgggcctcggggaacgggggccgggaacatgacagctgcaactgcgacggctacaccaacagtatctacacgctgtccatcagcagcgccacgcagtttggcaacgtgccgtggtacagcgaggcctgctcgtccacactggccacgacctacagcagtggcaaccagaatgagaagcagatcgtgacgactgacttgcggcagaagtgcacggagtctcacacgggcacctcagcctctgcccccttagcagccggcatcattgctctcaccctggaggccaataagaacctcacatggcgggacatgcaacacctggtggtacagacctcgaagccagcccacctcaatgccaacgactgggccaccaatggtgtgggccggaaagtgagccactcatatggctacgggcttttggacgcaggcgccatggtggccctggcccagaattggaccacagtggccccccagcggaagtgcatcatcgacatcctcaccgagcccaaagacatcgggaaacggctcgaggtgcggaagaccgtgaccgcgtgcctgggcgagcccaaccacatcactcggctggagcacgctcaggcgcggctcaccctgtcctataatcgccgtggcgacctggccatccacctggtcagccccatgggcacccgctccaccctgctggcagccaggccacatgactactccgcagatgggtttaatgactgggccttcatgacaactcattcctgggatgaggatccctctggcgagtgggtcctagagattgaaaacaccagcgaagccaacaactatgggacgctgaccaagttcaccctcgtactctatggcaccgcccctgaggggctgcccgtacctccagaaagcagtggctgcaagaccctcacgtccagtcaggcctgtgtggtgtgcgaggaaggcttctccctgcaccagaagagctgtgtccagcactgccctccagggttcgccccccaagtcctcgatacgcactatagcaccgagaatgacgtggagaccatccgggccagcgtctgcgccccctgccacgcctcatgtgccacatgccaggggccggccctgacagactgcctcagctgccccagccacgcctccttggaccctgtggagcagacttgctcccggcaaagccagagcagccgagagtccccgccacagcagcagccacctcggctgcccccggaggtggaggcggggcaacggctgcgggcagggctgctgccctcacacctgcctgaggtggtggccggcctcagctgcgccttcatcgtgctggtcttcgtcactgtcttcctggtcctgcagctgcgctctggctttagttttcggggggtgaaggtgtacaccatggaccgtggcctcatctcctacaaggggctgccccctgaagcctggcaggaggagtgcccgtctgactcagaagaggacgagggccggggcgagaggaccgcctttatcaaagaccagagcgccctctgatgagcccactgcccaccccctcaagccaatcccctccttgggcactttttaattcaccaaagtatttttttatcttgggactgggtttggaccccagctgggaggcaagaggggtggagactgcttcccatcctaccctcgggcccacctggccacctgaggtgggcccaggaccagctggggcgtggggagggccgtaccccaccctcagcaccccttccatgtggagaaaggagtgaaacctttagggcagcttgccccggccccggccccagccagagttcctgcggagtgaagaggggcagcccttgcttgttgggattcctgacccaggccgcagctcttgcccttccctgtccctctaaagcaataatggtcccatccaggcagtcgggggctggcctaggagatatctgagggaggaggccacctctccaagggcttctgcaccctccaccctgtcccccagctctggtgagtcttggcggcagcagccatcataggaagggaccaaggcaaggcaggtgcctccaggtgtgcacgtggcatgtggcctgtggcctgtgtcccatgacccacccctgtgctccgtgcctccaccaccactggccaccaggctggcgcagccaaggccgaagctctggctgaaccctgtgctggtgtcctgaccaccctcccctctcttgcacccgcctctcccgtcagggcccaagtccctgttttctgagcccgggctgcctgggctgttggcactcacagacctggagcccctgggtgggtggtggggaggggcgctggcccagccggcctctctggcctcccacccgatgctgctttcccctgtggggatctcaggggctgtttgaggatatattttcactttgtgattatttcactttagatgctgatgatttgtttttgtatttttaatgggggtagcagctggactacccacgttctcacacccaccgtccgccctgctcctccctggctgccctggccctgaggtgtgggggctgcagcatgttgctgaggagtgaggaatagttgagccccaagtcctgaagaggcgggccagccaggcgggctcaaggaaagggggtcccagtgggaggggcaggctgacatctgtgtttcaagtggggctcgccatgccgggggttcataggtcactggctctccaagtgccagaggtgggcaggtggtggcactgagcccccccaacactgtgccctggtggagaaagcactgacctgtcatgcccccctcaaacctcctcttctgacgtgccttttgcacccctcccattaggacaatcagtcccctcccatctgggagtccccttttcttttctaccctagccattcctggtacccagccatctgcccaggggtgccccctcctctcccatccccctgccctcgtggccagcccggctggttttgtaagatgctgggttggtgcacagtgatttttttcttgtaatttaaacaggcccagcattgctggttctatttaatggacatgagataatgttagaggttttaaagtgattaaacgtgcagactatgcaaaccag

SEQ ID NO: 1773 - DNA, 4200 bp, Homo Sapiens
  NM_002572
agtggaggagctgctgctggtgctggggccggaggagggacgcgccggagcgggaccgacgggaccgagcgagcgaccgacgcgccacccgccgacgcctcagccgcttggggcccgcacggaccctctacttcagtgtagaatgagccaaggagactcaaacccagcagctattccgcatgcagcagaagatattcaaggagatgaccgatggatgtctcagcacaacagatttgttttggactgtaaagacaaagagcctgatgtactgttcgtgggagactccatggtgcagttaatgcagcaatatgagatatggcgagagcttttttccccacttcatgcactgaattttggaattgggggagatacaacaagacatgttttgtggagactaaagaatggagaactggagaatattaagcctaaggtcattgttgtctgggtaggaacaaataaccacgaaaatacagcagaagaagtagcaggtgggatcgaggccattgtacaacttatcaacacaaggcagccacaggccaaaatcattgtattgggtttgttacctcgaggtgagaaacccaatcctttgaggcaaaagaacgccaaggtgaaccaactcctcaaggtttcgctgccgaagcttgccaacgtgcagctcctggataccgacgggggttttgtgcactcggacggtgccatctcctgccacgacatgtttgattttctgcatctgacaggagggggctatgcaaagatctgcaaacccctgcatgaactgatcatgcagttgttggaggaaacacctgaggagaaacaaaccaccattgcctgactggctcttatcagtgttaatagcatctcagcttcctcagatcagttctatcactggcactacagaatccttctctttcttaaggcactttgcattgtagaatgttcctggatgttcatatctagtgtttgaaggggaggagggatttaaactggtcctgtacatagaaggtttgtttgacagaggagaaaaattagccaaggaagattgttgtttaaattcatttgaaaccagaaggggactttttagttgtatgtgtaacacattcattgaattattatcactgttttcttgggacaacatcaagcctaaatactgaacaatatgaagattcttttcttggcctttctgtggattatgtcatatataataattatcagaatcattctacttggctttaaaacatgttttctccaatttttttaaggttcataatttagccttttgtttttatgttgcttagattcttatgtatactgaatattttattaacatgtagcatcaggttgaacatgcttgtcattgatatatggaagatgctatagttagaagtgaatttgttctgctttcttaatcttttccatgcttagcagtgaaaaacaggttttgccccagtagagggattctttggagggtattattttttatgctgctgaatatcatgtctataatagacccgtgcatgcagcctttcctccttattccccttcatgcccccctttccccttcattccccccgccaccccgtttttttttttttttttttttttttggttcttgttgacattacaagcttttaacacatttttgacctaggagccctgttgctggaagtatagtctccagccagttactctcatgatagtactgctataaaactcattcttgtgtggtgttctgtgctatagattctgtgtattgctgttcatattcggagttctggttttgtttttcccttaaaacctgttaacagttttttttgggggtggggggattcagaactcttgtttcccattccatagcacctgacattatttcaagttttataatatcttaaggtgtatattttattttttttattggcttagttgttttttgttttgttttgtttgagatggagtttcactgttgcccaggctggggtgcaatggtgtgatcttggctcactgcagcctccacctcccgagttcaaatgattctcctgcctcagcttcctgagtagctgggattacaggtgcatgccaccatgcccggctaatttttatatttttattagagacgggatttcgccatgttaaccaggctggtctcgaactcctgacctcaggtgatctgcccgccttggcctcccaaagtgctgggattacaggcatgagccaccgtgcctggccttattggcttagtttttaaattatcctccaaaaattttgggcctttttctgtggggaaacaagtgaagctgctcttcagcatagacactacctttatcccatcattttagtaaaaactaggtttgtttcacttctgaggtgtcttattaatgtacttcatctgagaatttgttgatcttaatgttcgagctatataagaactgccattaaaaaaaatgggataatagatgattttatcagtatacctgtggaatatgtacaaactggatctatagatattttgaactggaccaggtgggtattgaagtaacccatcaaaatatgctctgcagtgattccgcttaatgtttaaattcagtaacgtacttgaaaggcaaatttcagtgcttttgtatgttggaggagggcttactgatgcgtgctaagaccgatttctgattgagggatgaaccttgggctcatttttttcttgtgaagtctctttctagaaaattttttggttttgttctttttaaaaaatacatacttttttgaatgtatcatgtcttcattaacaacagaaaatccacatggtgtttactaaacttgtttacgacattaaaaatttcctttttatttttagtagcccaggttgagtttttcacaagagatttttttcttagctgaggtatagttgtatagcaagaagaattaagccagatttttgtgtgtggaaagacagttttctatccacgtctttttctgtttgtcagaaggtgggagtatggtccaaataaatccattaggttactcctgcagcatgcgcttttagcttctctcttgactgaggatcaaatatccctttgtgagctggccctcagctcctttgctcatgtgtacaaacctcagatgttactacattttatatctaccagagctattcaagcaatagtatttgaaccactagccttttaaataaaattctgccccattactgatgtgcagatattgagttcactttcattttttgccagatttctttgcactactttaggtaaaaatagttaatctatttttctttgacatcctagtttgcgtcagtgacagaacttactgcttagtctttgtactttttaaaaaatctataaatttaatgcactgtccaagtgaaatgtcctagttgtcattgtgattaaggggccaactttccaggcagctagcagagatactattctcttcctctcccagcaaatttgtattccttcgcccacgcattcctgctatactagatggcagccagtgatggaactataaagatgtctgtggtcatatgttgaatgtggcagcttgaagatgtactgccacgggtgatctagggcaggctgtcttccagtccatgtgttctcggtcgccgtagacagcgctctggctaccaccgtgaggctacttgaactgtcaggggcatctgcctaaaccagaatcttttgtcagaaaccttaacccaacaaaacaaatcttgagtagctcatgcccggctcttaggaattttgtctgtttaaaaaaaaaaaaaaaaaaaaagtccaacttactttattttatttttttaacctagtcactgtttacaattgtatgctaaagcctgaaatattgtctgtgctgtggtgtatgagcattgccaactttatatttattgcagtgaagaagaaactaaaaatatatggaaatgaggagcatgtccaagctcctaaatccgtgtgggtgcatgtgggagaagtgagttagggcctcttgaaaggaggctttttggagaggggtcccccaggtttcttggtgttcctgcttggggatcactgctgctagctgactggacctccccattggaagtttgtgattttgctttggcaaagtttcattgactagtagaactcattctgttttagtgtatatttcaatataaatgtaaacattttgctcaaaaaaaaaaaaaaaaaaaaaaaa

SEQ ID NO: 1774 - DNA, 1086 bp, Homo Sapiens
  NM_002573
ggagctggatggtctcgcctctccctccccccaccccgtgccgggtgcgcggcctgggagtcagcggcccgagcgggaagcgccgggcgagcccactgtgcggccgtcgtgggggaagcgaaggttcctgattccacctacctcctaagtgaaggcttccgtccctggagaggaggcggcgccctgtatcggccttcgtcctccgcgggtgtgctagcgttgggacggtcctttgttgccgcgaggggtaggagtgggcgtggcggagccagctccgttcggaacactcccgggccgacccgactcgctcatcctgcaggagctgcggcgccaagatgagtggagaggagaacccagccagcaagcccacgccggtgcaggacgtacagggcgacgggcgctggatgtccctgcaccatcggttcgtggctgacagcaaagataaggaacccgaagtcgtcttcatcggggactccttggtccagctcatgcaccagtgcgagatctggcgcgagctcttctctcctctgcatgcacttaactttggcattggtggtgacggcacacagcatgtactgtggcggctggagaatggggagctggaacacatccggcccaagattgtggtggtctgggtgggcaccaacaaccacggacacacagcagagcaggtgactggtggcatcaaggccattgtgcaactggtgaatgagcgacagccccaggcccgggttgtggtgctgggcctgcttccgcgaggccaacatcccaacccacttcgggagaagaaccgacaggtgaacgagctggtacgggcggcactggctggccaccctcgggcccacttcctagatgccgaccctggctttgtgcactcagatggcaccatcagccatcatgacatgtatgattacctgcatctgagccgcctgggctacacacctgtttgccgggctctgcactccctgcttctgcgtctgctggcccaagaccagggccaaggtgctcccctgctggagcccgcaccctaagcatcctgctgccttcccacaacattaaactctccttcctcagtgaaaaaaaaaa

SEQ ID NO: 1775 - DNA, 1922 bp, Homo Sapiens
  NM_002575
gtaacaactctcagaggagcattgcccgtcagacagcaactcagagaataaccagagaacaaccagattgaaacaatggaggatctttgtgtggcaaacacactctttgccctcaatttattcaagcatctggcaaaagcaagccccacccagaacctcttcctctccccatggagcatctcgtccaccatggccatggtctacatgggctccaggggcagcaccgaagaccagatggccaaggtgcttcagtttaatgaagtgggagccaatgcagttacccccatgactccagagaactttaccagctgtgggttcatgcagcagatccagaagggtagttatcctgatgcgattttgcaggcacaagctgcagataaaatccattcatccttccgctctctcagctctgcaatcaatgcatccacagggaattatttactggaaagtgtcaataagctgtttggtgagaagtctgcgagcttccgggaagaatatattcgactctgtcagaaatattactcctcagaaccccaggcagtagacttcctagaatgtgcagaagaagctagaaaaaagattaattcctgggtcaagactcaaaccaaaggcaaaatcccaaacttgttacctgaaggttctgtagatggggataccaggatggtcctggtgaatgctgtctacttcaaaggaaagtggaaaactccatttgagaagaaactaaatgggctttatcctttccgtgtaaactcggctcagcgcacacctgtacagatgatgtacttgcgtgaaaagctaaacattggatacatagaagacctaaaggctcagattctagaactcccatatgctggagatgttagcatgttcttgttgcttccagatgaaattgccgatgtgtccactggcttggagctgctggaaagtgaaataacctatgacaaactcaacaagtggaccagcaaagacaaaatggctgaagatgaagttgaggtatacataccccagttcaaattagaagagcattatgaactcagatccattctgagaagcatgggcatggaggacgccttcaacaagggacgggccaatttctcagggatgtcggagaggaatgacctgtttctttctgaagtgttccaccaagccatggtggatgtgaatgaggagggcactgaagcagccgctggcacaggaggtgttatgacagggagaactggacatggaggcccacagtttgtggcagatcatccttttctttttcttattatgcataagataaccaactgcattttatttttcggcagattttcctcaccctaaaactaagcgtgctgcttctgcaaaagatttttgtagatgagctgtgtgcctcagaattgctatttcaaattgccaaaaatttagagatgttttctacatatttctgctcttctgaacaacttctgctacccactaaataaaaacacagaaataattagacaattgtctattataacatgacaaccctattaatcatttggtcttctaaaatgggatcatgcccatttagattttccttactatcagtttatttttataacattaacttttactttgttatttattattttatataatggtgagtttttaaattattgctcactgcctatttaatgtagctaataaagttatagaagcagatgatctgttaatttcctatctaataaatgcctttaattgttctcataatgaagaataagtaggtatccctccatgcccttctgtaataaatatctggaaaaaacattaaacaataggcaaatatatgttatgtgcatttctagaaatacataacacatatatatgtctgtatcttatattcaattgcaagtatataataaataaacctgcttccaaacaacaataaaaaaaaaaaaaaa

SEQ ID NO: 1776 - DNA, 3087 bp, Homo Sapiens
  NM_002582
gcgcgctgtttccggaagtcgcggccggcgtcaccgctgcggctgcctcagctactgccgcagtcgccgcggaattcggcgagtagaaccgctgaggcgggcgcgggcccgggtggggccaaggttccggccactctgcagaatggagataatcaggagcaattttaagagtaatcttcacaaagtgtaccaggccatagaggaggccgacttcttcgccatcgatggggagttttcaggaatcagtgatggaccttcagtctctgcattaacaaatggttttgacactccagaagagaggtatcagaagcttaaaaagcattccatggactttttgctatttcagtttggcctttgcacttttaagtatgactacacagattcaaagtatataacgaagtcatttaacttctatgttttcccgaaacccttcaatagatcctcaccagatgtcaaatttgtttgtcagagctccagcattgactttctagcaagccagggatttgattttaataaagtttttcgaaatggaattccatatttaaatcaggaagaagaaagacagttaagagagcagtatgatgaaaaacgttcacaggcgaatggtgcaggagctctgtcctatgtatctcctaacacttcaaaatgtcctgtcacgattcctgaggatcaaaagaagtttattgaccaagtggtagagaaaatagaggatttattacaaagtgaagaaaacaagaacttggatttagagccatgtaccgggttccaaagaaaactaatttatcagactttgagctggaagtatccgaaaggcattcatgttgagactttagaaactgaaaagaaggagcgatatatagttatcagcaaagtagatgaagaagaacgcaaaagaagagagcagcagaaacatgccaaagaacaggaggagctgaatgatgctgtgggattttctagagtcattcacgccattgctaattcgggaaaacttgttattggacacaatatgctcttggacgtcatgcacacagttcatcagttctactgccctctgcctgcggacttaagtgagtttaaagagatgacaacatgtgttttccccagactcttggatactaaattgatggccagcacacaaccttttaaggatatcattaacaacacatcccttgcggaattggaaaagcggttaaaagagacacctttcaaccctcctaaagttgaaagtgccgaaggttttccaagttatgacacagcctctgaacaactccacgaggcaggctacgatgcctacatcacagggctgtgcttcatctccatggccaattacctaggttcttttctcagccctccaaaaattcatgtgtctgccagatcaaaactcattgaacctttttttaacaagttatttcttatgagggtcatggatatcccctatctaaacttggaaggaccagacttgcagcctaaacgtgatcatgttctccatgtgacattccccaaagaatggaaaaccagcgacctttaccagcttttcagtgcctttggtaacattcagatatcctggattgatgacacatcagcatttgtttcccttagccagcccgagcaagtaaagattgctgtcaataccagcaaatatgcagaaagctatcggatccaaacctatgctgaatatatggggagaaaacaggaagagaagcagatcaaaagaaagtggactgaagatagctggaaggaggctgacagcaaacggttaaacccccagtgcataccctacaccctgcagaatcactattaccgcaacaatagttttacagctcccagcacagtaggaaagagaaatttgagtcctagtcaagaggaagctggcctggaggacggagtgtcaggggagatttccgacactgagcttgagcagaccgattcctgtgcagagcccctctcagagggaaggaaaaaggccaagaaattaaaaagaatgaagaaggagctttctccagcaggaagcatctcgaagaacagccctgccacactctttgaagttcctgacacatggtaaccaagacctgagggcagcaaaccgctggtgctgtcgctgtgagcaagagccggctggcacatttggaagccgcactgtatttaacttaatcaaatgtggtatgggaggggttggaaaccaagttgtctcctgggggggagaaaacaggttttatttttgtggctgtggttttttcccctttttaatctaactgcctgttgacattgacactcatcacggttgtaggctgtcatgaatgtgtacgtgcttaaccagtgaattccgtgttgctcttgtgaggcctttcctgtcatgacccagtgtgcttaagaacctgcctgatggggagtgtcggctgtgaaatctgcaaaaagagctgacattccagctgctgtgatcatgaatttgggggtgtactgtcctgcctgtgcatcttctcgcactgagattttgaggcagttgcagccctcggttagtctcccagtggaaaaatcggttgtgcctccctgcttcccaccatagctgcctgaaaacatgacgctctcaagcttgtccttccttcaggaagatgtccactcatgcccacccatgagagggcttgccgtatgccctggcctttgggcatatttatgtagagttcctttctcctaagacgtgagtttctcatgggggatgtacgagtaaaaaggttaacttctgttcttatgcgtggcgctgtgttcactttccagagtctctgttcgtttgtttggatggcggtctcggggtacggcagcgtgtgtgcgtacgtgtctgtgtgtgtgtgtgtgtgtgtgtgtgtgtgtgtgtgtgtgtgtgtgtgaaatcgtgcaaatctacaacatgtcccagcccattctccgttgaaacagatcacagcaacgacaaacgctcatggcgctgctttgctccacccgcttcagatagatcattgttagatatttcacatttttgtatggtggaaataaaaatgaaaaatgtatttccaaaagatgaaaattaaaaacattttcataggaaaaaaaaaa

SEQ ID NO: 1777 - DNA, 3133 bp, Homo Sapiens
  NM_002598
tccgcctcctgtcctccggaaaggtgcccgcctcttgccttccggcccggcgcccgatttccgccttccgacccagctgtgggctgcgccccacgccagcccgcgccccgcatggctgccgccggggccaggcctgtggagctgggcttcgccgagtcggcgccggcgtggcgactgcgcagcgagcagttccccagcaaggtgggcgggcggccggcatggctgggcgcggccgggctgccggggccccaggccctggcctgcgagctgtgcggccgcccgctctccttcctgctgcaggtgtatgcgccgctgcctggccgcccggacgccttccaccgctgcatcttcctcttctgctgccgcgagcagccgtgctgtgccggcctgcgagtttttaggaatcaactacccaggaaaaacgatttttactcatatgagccaccttctgagaatcctcccccagaaacaggagaatcagtgtgtctccagcttaagtctggtgctcatctctgcagggtttgtggctgtttaggccccaaaacgtgctccagatgccacaaagcatattactgcagcaaggagcatcagaccctagactggagattgggacataagcaggcttgtgcacaaccagatcatctggaccatataattccagaccacaacttcctttttccagaatttgaaattgtaatagaaacagaagatgagattatgcctgaggttgtggaaaaggaagattactcagagattatagggagcatgggtgaagcacttgaggaagaactggattccatggcaaaacatgaatccagggaagataaaatttttcagaagtttaaaactcagatagcccttgaaccagaacagattcttagatatggcagaggtattgcccccatctggatttctggtgaaaatattcctcaagaaaaggatattccagattgcccctgtggtgccaagagaatattggaattccaggtcatgcctcagctcctaaactacctgaaggctgacagactgggcaagagcattgactggggcatcctggctgtcttcacctgtgctgagagctgcagcttgggtactggctatacagaagaatttgtgtggaagcaggatgtaacagatacaccgtaaaggcatcttaaagccttgaaaaatgttaataatcttttataccttgcaattccatttctgggattttatcctaaggaaatacttataccaaaaatagaggtgcagagatgttgacagattgcttacacagtgtctacttattagtgaaacaaaagtgtccagtgacagggaattaaataaattttggtacatccacagaggaaggctacacagtcttaattataacacctatattgacaacagacataccattataggtggtattcatggtatgatcctattcttgtaaaaatatttgtatgtatgcacagaaatctgcaaagatgtacacttagtgaactggttaccaacgaatggtgggactaactaaaatggtctttttacttatatgtgcatttctttttataataaaaatgggttatatgcctaatgaagtcaaaccatctcactctgagcatttcccaccctaggtttttaaaacacaaaaatacttaggtaaaactcccaacaaacttgtctgatcattagctgattatcacaggctctagtatgtactggaagcccagaatatttgagaaataccaaacctcaggttggtgagtatgatgaacaggaaacccagtaattctgaagcagcagtatcacagttggcaggatgaggaacaacagtggctttgtgatcacagaactggaatttaaagaggctggaccttcagaactgatcttggtcagccagcggccctgcttacagatgagacactgaaaggcaaaaggcgatggtcttccctttccgtgtcagcattgtatacaggttccctatcgcacatacaagggttatggaatgtaagccaaaataagggtctggcctaggaggcagcagcctgaggaaaggaaggccctgaagtcagttttcaaagggctgacccttggcctattatgtttctgatacatctgtttaagcaagcggctcctaagactacactaaggtttcttccatcccctagcagctcacagttgacaattcccagttctctcagcaccagtgatgcctgcccttaagacacattgctgttgatcagtgcttgaatactgacggctaattctgataaatttctcaggcttatttccttaatctacattggctcacattgtcccctaacacatccctgttaactgaaatgcattgccaccataaatcctcacgttttcataggtaacatcacttgctaatgtaattgtctacttggctattttatttgtaatttaaaaagttctgtcctagtagtccatattatataagtatacatatgcaatttgtattaattgtataagatagttatacatagcaccatatgggaaactgcagtatggagtttctcccatggggaggttatcagctacttaagagctagaggatactagtttcgaacctgggatggctaaatctatgaaaatcacctataactatggtgtcacagccctgtggctactggagtaagttgtcatcaactagtgacaagagctggtcgcaacacttagtaggaagcacagtggcataaggaaacctggactagtggggcctttatatctaaaattatgtattattccttataggcagaatctgtaagtacgttatgactgctaatgacttttaaagcaaacatgttaacgatctttctatggtaaaaactgttatttggggacatcaccagatgatgtggacattcttgcaggtattttggcatacccaggcaagctgtcattggtgtatattccagttaacctctggagatgatcgtaacagtttacagggcctttccatttgggatggatatatcaagagggagacaaactggtccaaatcaccagaaagaaaatctcacagcaccgacttggcatctgtgttaaaaaatagcaactatatttaaaataaactgtacaacataaaaaatttaaattaaaaaatgcattaagcaagttgccttta

SEQ ID NO: 1778 - DNA, 4264 bp, Homo Sapiens
  NM_002600
agagcgctgcggccgcggcggtgcagcagaggcgcctcgggcaggaggagggcggcttctgcgagggcagcctgaggtattaaaaagtgtcagcaaactgcattgaataacagacatcctaagaggggatattttccacctctataatgaagaaaagcaggagtgtgatgacggtgatggctgatgataatgttaaagattattttgaatgtagcttgagtaaatcctacagttcttccagtaacacacttgggatcgacctctggagagggagaaggtgttgctcaggaaacttacagttaccaccactgtctcaaagacagagtgaaagggcaaggactcctgagggagatggtatttccaggccgaccacactgcctttgacaacgcttccaagcattgctattacaactgtaagccaggagtgctttgatgtggaaaatggcccttccccaggtcggagtccactggatccccaggccagctcttccgctgggctggtacttcacgccacctttcctgggcacagccagcgcagagagtcatttctctacagatcagacagcgactatgacttgtcaccaaaggcgatgtcgagaaactcttctcttccaagcgagcaacacggcgatgacttgattgtaactccttttgcccaggtccttgccagcttgcgaagtgtgagaaacaacttcactatactgacaaaccttcatggtacatctaacaagaggtccccagctgctagtcagcctcctgtctccagagtcaacccacaagaagaatcttatcaaaaattagcaatggaaacgctggaggaattagactggtgtttagaccagctagagaccatacagacctaccggtctgtcagtgagatggcttctaacaagttcaaaagaatgctgaaccgggagctgacacacctctcagagatgagccgatcagggaaccaggtgtctgaatacatttcaaatactttcttagacaagcagaatgatgtggagatcccatctcctacccagaaagacagggagaaaaagaaaaagcagcagctcatgacccagataagtggagtgaagaaattaatgcatagttcaagcctaaacaatacaagcatctcacgctttggagtcaacactgaaaatgaagatcacctggccaaggagctggaagacctgaacaaatggggtcttaacatctttaatgtggctggatattctcacaatagacccctaacatgcatcatgtatgctatattccaggaaagagacctcctaaagacattcagaatctcatctgacacatttataacctacatgatgactttagaagaccattaccattctgacgtggcatatcacaacagcctgcacgctgctgatgtagcccagtcgacccatgttctcctttctacaccagcattagacgctgtcttcacagatttggagatcctggctgccatttttgcagctgccatccatgacgttgatcatcctggagtctccaatcagtttctcatcaacacaaattcagaacttgctttgatgtataatgatgaatctgtgttggaaaatcatcaccttgctgtgggtttcaaactgctgcaagaagaacactgtgacatcttcatgaatctcaccaagaagcagcgtcagacactcaggaagatggttattgacatggtgttagcaactgatatgtctaaacatatgagcctgctggcagacctgaagacaatggtagaaacgaagaaagttacaagttcaggcgttcttctcctagacaactataccgatcgcattcaggtccttcgcaacatggtacactgtgcagacctgagcaaccccaccaagtccttggaattgtatcggcaatggacagaccgcatcatggaggaatttttccagcagggagacaaagagcgggagaggggaatggaaattagcccaatgtgtgataaacacacagcttctgtggaaaaatcccaggttggtttcatcgactacattgtccatccattgtgggagacatgggcagatttggtacagcctgatgctcaggacattctcgataccttagaagataacaggaactggtatcagagcatgatacctcaaagtccctcaccaccactggacgagcagaacagggactgccagggtctgatggagaagtttcagtttgaactgactctcgatgaggaagattctgaaggacctgagaaggagggagagggacacagctatttcagcagcacaaagacgctttgtgtgattgatccagaaaacagagattccctgggagagactgacatagacattgcaacagaagacaagtcccccgtggatacataatccccctctccctgtggagatgaacattctatccttgatgagcatgccagctatgtggtagggccagcccaccatgggggccaagacctgcacaggacaagggccacctggcctttcagttacttgagtttggagtcagaaagcaagaccaggaagcaaatagcagctcaggaaatcccacggttgacttgccttgatggcaagcttggtggagagggctgaagctgttgctgggggccgattctgatcaagacacatggcttgaaaatggaagacacaaaactgagagatcattctgcactaagtttcgggaacttatccccgacagtgactgaactcactgactaataacttcatttatgaatcttctcacttgtccctttgtctgccaacctgtgtgccttttttgtaaaacattttcatgtctttaaaatgcctgttgaatacctggagtttagtatcaacttctacacagataagctttcaaagttgacaaacttttttgactctttctggaaaagggaaagaaaatagtcttccttctttcttgggcaatatccttcactttactacagttacttttgcaaacagacagaaaggatacacttctaaccacattttacttccttcccctgttgtccagtccaactccacagtcactcttaaaacttctctctgtttgcctgcctccaacagtacttttaactttttgctgtaaacagaataaaattgaacaaattagggggtagaaaggagcagtggtgtcgttcaccgtgagagtctgcatagaactcagcagtgtgccctgctgtgtcttggaccctgccccccacaggagttgtacagtccctggccctgttccctacctcctctcttcaccccgttaggctgttttcaatgtaatgctgccgtccttctcttgcactgccttctgcgctaacacctccattcctgtttataaccgtgtatttattacttaatgtatataatgtaatgttttgtaagttattaatttatatatctaacattgcctgccaatggtggtgttaaatttgtgtagaaaactctgcctaagagttacgactttttcttgtaatgttttgtattgtgtattatataacccaaacgtcacttagtagagacatatggcccccttggcagagaggacaggggtgggcttttgttcaaagggtctgccctttccctgcctgagttgctacttctgcacaacccctttatgaaccagttttggaaacaatattctcacattagatactaaatggtttatactgagcttttacttttgtatagcttgataggggcagggggcaatgggatgtagtttttacccaggttctatccaaatctatgtgggcatgagttgggttataactggatcctactatcattgtggctttggttcaaaaggaaacactacatttgctcacagatgattcttctgaatgctcccgaactactgactttgaagaggtagcctcctgcctgccattaagcaggaatgtcatgttccagttcattacaaaagaaaacaataaaacaatgtgaatttttataataaaatgtgaactgatgtagcaaattacgcaaatgtgaagcctcttctgataacacttgttaggcctcttactgatgtcagtttcagtttgtaaaatatgtttcatgctttcagttcagcattgtgactcagtaattacagaaaatggcacaaatgtgcatgaccaatgtatgtctatgaacactgcattgtttcaggtggacattttatcattttcaaatgtttctcacaatgtatgttatagtattattattatatattgtgttcaaatgcattctaaagagacttttatatgaggtgaataaagaaaagcatgattagattaaaaaaa

SEQ ID NO: 1779 - DNA, 3136 bp, Homo Sapiens
  NM_002603
ttggaaggcagctgcttgaggtccaaggcagtcagtgtcccctctcttttgcctcgggacagctggtatttatcagactcctaagaagttttccttgctccctagtagaagagagagattatgcagcgggcttttgattgatccaatgggaattacattgatctggtgtctggccttggttcttatcaagtggatcacctctaagaggcgtggagctatttcctatgacagttctgatcagactgcattatacattcgtatgctaggagatgtacgtgtaaggagccgagcaggatttgaatcagaaagaagaggttctcacccatatattgattttcgtattttccactctcaatctgaaattgaagtgtctgtctctgcaaggaatatcagaaggctactaagtttccagcgatatcttagatcttcacgcttttttcgtggtactgcggtttcaaattccctaaacattttagatgatgattataatggacaagccaagtgtatgctggaaaaagttggaaattggaattttgatatctttctatttgatagactaacaaatggaaatagtctagtaagcttaacctttcatttatttagtcttcatggattaattgagtacttccatttagatatgatgaaacttcgtagatttttagttatgattcaagaagattaccacagtcaaaatccttaccataacgcagtccacgctgcggatgttactcaggccatgcactgttacttaaaggaacctaagcttgccaattctgtaactccttgggatatcttgctgagcttaattgcagctgccactcatgatctggatcatccaggtgttaatcaacctttccttattaaaactaaccattacttggcaactttatacaagaatacctcagtactggaaaatcaccactggagatctgcagtgggcttattgagagaatcaggcttattctcacatctgccattagaaagcaggcaacaaatggagacacagataggtgctctgatactagccacagacatcagtcgccagaatgagtatctgtctttgtttaggtcccatttggatagaggtgatttatgcctagaagacaccagacacagacatttggttttacagatggctttgaaatgtgctgatatttgtaacccatgtcggacgtgggaattaagcaagcagtggagtgaaaaagtaacggaggaattcttccatcaaggagatatagaaaaaaaatatcatttgggtgtgagtccactttgcgatcgtcacactgaatctattgccaacatccagattggttttatgacttacctagtggagcctttatttacagaatgggccaggttttccaatacaaggctatcccagacaatgcttggacacgtggggctgaataaagccagctggaagggactgcagagagaacagtcgagcagtgaggacactgatgctgcatttgagttgaactcacagttattacctcaggaaaatcggttatcataacccccagaaccagtgggacaaactgcctcctggaggtttttagaaatgtgaaatggggtcttgaggtgagagaacttaactcttgactgccaaggtttccaagtgagtgatgccagccagcattatttatttccaagatttcctctgttggatcatttgaacccacttgttaattgcaagacccgaacatacagcaatatgaatttggctttcatgtgaaaccttgaatatgcaaagcccagcaggagagaatccgaaaggagtaacaaaggaagttttgatatgtgccacgactttttcaaagcatctaatcttcaaaacgtgaaacttgaattgttcagcaacaatctcttggaatttaaccagtctgatgcaacaatgtgtatcttgtaccttccactaagttctctctgagaaaatggaaatgtgaagtgcccagcctctgctgcctctggcaagacaatgtttacaaatcaactctgaaaatattggttctaaattgccttggagcatgattgtgaaggaaccactcaaacaaatttaaagatcaaactttagactgcagctctttccccctggtttgcctttttcttctttggatgccaccaaagcctcccatttgctatagttttatttcatgcactggaaactgagcatttatcgtagagtaccgccaagctttcactccagtgccgtttggcaatgcaattttttttagcaattagtttttaatttggggtgggaggggaagaacaccaatgtcctagctgtattatgattctgcagtgaagacattgcatgttgttttcactactgtacacttgacctgcacatgcgagaaaaaggtggaatgtttaaaacaccataatcagctcagggtatttgccaatctgaaataaaagtgggatgggagagtgtgtccttcagatcaagggtactaaagtccctttcgctgcagtgagtgagaggtatgttgtgtgtgaatgtacggatgtgtgtttgcgtgcatgtttgtgcatgtgtgactgtgcatgttatgtttctccatgtgggcaaagatttgaaatgtaagcttttatttattattttagaatgtgacataatgagcagccacactcgggggaggggaaggttggtaggtaagctgtaacagattgctccagttgccttaaactatgcacatagctaagtgaccaaacttcttgttttgatttgaaaaaagtgcattgttttcttgtccctccctttgatgaaacgttaccctttgacgggccttttgatgtgaacagatgttttctaggacaaactataaggactaattttaaacttcaaacattccacttttgtaatttgttttaaattgttttatgtatagtaagcacaactgtaatctagttttaagagaaaccggtgctttcttttagttcatttgtatttcccttgttactgtaaaagactgtttattaattgtttacagtttgttgcaacagccattttcttgggagaaagcttgagtgtaaagccatttgtaaaaggctttgccatactcattttaatatgtgcctgttgctgttaacttttgatgaataaaaacctatcttttcatatttttatctttga

SEQ ID NO: 1780 - DNA, 2998 bp, Homo Sapiens
  NM_002604
cgggcgtattcaatggaagtgtgttaccagctgccggtactgcccctggacaggccggtcccccagcacgtcctcagccgccgaggagccatcagcttcagctccagctccgctctcttcggctgccccaatccccggcagctctctcagaggcgtggagctatttcctatgacagttctgatcagactgcattatacattcgtatgctaggagatgtacgtgtaaggagccgagcaggatttgaatcagaaagaagaggttctcacccatatattgattttcgtattttccactctcaatctgaaattgaagtgtctgtctctgcaaggaatatcagaaggctactaagtttccagcgatatcttagatcttcacgcttttttcgtggtactgcggtttcaaattccctaaacattttagatgatgattataatggacaagccaagtgtatgctggaaaaagttggaaattggaattttgatatctttctatttgatagactaacaaatggaaatagtctagtaagcttaacctttcatttatttagtcttcatggattaattgagtacttccatttagatatgatgaaacttcgtagatttttagttatgattcaagaagattaccacagtcaaaatccttaccataacgcagtccacgctgcggatgttactcaggccatgcactgttacttaaaggaacctaagcttgccaattctgtaactccttgggatatcttgctgagcttaattgcagctgccactcatgatctggatcatccaggtgttaatcaacctttccttattaaaactaaccattacttggcaactttatacaagaatacctcagtactggaaaatcaccactggagatctgcagtgggcttattgagagaatcaggcttattctcacatctgccattagaaagcaggcaacaaatggagacacagataggtgctctgatactagccacagacatcagtcgccagaatgagtatctgtctttgtttaggtcccatttggatagaggtgatttatgcctagaagacaccagacacagacatttggttttacagatggctttgaaatgtgctgatatttgtaacccatgtcggacgtgggaattaagcaagcagtggagtgaaaaagtaacggaggaattcttccatcaaggagatatagaaaaaaaatatcatttgggtgtgagtccactttgcgatcgtcacactgaatctattgccaacatccagattggtaactatacatatttagatatagctggttagaaaaatgccactgtttttatcaagaagggaaatatatttgaaatataaaatattaaaattatgctcatttctatttttaaaaataatttaagaaattttacccttgttttcccttgttatggctcttctaattctcatttaattttaggatgtaaaaagtatatttttgcagaacaggcagcagcaataacttgtttctgttcttatgtaaataagaatccattattcgctcatgtggaagcttcttttgcatcatttgggactgccatttaaaaaaggataggtaaacaaagaaatgacaaaaataaaataaataaaataaaaatggataggtggtgacccactgagcctgatcataatacgaagaccagcttctgccactgcctttccagactcttaccactgcctgttgattaaatctaactcttcaacatcctagacaggcccttataatcttgcttcaaatgctgtgcagccatcttgcctcaacttccctctcatttgcctacagcatctcgggacgcttctgtgtttcccaagtatacgctgttctttcgctctttgtgcctcgccagtgctttccatgtgcctcgtagagttatttttcttgaagaggcagctcaaatgtcaccttctccagaagctgctctccacttgctttaggcagagtcagtcacttttcttctagattccaaagtgcctgatccacttggttgtggattcctggagcctagcaccacaccagaagcacgaggcccttgagaactgtgtgttgagtgaactaataactgtattatagaaagcataatgaaaatgtcctgtgactgaagtatgtgtagcttgttgcaggagttcacaggaaagttgactaggattgagtgtgttgggctttgggtataaaggagggggattctacgggggcagtagctcaacaaggaatagagggaggagtgtaattttggtagctggtgttgaatagggcctttgagaatcagactgaacacagtgaaatatgtgcccaaagttcagaaagatgaagtttccagaaactaagaaggtagcacaatatgtggcatcatactcagaaaggaagaccatgccatggggccagaaattcagaaacgtaattcttacattgtgattgcaatggatactcatggaagaaagtgggtagtggccgatttgacttcagagtgacaggtagagaagggaagagcgtgtagaactgtggccagactttaggagtgtgagggatgctgaatctcccagagagctcacactggccaggaatgctgagagtagcagatgcttttcttttgggaggatagtaaaacaatttagaaccagatatgctttgtcttgattctcaagtagaataatcttcaaatgcaaaagaatacattagaaatggacaaaagtggccaggagcggtagctcatacttgtaacccagcactttgggaagccgaggcgggctgatcgcttgaggtcaggagttcgagaccagcctggccaaaatagtgaaactcacgtttctactaaaaatacaaaaattagctgggtgtgatggccacttgggaggctgagataggagaatcgcttgaacctgggaggcagaggttgcagtgagccaatatcgtgccactgcattccagcctgggtgacagaatgaaactccatcactccatctcaaaaaaaaaaaaaaaaaaaaa

SEQ ID NO: 1781 - DNA, 1552 bp, Homo Sapiens
  NM_002615
ggtcgctttaagaaaggagtagctgtaatctgaagcctgctggacgctggattagaaggcagcaaaaaaagctctgtgctggctggagccccctcagtgtgcaggcttagagggactaggctgggtgtggagctgcagcgtatccacaggccccaggatgcaggccctggtgctactcctctgcattggagccctcctcgggcacagcagctgccagaaccctgccagccccccggaggagggctccccagaccccgacagcacaggggcgctggtggaggaggaggatcctttcttcaaagtccccgtgaacaagctggcagcggctgtctccaacttcggctatgacctgtaccgggtgcgatccagcacgagccccacgaccaacgtgctcctgtctcctctcagtgtggccacggccctctcggccctctcgctgggagcggagcagcgaacagaatccatcattcaccgggctctctactatgacttgatcagcagcccagacatccatggtacctataaggagctccttgacacggtcactgccccccagaagaacctcaagagtgcctcccggatcgtctttgagaagaagctgcgcataaaatccagctttgtggcacctctggaaaagtcatatgggaccaggcccagagtcctgacgggcaaccctcgcttggacctgcaagagatcaacaactgggtgcaggcgcagatgaaagggaagctcgccaggtccacaaaggaaattcccgatgagatcagcattctccttctcggtgtggcgcacttcaaggggcagtgggtaacaaagtttgactccagaaagacttccctcgaggatttctacttggatgaagagaggaccgtgagggtccccatgatgtcggaccctaaggctgttttacgctatggcttggattcagatctcagctgcaagattgcccagctgcccttgaccggaagcatgagtatcatcttcttcctgcccctgaaagtgacccagaatttgaccttgatagaggagagcctcacctccgagttcattcatgacatagaccgagaactgaagaccgtgcaggcggtcctcactgtccccaagctgaagctgagttatgaaggcgaagtcaccaagtccctgcaggagatgaagctgcaatccttgtttgattcaccagactttagcaagatcacaggcaaacccatcaagctgactcaggtggaacaccgggctggctttgagtggaacgaggatggggcgggaaccacccccagcccagggctgcagcctgcccacctcaccttcccgctggactatcaccttaaccagcctttcatcttcgtactgagggacacagacacaggggcccttctcttcattggcaagattctggaccccaggggcccctaatatcccagtttaatattccaataccctagaagaaaacccgagggacagcagattccacaggacacgaaggctgcccctgtaaggtttcaatgcatacaataaaagagctttatccctaaaaaaaaaaaaaaaaaaaaa

SEQ ID NO: 1782 - DNA, 1324 bp, Homo Sapiens
  NM_002622
cccactgcgcaggcgcttacagtgcaccaagatggccgcccccgtggatctagagctgaagaaggccttcacagagcttcaagccaaagttattgacactcaacagaaggtgaagctcgcagacatacagattgaacagctaaacagaacgaaaaagcatgcacatcttacagatacagagatcatgactttggtagatgagactaacatgtatgaaggtgtaggaagaatgtttattcttcagtccaaggaagcaattcacagtcagctgttagagaagcagaaaatagcagaagaaaaaattaaagaactagaacagaaaaagtcctacctggagcgaagcgttaaggaagctgaggacaacatccgggagatgctgatggcacgaagggcccagtagggagcctctctgggaagctcttcctcctgcccctcccattcctggtgggggcagaggagtgtctgcagggaaacagcttctcctctgccccgatggatgctttatttggatggcctggcaacatcacattttctgcatcaccctgagccccatttgcttcccagccctggagtttttacccggctttgcctgccacctctgcccaggacactcttccctctcgggatgtgtgatgaactcccaggagagggaagatgggagccagggcaagataggaagctctgcctgagctttccactaggcacgccagccagaccaataaaaagcgtctgtcccactctgctaagcctggttttcttgagcagagggatggaacagagggtgagagaggcagtggccgtctccacctcagctcctgctccctctgcatcagagcccttcctttcttgggggatgggccttgccctcttctcttttcccttcctgtacctttgactaacgctcagcttccgggcctgcatgcagtagacagaagaggaagaaagaacagatgttcacagctgaatctcagtgaacagaatagcagtccctggatggcagtctgcctaaagattcctttccctgccttctcccatacattccaaaaggaagttcaacagtaagcagcacctccaagactgtctccttttggccaatatcataagatggacgccataatcctgaggcctcctagaggctgagggggcaacggtgtgatccagctggctcatcccagcccaggtgggccaattattcaattttcaagaattttgttgcaagccagttgtcaaacacagccattataattatgtaaatttgcaaattatgttaaaaacaaggacaataaatattcaaaatgcatccctaattactacatttgaccac

SEQ ID NO: 1783 - DNA, 743 bp, Homo Sapiens
  NM_002624
gaggatcatagagctgtctggcgcagcgaggcctcccggcgccaccgagacgcgcagaggacggctagagcgttgctcgccgagagacttcctcttcgttaagtcggccttcccaacatggcgcagtctattaacatcacggagctgaatctgccgcagctagaaatgctcaagaaccagctggaccaggaagtggagttcttgtccacgtccattgctcagctcaaagtggtacagaccaagtatgtggaagccaaggactgtctgaacgtgctgaacaagagcaacgaggggaaagaattactcgtcccactgacgagttctatgtatgtccctgggaagctgcatgatgtggaacacgtgctcatcgatgtgggaactgggtactatgtagagaagacagctgaggatgccaaggacttcttcaagaggaagatagattttctaaccaagcagatggagaaaatccaaccagctcttcaggagaagcacgccatgaaacaggccgtcatggaaatgatgagtcagaagattcagcagctcacagccctgggggcagctcaggctactgctaaggcctgagagtttttgcagaaatggggcagagggacaccctttgggcgtggcttcctggtgatgggaagggtcttgtgttttaatgccaataaatgtgccagctgggcagaaaaaaaaaaaaaaaaaaaaaaaaaaaaaaaaaaaaaaaaaaaaaaaaaaaaaaaaaa

SEQ ID NO: 1784 - DNA, 2924 bp, Homo Sapiens
  NM_002626
gacggcgacgcggcgcaggcggcgggagtgcgagctgggcccgtgtttcggccgccgccatggccgcggtggacctggagaagctgcgggcgtcgggcgcgggcaaggccatcggcgtcctgaccagcggcggcgacgcgcaaggcatgaacgctgctgtccgggctgtgacgcgcatgggcatttatgtgggtgccaaagtcttcctcatctacgagggctatgagggcctcgtggagggaggtgagaacatcaagcaggccaactggctgagcgtctccaacatcatccagctgggcggcactatcattggcagcgctcgctgcaaggcctttaccaccagggaggggcgccgggcagcggcctacaacctggtccagcacggcatcaccaacctgtgcgtcatcggcggggatggcagcctcacaggtgccaacatcttccgcagcgagtggggcagcctgctggaggagctggtggcggaaggtaagatctcagagactacagcccggacctactcgcacctgaacatcgcgggcctagtgggctccatcgataacgacttctgcggcaccgacatgaccatcggcacggactcggccctccaccgcatcatggaggtcatcgatgccatcaccaccactgcccagagccaccagaggaccttcgtgctggaagtgatgggccggcactgcgggtacctggcgctggtatctgcactggcctcaggggccgactggctgttcatccccgaggctccacccgaggacggctgggagaacttcatgtgtgagaggctgggtgagactcggagccgtgggtcccgactgaacatcatcatcatcgctgagggtgccattgaccgcaacgggaagcccatctcgtccagctacgtgaaggacctggtggttcagaggctgggcttcgacacccgtgtaactgtgctgggccacgtgcagcggggagggacgccctctgccttcgaccggatcctgagcagcaagatgggcatggaggcggtgatggcgctgctggaagccacgcctgacacgccggcctgcgtggtcaccctctcggggaaccagtcagtgcggctgcccctcatggagtgcgtgcagatgaccaaggaagtgcagaaagccatggatgacaagaggtttgacgaggccacccagctccgtggtgggagcttcgagaacaactggaacatttacaagctcctcgcccaccagaagccccccaaggagaagtctaacttctccctggccatcctgaatgtgggggccccggcggctggcatgaatgcggccgtgcgctcggcggtgcggaccggcatctcccatggacacacagtatacgtggtgcacgatggcttcgaaggcctagccaagggtcaggtgcaagaagtaggctggcacgacgtggccggctggttggggcgtggtggctccatgctggggaccaagaggaccctgcccaagggccagctggagtccattgtggagaacatccgcatctatggtattcacgccctgctggtggtcggtgggtttgaggcctatgaaggggtgctgcagctggtggaggctcgcgggcgctacgaggagctctgcatcgtcatgtgtgtcatcccagccaccatcagcaacaacgtccctggcaccgacttcagcctgggctccgacactgctgtaaatgccgccatggagagctgtgaccgcatcaaacagtctgcctcggggaccaagcgccgtgtgttcatcgtggagaccatggggggttactgtggctacctggccaccgtgactggcattgctgtgggggccgacgccgcctacgtcttcgaggaccctttcaacatccacgacttaaaggtcaacgtggagcacatgacggagaagatgaagacagacattcagaggggcctggtgctgcggaacgagaagtgccatgactactacaccacggagttcctgtacaacctgtactcatcagagggcaagggcgtcttcgactgcaggaccaatgtcctgggccacctgcagcagggtggcgctccaaccccctttgaccggaactatgggaccaagctgggggtgaaggccatgctgtggttgtcggagaagctgcgcgaggtttaccgcaagggacgggtgttcgccaatgccccagactcggcctgcgtgatcggcctgaagaagaaggcggtggccttcagccccgtcactgagctcaagaaagacactgatttcgagcaccgcatgccacgggagcagtggtggctgagcctgcggctcatgctgaagatgctggcacaataccgcatcagtatggccgcctacgtgtcaggggagctggagcacgtgacccgccgcaccctgagcatggacaagggcttctgaggccagccatgcccacgcccctccccagcccccacccatgccagcgcagcgccagggctcagatggggcctgggctgttgtgtctggagcctgcaggcaggtgggggctgcgtccctgctcagcccatcccctgcctctatccctggccacctgccaggcctccctcgggctggtgtcttgagaccagcctgccaggccctccagcaggaggacagagtgccctggggcatccaccttcctgcccaggggacgtggcgctgtcggtgtttggaggctgctgccccctggctttggcgccccatgggccctcagcgtctccccatgctgggctcactacatgggccagcccttgctctacctggccggtaggctgctggcgcctaggttgtgttgagagggggatgcccctggccctgcctcactgtgacctgctcctgcccacgtgcagcacctgtcaccttttctagaaataaaatcaccctgactgtggggtgcatcggtctccggagaaaacaaaaaaa

SEQ ID NO: 1785 - DNA, 2628 bp, Homo Sapiens
  NM_002627
gcacccggacgtgcggctcccctcggcctcctcgccatggacgcggacgactcccgggcccccaagggctccttgcggaagttcctggagcacctctccggggccggcaaggccatcggcgtgctgaccagcggcggggatgctcaaggtatgaacgctgccgtccgtgccgtggtgcgcatgggtatctacgtgggggccaaggtgtacttcatctacgagggctaccagggcatggtggacggaggctcaaacatcgcagaggccgactgggagagtgtctccagcatcctgcaagtgggcgggacgatcattggcagtgcgcggtgccaggccttccgcacgcgggaaggccgcctgaaggctgcttgcaacctgctgcagcgcggcatcaccaacctgtgtgtgatcggcggggacgggagcctcaccggggccaacctcttccggaaggagtggagtgggctgctggaggagctggccaggaacggccagatcgataaggaggccgtgcagaagtacgcctacctcaacgtggtgggcatggtgggctccatcgacaatgatttctgcggcaccgacatgaccatcggcacggactccgccctgcacaggatcatcgaggtcgtcgacgccatcatgaccacggcccagagccaccagaggaccttcgttctggaggtgatgggacgacactgtgggtacctggccctggtgagtgccttggcctgcggtgcggactgggtgttccttccagaatctccaccagaggaaggctgggaggagcagatgtgtgtcaaactctcggagaaccgtgcccggaaaaaaaggctgaatattattattgtggctgaaggagcaattgatacccaaaataaacccatcacctctgagaaaatcaaagagcttgtcgtcacgcagctgggctatgacacacgtgtgaccatcctcgggcacgtgcagagaggagggaccccttcggcattcgacaggatcttggccagccgcatgggagtggaggcagtcatcgccttgctagaggccaccccggacaccccagcttgcgtcgtgtcactgaacgggaaccacgccgtgcgcctgccgctgatggagtgcgtgcagatgactcaggatgtgcagaaggcgatggacgagaggagatttcaagatgcggttcgactccgagggaggagctttgcgggcaacctgaacacctacaagcgacttgccatcaagctgccggatgatcagatcccaaagaccaattgcaacgtagctgtcatcaacgtgggggcacccgcggctgggatgaacgcagccgtacgctcagctgtgcgcgtgggcattgccgacggccacaggatgctcgccatctatgatggctttgacggcttcgccaagggccagatcaaagaaatcggctggacagatgtcgggggctggaccggccaaggaggctccattcttgggacaaaacgcgttctcccggggaagtacttggaagagatcgccacacagatgcgcacgcacagcatcaacgcgctgctgatcatcggtggattcgaggcctacctgggactcctggagctgtcagccgcccgggagaagcacgaggagttctgtgtccccatggtcatggttcccgctactgtgtccaacaatgtgccgggttccgatttcagcatcggggcagacaccgccctgaacactatcaccgacacctgcgaccgcatcaagcagtccgccagcggaaccaagcggcgcgtgttcatcatcgagaccatgggcggctactgtggctacctggccaacatgggggggctcgcggccggagctgatgccgcatacattttcgaagagcccttcgacatcagggatctgcagtccaacgtggagcacctgacggagaaaatgaagaccaccatccagagaggccttgtgctcagaaatgagagctgcagtgaaaactacaccaccgacttcatttaccagctgtattcagaagagggcaaaggcgtgtttgactgcaggaagaacgtgctgggtcacatgcagcagggtggggcaccctctccatttgatagaaactttggaaccaaaatctctgccagagctatggagtggatcactgcaaaactcaaggaggcccggggcagaggaaaaaaatttaccaccgatgattccatttgtgtgctgggaataagcaaaagaaacgttatttttcaacctgtggcagagctgaagaagcaaacggattttgagcacaggattcccaaagaacagtggtggctcaagctacggcccctcatgaaaatcctggccaagtacaaggccagctatgacgtgtcggactcaggccagctggaacatgtgcagccctggagtgtctgacccagtcccgcctgcatgtgcctgcagccaccgtggactgtctgtttttgtaacacttaagttattttatcagcactttatgcacgtattattgacattaatacctaatcggcgagtgcccatctgccccacctgctccagtgcgtgctgtctgtggagtgtgtctcatgctttcagatgtgcatatgagcagaattaattaaacatttgcctatgactccaacaaaaaaaaaaaaa

SEQ ID NO: 1786 - DNA, 1937 bp, Homo Sapiens
  NM_002631
ggccgcagtttctggagggagccgctgcgggtctttccctcactcgtcctccgcgcgtcgccgctcttcggttctgctctgtccgccgccatggcccaagctgacatcgcgctgatcggattggccgtcatgggccagaacttaattctgaacatgaatgaccacggctttgtggtctgtgcttttaataggactgtctccaaagttgatgatttcttggccaatgaggcaaagggaaccaaagtggtgggtgcccagtccctgaaagagatggtctccaagctgaagaagccccggcggatcatcctcctggtgaaggctgggcaagctgtggatgatttcatcgagaaattggtaccattgttggatactggtgacatcatcattgacggaggaaattctgaatatagggacaccacaagacggtgccgagacctcaaggccaagggaattttatttgtggggagcggagtcagtggtggagaggaaggggcccggtatggcccatcgctcatgccaggagggaacaaagaagcgtggccccacatcaagaccatcttccaaggcattgctgcaaaagtgggaactggagaaccctgctgtgactgggtgggagatgagggagcaggccacttcgtgaagatggtgcacaacgggatagagtatggggacatgcagctgatctgtgaggcataccacctgatgaaagacgtgctgggcatggcgcaggacgagatggcccaggcctttgaggattggaataagacagagctagactcattcctgattgaaatcacagccaatattctcaagttccaagacaccgatggcaaacacctgctgccaaagatcagggacagcgcggggcagaagggcacagggaagtggaccgccatctccgccctggaatacggcgtacccgtcaccctcattggagaagctgtctttgctcggtgcttatcatctctgaaggatgagagaattcaagctagcaaaaagctgaagggtccccagaagttccagtttgatggtgataagaaatcattcctggaggacattcggaaggcactctacgcttccaagatcatctcttacgctcaaggctttatgctgctaaggcaggcagccaccgagtttggctggactctcaattatggtggcatcgccctgatgtggagagggggctgcatcattagaagtgtattcctaggaaagataaaggatgcatttgatcgaaacccggaacttcagaacctcctactggacgacttctttaagtcagctgttgaaaactgccaggactcctggcggcgggcagtcagcactggggtccaggctggcattcccatgccctgttttaccactgccctctccttctatgacgggtacagacatgagatgcttccagccagcctcatccaggctcagcgggattacttcggggctcacacctatgaactcttggccaaaccagggcagtttatccacaccaactggacaggccatggtggcaccgtgtcatcctcgtcatacaatgcctgatcatgctgctcctgtcaccctccacgattccacagaccaggacattccatgtgcctcatggcactgccacctggccctttgccctattttctgttcagttttttaaaagtgttgtaagagactcctgaggaagacacacagtttatttgtaaagtagctctgtgagagccaccatgccctctgcccttgcctcttgggactgaccaggagctgctcatgtgcgtgagagtgggaaccatctccttgcggcagtggcttccgcgtgccccgtgtgctggtgcggttcccatcacgcagacaggaagggtgtttgcgcactctgatcaactggaacctctgtatcatgcggctgaattccctttttcctttactcaataaaagctacatcacactga

SEQ ID NO: 1787 - DNA, 2487 bp, Homo Sapiens
  NM_002633
cctttcccctcccgccggacctgccaggaggtgggctggcgcggagggagggccctgtcccctgtccctttaaggaggagggccaaacgccggcctagagtgcggcgtagcccccacccgccgtgccctcaccccagagcagctgcagcctcagccggccgcccctccgccagccaagtccgccgctctgacccccggcagcaagtcgccaccatggtgaagatcgtgacagttaagacccaggcgtaccaggaccagaagccgggcacgagcgggctgcggaagcgggtgaaggtgttccagagcagcgccaactacgcggagaacttcatccagagtatcatctccaccgtggagccggcgcagcggcaggaggccacgctggtggtgggcggggacggccggttctacatgaaggaggccatccagctcatcgctcgcatcgctgccgccaacgggatcggtcgcttggttatcggacagaatggaatcctctccacccctgctgtatcctgcatcattagaaaaatcaaagccattggtgggatcattctgacagccagtcacaacccagggggccccaatggagattttggaatcaaattcaatatttctaatggaggtcctgctccagaagcaataactgataaaattttccaaatcagcaagacaattgaagaatatgcagtttgccctgacctgaaagtagaccttggtgttctgggaaagcagcagtttgacttggaaaataagttcaaacccttcacagtggaaattgtggattcggtagaagcttatgctacaatgctgagaagcatctttgatttcagtgcactgaaagaactactttctgggccaaaccgactgaagatccgtattgatgctatgcatggagttgtgggaccgtatgtaaagaagatcctctgtgaagaactcggtgcccctgcgaactcggcagttaactgcgttcctctggaggactttggaggccaccaccctgaccccaacctcacctatgcagctgacctggtggagaccatgaagtcaggagagcatgattttggggctgcctttgatggagatggggatcgaaacatgattctgggcaagcatgggttctttgtgaacccttcagactctgtggctgtcattgctgccaacatcttcagcattccgtatttccagcagactggggtccgcggctttgcacggagcatgcccacgagtggtgctctggaccgggtggctagtgctacaaagattgctttgtatgagaccccaactggctggaagttttttgggaatttgatggacgcgagcaaactgtccctttgtggggaggagagcttcgggaccggttctgaccacatccgtgagaaagatggactgtgggctgtccttgcctggctctccatcctagccacccgcaagcagagtgtggaggacattctcaaagatcattggcaaaagtatggccggaatttcttcaccaggtatgattacgaggaggtggaagctgagggcgcaaacaaaatgatgaaggacttggaggccctgatgtttgatcgctcctttgtggggaagcagttctcagcaaatgacaaagtttacactgtggagaaggccgataactttgaatacagcgacccagtggatggaagcatttcaagaaatcagggcttgcgcctcattttcacagatggttctcgaatcgtcttccgactgagcggcactgggagtgccggggccaccattcggctgtacatcgatagctatgagaaggacgttgccaagattaaccaggacccccaggtcatgttggccccccttatttccattgctctgaaagtgtcccagctgcaggagaggacgggacgcactgcacccactgtcatcacctaagaagacaggcctgatgtggtacgtccctccacccccggacccatccaagtcatctgattgaagagcatgacagaaacaaaatgtattcaccaagcattttaggatttgactttttcactaaccagttgacgagcagtgcatttacaaggcactgccaaacaagatgcccttgggagctgtgagggaaagaggacctgcgggcttagatcaatctcaattccttttcatgccctcctgcattgctgctgcgtgggtatttgtctccttagccatcaggtacagtttacactacaatgtaagctataggtggagcatcagcagtgagtgaggccattcttcatccttaggatgtggcaatgaaatgatggtgcaagttcctttctcttttgtgaatctttccccccatttcctgtttacatgtaacccaacaaaatgcaatttctagtgccttctgtccaatcagttctttcctctgagtgagacgtacttggctacagatttctgccttgttttgcgacattgtcccattcacacagatattttgggataataaaggaaaataagctacaaaaaaaaaaaaaaaaa

SEQ ID NO: 1788 - DNA, 1826 bp, Homo Sapiens
  NM_002634
agtatgtgtggttggggaattcatgtggaggtcagagtggaagcaggtgtgagagggtccagcagaaggaaacatggctgccaaagtgtttgagtccattggcaagtttggcctggccttagctgttgcaggaggcgtggtgaactctgccttatataatgtggatgctgggcacagagctgtcatctttgaccgattccgtggagtgcaggacattgtggtaggggaagggactcattttctcatcccgtgggtacagaaaccaattatctttgactgccgttctcgaccacgtaatgtgccagtcatcactggtagcaaagatttacagaatgtcaacatcacactgcgcatcctcttccggcctgtcgccagccagcttcctcgcatcttcaccagcatcggagaggactatgatgagcgtgtgctgccgtccatcacaactgagatcctcaagtcagtggtggctcgctttgatgctggagaactaatcacccagagagagctggtctccaggcaggtgagcgacgaccttacagagcgagccgccacctttgggctcatcctggatgacgtgtccttgacacatctgaccttcgggaaggagttcacagaagcggtggaagccaaacaggtggctcagcaggaagcagagagggccagatttgtggtggaaaaggctgagcaacagaaaaaggcggccatcatctctgctgagggcgactccaaggcagctgagctgattgccaactcactggccactgcaggggatggcctgatcgagctgcgcaagctggaagctgcagaggacatcgcgtaccagctctcacgctctcggaacatcacctacctgccagcggggcagtccgtgctcctccagctgccccagtgagggcccaccctgcctgcacctccgcgggctgactgggccacagccccgatgattcttaacacagccttccttctgctcccaccccagaaatcactgtgaaatttcatgattggcttaaagtgaaggaaataaaggtaaaatcacttcagatctctaattagtctatcaaatgaaactctttcattcttctcacatccatctacttttttatccacctccctaccaaaaattgccaagtgcctatgcaaaccagctttaggtcccaattcggggcctgctggagttccggcctgggcaccagcatttggcagcacgcaggcggggcagtatgtgatggactggggagcacaggtgtctgcctagatccacgtgtggcctccgtcctgtcactgatggaaggtttgcggatgagggcatgtgcggctgaactgagaaggcaggcctccgtcttcccagcggttcctgtgcagatgctgctgaagagaggtgccggggaggggcagagaggaagtggtctgtctgttaccataagtctgattctctttaactgtgtgaccagcggaaacaggtgtgtgtgaactgggcacagattgaagaatctgcccctgttgaggtgggtgggcctgactgttgccccccagggtcctaaaacttggatggacttgtatagtgagagaggaggcctggaccgagatgtgagtcctgttgaagacttcctctctaccccccaccttggtccctctcagatacccagtggaattccaacttgaaggattgcatcctgctggggctgaacatgcctgccaaagacgtgtccgacctacgttcctggccccctcgttcagagactgcccttctcacgggctctatgcctgcactgggaaggaaacaaatgtgtataaactgctgtcaataaatgacacccagaccttcc

SEQ ID NO: 1789 - DNA, 1685 bp, Homo Sapiens
  NM_002635
gtgtgcgtcacgccgacgacgcgcgaagggcacacatcttaggacccggaggacgtccggcctctgtgagccgcaacctttccaagggagtggttgtgtgatcgccatcttagggaaaagatgttctcgtccgtggcgcacctggcgcgggcgaaccccttcaacacgccacatctgcagctggtgcacgatggtctcggggacctccgcagcagctccccagggcccacgggccagccccgccgccctcgcaacctggcagccgccgccgtggaagagtacagttgtgaatttggctccgcgaagtattatgcactgtgtggctttggtggggtcttaagttgtggtctgacacacactgctgtggttcccctggatttagtgaaatgccgtatgcaggtggacccccaaaagtacaagggcatatttaacggattctcagttacacttaaagaggatggtgttcgtggtttggctaaaggatgggctccgactttccttggctactccatgcagggactctgcaagtttggcttttatgaagtctttaaagtcttgtatagcaatatgcttggagaggagaatacttatctctggcgcacatcactatatttggctgcctctgccagtgctgaattctttgctgacattgccctggctcctatggaagctgctaaggttcgaattcaaacccagccaggttatgccaacactttgagggatgcagctcccaaaatgtataaggaagaaggcctaaaagcattctacaagggggttgctcctctctggatgagacagataccatacaccatgatgaagttcgcctgctttgaacgtactgttgaagcactgtacaagtttgtggttcctaagccccgcagtgaatgttcaaagccagagcagctggttgtaacatttgtagcaggttacatagctggagtcttttgtgcaattgtttctcaccctgctgattctgtggtatctgtgttgaataaagaaaaaggtagcagtgcttctctggtcctcaagagacttggatttaaaggtgtatggaagggactgtttgcccgtatcatcatgattggtaccctgactgcactacagtggtttatctatgactccgtgaaggtctacttcagacttcctcgccctcctccacccgagatgccagagtctctgaagaagaagcttgggttaactcagtagttagatcaaagcaaatgtggactgaatctgcttgttgatcagtgttgaagaaagtgcaaaaggaacttttatatatttgacagtgtaggaaattgtctattcctgatataattactgtagtactcttgcttaaggcaagagtttcagatttactgttgaaataaacccaactcttcatgatttgcctgtgacttatttttaaaacttttttaaaaaagatttagctttaaaatagttggaaagaatgaagtatataagttaaggaaaaaatacaaaactgaccatgaccattgttggttgaatattccagttgctattcagaaattgtcatatgtctcaagttttatcacacaaagttcctgtatttctagggaagcagactttaaatttctaaaaacttgatttaattatagttaaatatgtgtagtcatttgtggttattttggcaagtaaatgtcagtgtatacttacaaaaaaaa

SEQ ID NO: 1790 - DNA, 2206 bp, Homo Sapiens
  NM_002636
ctccctcccccccgccgcctcctcctcctgccgctgccgctgctttggctgctgcgtcatacgccccagagccgccgggacggaggggctgggcctggggaccccccggcctccgcctgcacgcccccccacgcccggacgtgccctctccgcgcgggggactcgcctaggtctcctacgtctgcccctgcccggctcccggcggccccagctgtcaccggcccccccaggatgcaatggcgcagcccccccggctgagccgctctggtgcctcctcactttgggacccagcttctcctgctcccacctctggccccaggcctcggctttgggagggtcaagatgtgctggccagatggactgatgggctgctatacttgggtaccatcaaaaaggtggacagtgctagggaggtgtgtctggtccagtttgaggatgattcgcagtttctggttctatggaaagacattagccctgctgccctccctggagaggaactcctctgttgtgtctgtcgctctgagactgtggtccctgggaaccggctggtcagctgtgagaagtgtcgccatgcttatcaccaggactgccatgttcccagggctccagcccctggagagggagagggcacatcctgggtatgccgccagtgtgtctttgcgatcgccaccaagaggggaggtgccctgaagaagggcccctatgcccgggccatgctgggtatgaagctttctctgccatatggactgaaggggctggactgggatgctggacatctgagcaaccgacagcagagttactgttactgtggtggccctggggagtggaacctgaaaatgctgcagtgccggagctgcctgcagtggttccatgaggcctgcacccagtgtctgagcaagcccctcctctatggggacaggttctatgaatttgaatgctgtgtgtgtcgcgggggccctgagaaagtccggagactacagcttcgctgggtggatgtggcccatcttgtcctgtatcacctcagtgtttgctgtaagaagaaatactttgattttgatcgtgagatcctccccttcacttctgagaattgggacagtttgctcctgggggagctttcagacacccccaaaggagaacgttcttccaagctcctctctgctcttaacagccacaaggaccgtttcatttcagggagagagattaagaagaggaaatgtttgtttggtctccatgctcggatgcctccccctgtggagccccctactggagatggagcactcaccagggcagggccctgggggaggggtctcacgtcccctggggaagcgccggaggccggagccagagcccctgaggaggaggcagaaggggaaagtggaggagctggggccaccctcagcagtgcgcaatcagcccgagccccaggagcagagggagcgggctcatctgcagagggcactgcagcagccccatccggatgtttgcttccttccacccttctgccagcaccgcagggacctctggggacagtggacccccagacaggtcacccctggaacttcacattggtttccccacagacatccctaaaagtgccccccactcgatgactgcctcatcttcctcagtttcatccccatccccaggtcttcctagacgctcagcacccccttctcccctgtgccgtagtttgtctcctgggactgggggaggagtccgaggtggggttggttacctgtcccgaggggaccctgtccgggtccttgctcggagagtacggcctgatggctctgtgcagtacctggttgagtggggaggagggggcatcttctgaacagcctgcctctgcccagctccccattcacacacaccggcactttcataccctgacctctgacctcacctacagctgggatgtacctggagagatagggggtagttctccctactgcccaggctggaatccaagagtggggagtggggaagaggccctcttctctaccctccttcatgattcctgacccctcccatccttcccatttcctttgatgttattttgttacagctttttaaatattttttaaaattatttaacccctgggggcagagactgaggagggaggatgataagggatcccggactctgtatgattgaaataaagagaaataaacaaatctagcagctctgaaaaaaaaaaaaaaaaaa

SEQ ID NO: 1791 - DNA, 3390 bp, Homo Sapiens
  NM_002640
caagccagagcaatcgaacggttctgagtcatctgccggaagccttgccctcaatcaaggcggacgtgaagcatctacaaaggaggaatagtcaaagcagcagcggcggcggcggcggcggcagcagcagcagcagcaggagaccttctctgatggatgacctctgtgaagcaaatggcacttttgccatcagcttatttaaaatattgggggaagaggacaactcaagaaacgtattcttctctcccatgagcatctcctctgccctggccatggtcttcatgggggcaaagggaagcactgcagcccagatgtcccaggcactttgtttatacaaagacggagatattcaccgaggtttccagtcacttctcagtgaagttaacagaactggcactcagtacttgcttagaactgccaacagactctttggagaaaagacgtgtgatttccttccagactttaaagaatactgtcagaagttctatcaggcagagctggaggagttgtcctttgctgaagacactgaagagtgcaggaagcatataaatgactgggtggcagagaagactgaaggtaagatttcagaggtactggatgctgggacagtcgatcccctgacaaagctggtccttgtgaatgccatttatttcaagggaaagtggaatgagcaatttgacagaaagtacacaaggggaatgctctttaaaaccaacgaggaaaaaaagacagtgcagatgatgtttaaggaagctaagtttaaaatggggtatgcggatgaggtacacacccaggtcctggagctgccctatgtggaagaggagctgagcatggtcattctgcttcccgatgacaacacggacctcgccgtggtggaaaaagcacttacatatgagaaattcaaagcctggacaaattcagaaaagttgacaaaaagtaaggttcaagttttccttcccagattaaagctggaggagagttatgacttggagcctttccttcgaagattaggaatgatcgatgcttttgacgaagccaaggcagacttttctggaatgtcaactgagaagaatgtgcctctgtccaaggttgcccacaagtgcttcgtggaggtcaatgaggaaggcacagaggctgccgcagccactgctgtggtcaggaattcccggtgcagcagaatggagccaagattctgtgcagaccacccttttcttttcttcatcaggcaccacaaaaccaactgcatcttgttctgtggcaggttctcttctccgtaaagaggagcaattgctgtacataccctcctttccttctacctatcttgccttaattaacattccctgtgacctagttggtgcagtggcttgaatgccaaaataaagcgtgtgcactggatagtgtgtgaaagtctttgctgaaagttccagagccattgagaataactgaggccgcagatgcatgaaatttgggcctgggaaggctatgctggttttggagtgtttggggtgcctgccattgcctctgccttcacctaagtctgtgcccattgtttcaggggatcttatggagcatctcagggcttcaggagccagccctcttccatccgcccggctctgcccaccaccactgccaggctgaacaggggactagtgcccaggtgacactgcacacaaagccaagggcaaaccctatagagtaaagctgcagccaccctgtgtctcatgtgcagctgaaatagtgatctgcttctgtcactgtcacatagacagccctgcatgccccctgtctcacacagtttgtaatgaagacagctccttctcatctttccataagcctgagatacaagttcagggactcagcaatgcactttaggactgagctaggaggcaaatatctgaagcttgctatgctgttctttccattccttttccctctgaaacacacaaaataccaaaggaacttacgcaacacaccactgagtcctctaactaatcatatgtgctcagacacagctcaagcacaccccttagttaagaaagaacctccatatacattaatttttttctgcctaaaaataaaattgcgttgtggcagcaatttggaaactacagcaaagtctccaaaaaaattgaagtcacccacaattccaacacacagcaatcactgctgttaatagtgatatacatccttccctattatgtgtatgcaaatagaaatttataagcattttactacaagttaatcatatccttcagtagcttatttcttcccttatgaaaaacctcccttaagatctttccaggtcatcaatttgatgtgcatagtattccactgtgtggctggatttctataattgaatctaattttagacagtttgagtaattaaaattatttctattaacaaataatagattgctaataatatatattatgctgttttggatatactaaatatttgctcacatccttaatatattttttaaaattcctaacaatagtactgttgagataaaagttgagcacattttgagacttcttccaaattggtccctagaaagttacactggtttgtactctcacttatgtcactgtttataccaccactgactgctgcctgctttattatttctttaatgagttggactgaacagtggttaatcctgactctgtttttgactgacagttaacagttacatgaaccattcatattacagctcttacttaaatttgaccaagccaggatatatctgttaggccacattcatttagggatcatgttttccaaagcaggtttgggcaaaattaatccacaggactgaaaggtatacatctgtgagttttgttctcacttccacctctaatttgaagaacactttaattgacacagaatacatttcacatatttaacctctacaataagttctgacacattttccatgaaacaaaccatcgctatattcaagataatgaacctatctatcatactcccaaattccttcttgcatctttgtaatttctcactcttccttctccctctccccgtcccatcccaaccactgatctgctcaggcaactaccaatcttctttctgtcactatagattaatttgcatttttaaagaaatttacatacatggaaccatacatcatctatgctttgtagtatgactcctgtcactcagtacaattattttgagattcatttatgttattgtatgtatcaatagttcatcccttttattggtaagtaacatttttttgtataggtataccatgatttgttgatgaacaaatttacctgttgatgaacatttacgttgttaccaagatttttgctattgaaaataaagtttttatgaatatttatatatataaaaaaaaaaaaaaaaaa

SEQ ID NO: 1792 - DNA, 8304 bp, Homo Sapiens
  NM_002645
ggccttgctattttggaagctacaagaaaaaaatagaggaaggaaggtttggtctttttagtggacatggctcagatatctagcaacagcggatttaaagaatgtccatcttcacatccggaaccaacaagagcaaaagatgtggacaaagaagaagcattacagatggaagcagaggctttagcaaaactgcaaaaggatagacaagtgactgacaatcagagaggctttgagttgtcaagcagcaccagaaaaaaagcacaggtttataacaagcaggattatgatctcatggtgtttcctgaatcagattcccaaaaaagagcattagatattgatgtagaaaagctcacccaagctgaacttgagaaactattgctggatgacagtttcgagactaaaaaaacacctgtattaccagttactcctattctgagcccttccttttcagcacagctctattttagacctactattcagagaggacagtggccacctggattacctgggccttccacttatgctttaccttctatttatccttctacttacagtaaacaggctgcattccaaaatggcttcaatccaagaatgcccacttttccatctacagaacctatatatttaagtcttccgggacaatctccatatttctcatatcctttgacacctgccacaccctttcatccacaaggaagcttacctatctatcgtccagtagtcagtactgacatggcaaaactatttgacaaaatagctagtacatcagaatttttaaaaaatgggaaagcaaggactgatttggagataacagattcaaaagtcagcaatctacaggtatctccaaagtctgaggatatcagtaaatttgactggttagacttggatcctctaagtaagcctaaggtggataatgtggaggtattagaccatgaggaagagaaaaatgtttcaagtttgctagcaaaggatccttgggatgctgttcttcttgaagagagatcgacagcaaattgtcatcttgaaagaaaggtgaatggaaaatccctttctgtggcaactgttacaagaagccagtctttaaatattcgaacaactcagcttgcaaaagcccagggccatatatctcagaaagacccaaatgggaccagtagtttgccaactggaagttctcttcttcaagaagttgaagtacagaatgaggagatggcagctttttgtcgatccattacaaaattgaagaccaaatttccatataccaatcaccgcacaaacccaggctatttgttaagtccagtcacagcacaaagaaacatatgcggagaaaatgctagtgtgaaggtctccattgacattgaaggatttcagctaccagttacttttacgtgtgatgtgagttctactgtagaaatcattataatgcaagccctttgctgggtacatgatgacttgaatcaagtagatgttggcagctatgttctaaaagtttgtggtcaagaggaagtgctgcagaataatcattgccttggaagtcatgagcatattcaaaactgtcgaaaatgggacacagaaattagactacaactcttgaccttcagtgcaatgtgtcaaaatctggcccgaacagcagaagatgatgaaacacccgtggatttaaacaaacacctgtatcaaatagaaaaaccttgcaaagaagccatgacgagacaccctgttgaagaactcttagattcttatcacaaccaagtagaactggctcttcaaattgaaaaccaacaccgagcagtagatcaagtaattaaagctgtaagaaaaatctgtagtgctttagatggtgtcgagactcttgccattacagaatcagtaaagaagctaaagagagcagttaatcttccaaggagtaaaactgctgatgtgacttctttgtttggaggagaagacactagcaggagttcaactaggggctcacttaatcctgaaaatcctgttcaagtaagcataaaccaattaactgcagcaatttatgatcttctcagactccatgcaaattctggtaggagtcctacagactgtgcccaaagtagcaagagtgtcaaggaagcatggactacaacagagcagctccagtttactatttttgctgctcatggaatttcaagtaattgggtatcaaattatgaaaaatactacttgatatgttcactgtctcacaatggaaaggatctttttaaacctattcaatcaaagaaggttggcacttacaagaatttcttctatcttattaaatgggatgaactaatcatttttcctatccagatatcacaattgccattagaatcagttcttcaccttactctttttggaattttaaatcagagcagtggaagttcccctgattctaataagcagagaaagggaccagaagctttgggcaaagtttctttacctctttttgactttaaacggtttttaacatgtggaactaaacttctatatctttggacttcatcacatacaaattctgttcctggaacagttaccaaaaaaggatatgtcatggaaagaatagtgctacaggttgattttccttctcctgcatttgatattatttatacaactcctcaagttgacagaagcattatacagcaacataacttagaaacactagagaatgatataaaagggaaacttcttgatattcttcataaagactcatcacttggactttctaaagaagataaagcttttttatgggagaaacgttattattgcttcaaacacccaaattgtcttcctaaaatattagcaagcgccccaaactggaaatgggttaatcttgccaaaacttactcattgcttcaccagtggcctgcattgtacccactaattgcattggaacttcttgattcaaaatttgctgatcaggaagtaagatccctagctgtgacctggattgaggccattagtgatgatgagctaacagatcttcttccacagtttgtacaagctttgaaatatgaaatttacttgaatagttcattagtgcaattccttttgtccagggcattgggaaatatccagatagcacacaatttatattggcttctcaaagatgccctgcatgatgtacagtttagtacccgatacgaacatgttttgggtgctctcctgtcagtaggaggaaaacgacttagagaagaacttctaaaacagacgaaacttgtacagcttttaggaggagtagcagaaaaagtaaggcaggctagtggatcagccagacaggttgttctccaaagaagtatggaacgagtacagtccttttttcagaaaaataaatgccgtctccctctcaagccaagtctagtggcaaaagaattaaatattaagtcgtgttccttcttcagttctaatgctgtccccctaaaagtcacaatggtgaatgctgaccctatgggagaagaaattaatgtcatgtttaaggttggtgaagatcttcggcaagatatgttagctttacagatgataaagattatggataagatctggcttaaagaaggactagatctgaggatggtaattttcaaatgtctctcaactggcagagatcgaggcatggtggagctggttcctgcttccgataccctcaggaaaatccaagtggaatatggtgtgacaggatcctttaaagataaaccacttgcagagtggctaaggaaatacaatccctctgaagaagaatatgaaaaggcttcagagaactttatctattcctgtgctggatgctgtgtagccacctatgttttaggcatctgtgatcgacacaatgacaatataatgcttcgaagcacgggacacatgtttcacattgactttggaaagtttttgggacatgcacagatgtttggcagcttcaaaagggatcgggctccttttgtgctgacctctgatatggcatatgtcattaatgggggtgaaaagcccaccattcgttttcagttgtttgtggacctctgctgtcaggcctacaacttgataagaaagcagacaaacctttttcttaacctcctttcactgatgattccttcagggttaccagaacttacaagtattcaagatttgaaatacgttagagatgcacttcaaccccaaactacagacgcagaagctacaattttctttactaggcttattgaatcaagtttgggaagcattgccacaaagtttaacttcttcattcacaaccttgctcagcttcgtttttctggtcttccttctaatgatgagcccatcctttcattttcacctaaaacatactcctttagacaagatggtcgaatcaaggaagtctctgtttttacatatcataagaaatacaacccagataaacattatatttatgtagtccgaattttgagggaaggacagattgaaccatcatttgtcttccgaacatttgacgaatttcaggaacttcacaataagctcagtattatttttccactttggaagttaccaggctttcctaataggatggttctaggaagaacacacataaaagatgtagcagccaaaaggaaaattgagttaaacagttacttacagagtttgatgaatgcttcaacggatgtagcagagtgtgatcttgtttgtactttcttccaccctttacttcgtgatgagaaagctgaagggatagctaggtctgcagatgcaggttccttcagtcctactccaggccaaataggaggagctgtgaaattatccatctcttaccgaaatggtactcttttcatcatggtgatgcatatcaaagatcttgttactgaagatggagctgacccaaatccatatgtcaaaacatacctacttccagataaccacaaaacatccaaacgtaaaaccaaaatttcacgaaaaacgaggaatccgacattcaatgaaatgcttgtatacagtggatatagcaaagaaaccctaagacagcgagaacttcaactaagtgtactcagtgcagaatctctgcgggagaattttttcttgggtggagtaaccctgcctttgaaagatttcaacttgagcaaagagacggttaaatggtatcagctgactgcggcaacatacttgtaaactagtgaatgtttgagctttggaagcatgaacagttataaacgtgcatgcatacatgcacacacacacagacacacacacacacacttgttaattttgtatagtatttttatacttggacagaacttataaagttaaatatacttgctgcatttcaacacatctgttggaccaacagtcacataactaacctttttgaatttttggaagccattgctgttttaaagtcattatgtagaatgctacaaaccctaaacttaatatatactaattcctgaaaaagactttgagacagtactatgtcagttcagccacctattttgcattgttttctataaggaggcaaagcatatgtgttttcctgttatgcaccttttatagcctttaccactgtgtaatgttcacaaacaccaaagtaaaggaaaaatgcaggatgttaccgtaaaatccagctgctattcatggagctgaaaaacaaagcacaaataatagatagctaagttaagaactactaagtagtttatagaagtagggaaaaacgtaatactgctttttattcatgtctttaaagcctttttcagaataagtgccaatcactgatgttgtaaataatggtgccttaactttatatgcttccctggcacttcgtttctgatttttttcctgatttgataaataattagtacatagttttcactcacttgcagcttactaaagacaagaaattatgtacatgtactaatgtttttcccacaaaaaaatcctttacttctgatgtatgaattagttatctaaatagttaagcctaatacctgaataagactcaccaatgtgattgtacaataaattctatcattccattaaaatcctacatttattcccaggaatggtaatttcacctccctacatctatactccactccctcagtaaataagtgaaaattgttaacccatgtgcccattcctgagtagggcagactcttcacaagaggcccatgacaagaattctagggtccagattgaactttaatatagacctttgtctgtgtagaccagtttgtcttgtaaactgtcttacttatgtgtgtaaacattttacattcacatgaaaagttattttcctttatataattggattcagaatcataagggacaggactgaaattattctacagtaaccagtaagaataagattcggccgggcacggtggctcctgcctgtaatcccaacactttgggaggccaaggtgggcggatcacctgaggtcaggagtttgagaccagcctggccaacatggtgaaaccccgtctctacacaaaaattagccaggcgtggtagcgggcatctgtaatcccagctacttggggggctgaggcaggagaatcgcttgaacccaggaggcggaggttgcagtgagccgagatcacgccactgcactcccgcctgggtgacaagagcaaaactccatcttaaaaaaaaagaaaaaaagagtaagattcatttttattagttactcaacttcagacacaattttgttaatttggatatatacatatatataataagaactcatggttagaatagaaatacagatactttaaaaatggtaatagaaattgtaccaatcaggttgctgtgagaaaactgacaaaatatgcaataaagaataccaagagagaaaggacaatcgccaattcagtttcccagaacagaatttttatgaactgcacaaatgtttaatgtaaatggtgatacctacagggaagaaatagaagagttgataatatatcactgggacggggtgggggaaagacttgaaatttttggtgcctaacactaatggtccatatgtagttaaacccatgagtatggtatatgaatgtcttttttaaatgttaaaatgtgttgtctatttaatgttaattaaaatgcagatcaaagcaccaccatttgctttttccacagatcattaacatttccttaaagtatgtaagtacctttgcaaatgcaaatgtactagtaattttcacttaagcttttgagaccgaattccattccaccagttatcacttagccactgtaatttaaaaacaaacaaacaaacaaaaactgtcttggtagaggtcgttaattagactcaacatgtactgcctttttgcagtctattatgacagtgtcttttagcacaaataatagagctaaaaaatgtcctgtcacttccattataagaaatctggattcatatctaagtgtatattataatactgtacagttaagagttcagaacaagtggtaatgttttctcttaatttaactcattttgtgccttctttactcattcaaacacacatacattttacatatagtttatttctttatgaaatgctaatcttcagcccgtaccaaaaagtagagtggagcctctttgcactactactatcaataaattttaaatcagttggatttttaagcattttttaaaagctgacattaaagtaaatctaaaaaaagtttaacaaactggccaagacactaatttttatgtataatcacaatattttatactcacctttattgactaaaaataattatgctacatgttgtcctgcatcagaagaattatttcttcttgccagtgttttgggatttgaagataatggttcactcaaagaacctattattttctctactgaggaacccaatgtagaacttgcactgatatttttattactgcctttatatgaatctataggtatctaaatgttaaggcatgtatgatctttgatcatttcttttttcaaattaaagttgtataaaagtttcaatatcttgccttaaattagttgcctattctttctaggattcaaatattgtgacatttaaaaaagaaaacattcacttttgaaacttagacttcagatcaaaaaggactgaacccccactatcataatccatacattcatttccatgttgtttgactagcagtgcatatatgaatgaatatggtaattaatcttacctataagaaccaaatactttaattatattaagatagtgaataaagatgtataatatttttattaataccttgaatatattcagtggattgaatgtgacttcataactgtactacgattgtattaaaatatttctggaataaaaaaaaaaaaaaaaaa

SEQ ID NO: 1793 - DNA, 7606 bp, Homo Sapiens
  NM_002646
aagaatcagaagacatttgtgctttggggagcagaggccctcagggtatagagaaggaagaagagagaggttcactgtagtcctgaagcagaaataagacctgtggctgaaggaagccttagcaattcactccttcctcttcctgagaactctctgtaggaagtctcacctagcagaggcttcacagtatttcagagaagccaaagattgtttgcctctttggaaactgttatccttccatcatgactgtgtcactcctgccactgttccaccatagagatggcgtcctttgcagcaaaccgtaagttataaggatgagggaagaagagtagagggccaaaaggattccattttgaggaaaaactacagtttgccttgccaggtagaagaatcaggcgcccagacaccatgtcacaaccctccagaactgacgttggcaggaagtagagactttgttgcctgtgtcccccatcctcaccatgtcttcgactcagggcaatggggaacactggaagtccctggagtcagtgggcatcagccgcaaagagctagcgatggccgaagccctgcagatggagtatgatgccctgtcccggctccggcatgacaaggaggagaacagagccaagcagaacgcagacccctctctcatcagctgggatgagcctggggtagacttttacagcaagccagcaggaaggcggaccgacctcaagctgttacgcggtctctctggctctgatcctacccttaactacaactcactctccccacaggaagggccgcccaaccactctacctcccaagggccacagcctggctcagatccctggcccaaaggctccctgtctggagactatctctacatttttgatggttcagatgggggagtctcttcgtccccaggaccaggggacatagagggctcttgcaagaaactatccccacctcctctgcctccccgagcttctatctgggatacccctcccctgcctcccagaaaggggtccccctcatcctccaagatctcccagcccagtgacatcaacactttctctttggtcgaacaattgccgggcaaactgctagagcatcggatcctagaagaggaagaggtgctgggaggtgggggtcaggggcgcctactggggtctgtggactatgatggtatcaatgatgcaattactaggctcaacttgaaatcgacctatgatgcggagatgttgcgggatgccaccaggggctggaaggagggccgagggccgctggacttcagcaaagacacctctggaaaacccgtggccaggagcaagactatgccccctcaggtgcccccccgcacctatgcctcccgctatggcaaccgaaagaatgcgacgcctggcaagaaccgccggatttctgcagccccggtgggctcccggccccacactgttgccaatggccatgagttgtttgaggtctcagaagagagagatgaggaggttgctgcattttgccacatgctggatatccttcgatctggctctgacatccaagactacttcctcactggctatgtctggagtgctgtcacccctagcccagagcacctcggggatgaggtcaacctgaaggtgactgtgttgtgtgacaggcttcaagaggcactcactttcacctgcaactgttcctccactgtagacttgcttatctaccagaccctgtgctacacccatgatgacctgaggaatgtggacgtgggtgactttgtgctaaagccctgcgggctggaggagttcctgcagaacaagcatgccttgggcagtcatgagtacatccaatactgccgcaagtttgacattgacattcggctacagctgatggagcagaaggttgtgcgcagtgacctggcccggacggtgaatgatgaccagagcccctccaccttgaactacctcgtccatctccaagagaggcctgtcaagcagaccatcagcaggcaggccctgagtcttctgttcgacacttaccacaatgaggtggatgccttcctgctggctgatggagacttcccactgaaggctgacagggtggtccagtccgtcaaggccatctgcaacgccctggccgccgtggaaacccctgagatcaccagtgctctcaaccagctgcccccctgcccctcccgcatgcagcctaaaattcagaaggatcccagtgtcttggctgtgagggaaaaccgagagaaggtcgtggaagccctgaccgctgccatcttggacctggtggagctgtactgcaacacattcaacgcagacttccagacggcagtgcccgggagccgcaagcatgacctggtccaggaggcctgccatttcgccaggtccctggccttcactgtctatgccacccaccgcatccccatcatctgggctaccagctatgaagatttctacctctcctgctccctcagccatggcggcaaggagctgtgcagccccctgcagacccgaagagctcacttctccaagtacctcttccacctcatcgtctgggaccagcagatctgcttcccagtgcaggtgaaccggctgcctcgggagacactgctgtgtgccactctctatgctctgcccatccccccaccggggagctcctcagaggccaataagcagcggcgggtgcctgaagccctgggctgggtcactaccccactcttcaacttcaggcaggtcctgacctgtggccggaagcttctgggtttgtggccagcaacacaggaaaatcccagcgcccgttggagtgcacctaatttccaccagccagacagtgtcatcctgcagattgacttccccacctcggcctttgacatcaagttcaccagcccccctggagacaagttcagcccccgctatgagtttggcagcctccgggaagaagaccagcgcaagcttaaagacatcatgcagaaagagtccttgtactggctcactgatgctgacaagaagcgcctgtgggagaagcgatattactgccactcggaggtgagctcgctccccctggtgctcgccagcgcccccagctgggagtgggcttgcctgcctgacatctatgttctcctgaagcagtggacccacatgaaccaccaggatgccctggggctcctgcatgccaccttcccggaccaggaggtgcgtcgtatggctgtgcagtggattggctcactctcagatgctgagctgctagactacctgccccagctggtacaggccctgaagtatgaatgctacctggacagcccgttggtgcgcttcctcctgaaacgagctgtgtctgacttgagagtgactcactacttcttctggttactgaaggacggcctcaaggactctcagttcagcatccgctaccagtatctgctggcagccttactgtgctgctgtggcaaggggctgagagaagagtttaaccgccagtgctggcttgtcaatgccctggccaaactggcccagcaggtccgggaggcagccccatctgcaaggcagggaatcctccgcacgggcctggaggaggtgaagcagttctttgccctcaatggctcgtgccgcttgccactcagccccagtctgctggttaagggaattgtgcccagggactgttcctacttcaactccaatgctgtccccctcaaactctccttccaaaatgtggatcccctgggtgagaacatccgtgtcatcttcaagtgtggggacgaccttcgccaggacatgctaacgctgcagatgattcgcatcatgagcaagatctgggtccaggaggggctggacatgcgcatggtcatcttccgctgcttctccaccggccggggcagagggatggtggagatgatccctaatgctgagaccctgcgtaagatccaggtggagcatggggtgaccggctcgttcaaggaccggcccctggcagactggctgcagaaacacaaccctggggaggacgagtatgagaaggctgtggagaactttatctactcctgcgctggctgctgcgtggccacgtacgtcttgggcatctgtgaccgacataatgacaacatcatgctgaagaccactggtcacatgttccacattgattttggccgcttcctgggccatgcccagatgtttggcaacatcaagcgggaccgtgccccctttgtcttcacctcggacatggcgtatgtcatcaacgggggtgacaagccttccagccgcttccatgattttgttgacctttgctgccaagcctacaacctcattcgcaagcacacccacctcttcctcaaccttctgggcctgatgttgtcctgtgggatccctgaactctcagacctggaggacctcaagtatgtgtacgatgccctgaggcctcaggatacagaggccaatgccactacctacttcactaggttgattgagtccagcctgggcagtgtagccacaaagctcaattttttcatccataatctggctcagatgaagttcacgggctcagatgaccggctgaccctctcctttgcctcccgaacacacactctcaagagctctggccgaatcagtgatgttttcctctgccgccatgagaagatcttccaccccaacaaaggctatatatatgtggtaaaggtgatgcgagagaacactcacgaggccacctacatccagcggacctttgaggagttccaggaattacacaataagttgcggctgctcttcccttcttcccacttgcccagcttccctagtcgcttcgtgatcggccgctcccggggagaggcggtggccgagcggcggagggaggagctaaacggttacatctggcacttgatccacgcaccccctgaggtggccgagtgtgatttggtgtacaccttcttccacccactgccccgggatgagaaggctatgggcaccagcccagctcctaagtcctcagatggcacatgggcccggcccgtcggaaaggtgggaggggaggtgaagctgtccatctcctacaaaaacaataaactcttcatcatggtgatgcatattcggggcttgcaactgctccaggatggaaatgaccctgacccctatgtgaaaatttacctccttcctgaccctcagaaaaccactaagaggaaaaccaaagtggcccggaaaacctgcaatcctacctacaatgagatgttggtatatgatgggatccccaagggtgacctgcagcagcgggagctccagctgagcgtgctgagtgagcagggattctgggagaacgtcctcctcggtgaggtgaacatccgcctgcgagagctggacctggctcaggagaagaccggctggttcgccctgggatctcgaagtcatggcaccttgtgagcccagcagagccaccacccagcatcccaggctggtggcaggagctgggggagaggactctcccctgtgagactcctccttgtgaagggccagggccctgggcaggcctccagctcggtccaggtgattctggcctctgtggtaggaggcagggagagtaagacatgctctgctgtctcttcctctggagactgaacttgggttggttgtgatgagcagccccttggaggctgtgaggttgcagcaaagttttaagtttaccttgtgtcaagggagcaatgcttggtttggggagtgtgtggggtgggctgtatgaagtagcattttgggggtgggtgggtggatatcttaatttttatttttaaaaaatgaaatagtgatgttgtcctaactgggacaggaagccttgcgagaagggacgtacctatgccccagaaggcaagagaggaagactatttggactttttgtatgattaaggttcttattggacttttccctaggttttttttttttgttattgttgttgttgtttcgttttctagctataggaactatctggggaggggcccagtgggtcctcggccagagccctctctaaggacaggttggggagggttggggagggctgcctgtgctggactgaggcttgtgccactgggcctttctgattttgcctccaaaggagagcgctgtgatacctacatgtgtaaggaagggccttccgtattggggttctgccaaggacccgtattcagggacccatgctcttttggggggacttttcctcttgtcttccctactttattaggacttgccctgaataccattttctaccccttgcccctccattctcctggcccttctgggggtcagctggtctctatgaatatgctgggggtgcttccccataggtctctcccttcatttgtctctggtgggacaaaatactgactcagtccttagatgtagtttcacccaagagcatcttggccctgggaagaggtccctaggctgcagatgctactgactgcttgctaggtagcctctggaaagcattccccatccatcactccccacttctttctgctgtgctgcttccctcccaaactccatttctgtcaccctttttataagacttttcctcattctgtggggccataaacctatttagtctggagccaaagggatgccctatctgaaggaaaggggcatggggtgggggattccatcaaaactgttgttttttgccccatgatttttctttggtcagtaggaggctggattggagtggtgattattcccctggagctaagctcaggagcccgaagggagagactgagactgactcccttatctcttcatattctttattccctaccagatggatttttttttttttttttggagacggagtctcgccctgtcgccaggctggagtgtagtggcatgatctcgactcactgcaaaatctgcctcccgggttcaagcgattctcctacctcagcctcccgagtagctgggattacaggcatgtgccaccacgccaagctaatttttgtatttttagtagagacggggtttcaccatgttggccaggatggtctcgatctcttgacctcgtgatctgcctgccttggcctcccaaagtgctgggattacaggcgtgagccaccatgccccgccccagatggattttacatttgctcttttgtgtttcgctccaaagggttgtcttcctcgccaaaaggagggagggactttgaatttgatatgaatctttaaaaccagaattggctggatatttcccatgattgggaaaagagtgaaatgaggacattctgtaaactgtccctccctaattccaaggatcagaaactccccgttttgctgactcattccataactggagaaagaagctccattgaccgaagccacagggcagcatggaagtttaaattttctctaaaattaaaatgccaaggataaagctggctgcttccaggagggggaagaggagtggggagtgggcggtgaaacttttccagatgaacggaccataaatgtgttactggctttgtgcctgtagctcattttattatgacctatatgctcctgatttaaagagatctgtgtactgtttacttcccacttcccagaatcccttgtatctcctttctcgggaattgtattttctaataaatgacatttgagaaaaaaatga

SEQ ID NO: 1794 - DNA, 2751 bp, Homo Sapiens
  NM_002648
ccctttactcctggctgcggggcgagccgggcgtctgctgcagcggccgcggtggctgaggaggcccgagaggagtcggtggcagcggcggcggcgggaccggcagcagcagcagcagcagcagcagcagcaaccactagcctcctgccccgcggcgctgccgcacgagccccacgagccgctcaccccgccgttctcagcgctgcccgaccccgctggcgcgccctcccgccgccagtcccggcagcgccctcagttgtcctccgactcgccctcggccttccgcgccagccgcagccacagccgcaacgccacccgcagccacagccacagccacagccccaggcatagccttcggcacagccccggctccggctcctgcggcagctcctctgggcaccgtccctgcgccgacatcctggaggttgggatgctcttgtccaaaatcaactcgcttgcccacctgcgcgccgcgccctgcaacgacctgcacgccaccaagctggcgcccggcaaggagaaggagcccctggagtcgcagtaccaggtgggcccgctactgggcagcggcggcttcggctcggtctactcaggcatccgcgtctccgacaacttgccggtggccatcaaacacgtggagaaggaccggatttccgactggggagagctgcctaatggcactcgagtgcccatggaagtggtcctgctgaagaaggtgagctcgggtttctccggcgtcattaggctcctggactggttcgagaggcccgacagtttcgtcctgatcctggagaggcccgagccggtgcaagatctcttcgacttcatcacggaaaggggagccctgcaagaggagctggcccgcagcttcttctggcaggtgctggaggccgtgcggcactgccacaactgcggggtgctccaccgcgacatcaaggacgaaaacatccttatcgacctcaatcgcggcgagctcaagctcatcgacttcgggtcgggggcgctgctcaaggacaccgtctacacggacttcgatgggacccgagtgtatagccctccagagtggatccgctaccatcgctaccatggcaggtcggcggcagtctggtccctggggatcctgctgtatgatatggtgtgtggagatattcctttcgagcatgacgaagagatcatcaggggccaggttttcttcaggcagagggtctcttcagaatgtcagcatctcattagatggtgcttggccctgagaccatcagataggccaaccttcgaagaaatccagaaccatccatggatgcaagatgttctcctgccccaggaaactgctgagatccacctccacagcctgtcgccggggcccagcaaatagcagcctttctggcaggtcctcccctctcttgtcagatgcccgagggaggggaagcttctgtctccagcttcccgagtaccagtgacacgtctcgccaagcaggacagtgcttgatacaggaacaacatttacaactcattccagatcccaggcccctggaggctgcctcccaacagtggggaagagtgactctccaggggtcctaggcctcaactcctcccatagatactctcttcttctcataggtgtccagcattgctggactctgaaatatcccgggggtggggggtgggggtgggtcagaaccctgccatggaactgtttccttcatcatgagttctgctgaatgccgcgatgggtcaggtaggggggaaacaggttgggatgggataggactagcaccattttaagtccctgtcacctcttccgactctttctgagtgccttctgtggggactccggctgtgctgggagaaatacttgaacttgcctcttttacctgctgcttctccaaaaatctgcctgggttttgttccctatttttctctcctgtcctccctcaccccctccttcatatgaaaggtgccatggaagaggctacagggccaaacgctgagccacctgcccttttttctgcctcctttagtaaaactccgagtgaactggtcttcctttttggtttttacttaactgtttcaaagccaagacctcacacacacaaaaaatgcacaaacaatgcaatcaacagaaaagctgtaaatgtgtgtacagttggcatggtagtatacaaaaagattgtagtggatctaatttttaagaaattttgcctttaagttattttacctgtttttgtttcttgttttgaaagatgcgcattctaacctggaggtcaatgttatgtatttatttatttatttatttggttcccttcctattccaagcttccatagctgctgccctagttttctttcctcctttcctcctctgacttggggaccttttgggggagggctgcgacgcttgctctgtttgtggggtgacgggactcaggcgggacagtgctgcagctccctggcttctgtggggcccctcacctacttacccaggtgggtcccggctctgtgggtgatggggaggggcattgctgactgtgtatataggataattatgaaaagcagttctggatggtgtgccttccagatcctctctggggctgtgttttgagcagcaggtagcctgctggttttatctgagtgaaatactgtacaggggaataaaagagatcttatttttttttttatacttggcgttttttgaataaaaaccttttgtcttaaaaaaaaaaaaaaaaaaaaaaaaaaaaaaaaaaaaaaaaaaaa

SEQ ID NO: 1795 - DNA, 3054 bp, Homo Sapiens
  NM_002650
tggtttctaaatcttattcagtgagcacgtgttcctttttttaattagagaaaacttgacagtagcccctttttgtgtttcacagaggagctaacattccttctgtacctgtagttcatgcgggagatggcaggggcctggcacatgacggtggagcagaaatttggcctgttttctgctgagataaaggaagcagaccccctggctgcctcggaagcaagtcaacccaaaccctgtccccccgaagtgaccccccactacatctggatcgacttcctggtgcagcggtttgagatcgccaagtactgcagctctgaccaagtggagatcttctccagcctgctgcagcgctccatgtccctgaacatcggcggggccaaggggagcatgaaccggcacgtggcggccatcgggccccgcttcaagctgctgaccctggggctgtccctcctgcatgccgatgtggttccaaatgcaaccatccgcaatgtgcttcgcgagaagatctactccactgcctttgactacttcagctgtcccccaaagttccctactcaaggagagaagcggctgcgtgaagacataagcatcatgattaaattttggaccgccatgttctcagataagaagtacctgaccgccagccagcttgttcccccagataatcaggacacccggagcaacctggacataactgtcggctctcggcaacaagccacccaaggctggatcaacacataccccctgtccagcggcatgtccaccatctccaagaaatcaggcatgtctaagaaaaccaaccggggctcccagctgcacaaatactacatgaagcgcaggacgctgctgctgtccctgctggccactgagatcgagcgtctcatcacatggtacaacccgctgtcagccccggaactggaactagaccaggccggagagaacagcgtggccaactggagatctaagtacatcagcctgagtgagaagcagtggaaggacaacgtgaacctcgcctggagcatctctccctacctagccgtgcagctgcctgccaggtttaagaacacagaagccattgggaacgaagtgacccgtctcgttcggttggacccgggagccgttagtgatgtgcctgaagcaatcaagttcctggtcacctggcacaccatcgacgccgatgctccagagctcagccatgtgctgtgctgggcgcccacggacccacccacaggcctctcctacttctccagcatgtacccgccgcaccctctcacggcgcagtacggggtgaaagtcctgcggtccttccctccggacgccatcctcttctacatcccccagattgtgcaggccctcaggtacgacaagatgggctatgtgcgggagtatattctgtgggcagcgtctaaatcccagcttctggcacaccagttcatctggaacatgaagactaacatttatctagatgaagagggccaccagaaagaccctgacatcggcgacctcctggatcagttggtagaggagatcacaggctccttgtccggcccagcgaaggacttttaccagcgggagtttgatttctttaacaagatcaccaacgtgtcggctatcatcaagccctaccctaaaggcgacgagagaaagaaggcttgtctgtcggccctgtctgaagtgaaggtgcagccgggctgctacctgcccagcaaccctgaggccattgtgctggacatcgactacaagtctgggaccccgatgcagagtgctgcaaaagccccatatctggccaagttcaaggtgaagcgatgtggagttagtgaacttgaaaaagaaggtctgcggtgccgctcagactccgaggatgagtgcagcacgcaggaggccgacggccagaagatctcctggcaggcagccatcttcaaggtgggagacgactgccggcaggacatgctggccctgcagatcatcgacctcttcaagaacatcttccagctggtcggcctggacctctttgtttttccctaccgcgtggtggccactgcccctgggtgcggggtgatcgagtgcatccccgactgcacctcccgggaccagctgggccgccagacagacttcggcatgtacgactacttcacacgccagtacggggatgagtccactctggccttccagcaggcccgctacaacttcatccgaagcatggccgcctacagcctcctgctgttcctgctgcagatcaaggacagacacaacggcaacattatgctggacaagaagggtcatatcatccacatcgactttggcttcatgtttgaaagctcgccgggcggcaatctcggctgggaacccgacatcaagctgacggatgagatggtgatgatcatggggggcaagatggaggccacacccttcaagtggttcatggagatgtgtgtccgaggctacctggctgtgcggccctacatggacgcggtcgtctccctggtcactctcatgttggacacgggcctgccctgttttcgcggccagacaatcaagctcttgaagcacaggtttagccccaacatgactgagcgcgaggctgcaaatttcatcatgaaggtcatccagagctgcttcctcagcaacaggagccggacctacgacatgatccagtactatcagaatgacatcccctactgaggaggggaccttcgagggcctctgccccatgtgccctcaaagctgtcccacaatcatggagccctgcgacctccctgccctgccgccacatgcagtggaggagaggcctgtggcccaaagaacctggtagcgcctcctggggcagcacgtgggtggcgcagccttggtaacgccatggactgcagcgacaatcaatggatggtgctgtctatgcacaggtgtgagtcctctgtttgcactggacatattccctacctgtcttatttcataggtacatgaagtattgtgtataaaaaaagagataagatttaaccaacatcaacaaaataaaaacccaaaatagtgctgtgttggaaaaaaaaaaaaaaaaaa

SEQ ID NO: 1796 - DNA, 2479 bp, Homo Sapiens
  NM_002654
cgccgcgcttcctcctgaaggtgactgcgcccgcggggacgcagggggcggggcccgggtcgcccggagccgggattgggcagagggcggggcggcggagggattgcggcggcccgcagcgggataaccttgaggctgaggcagtggctccttgcacagcagctgcacgcgccgtggctccggatctcttcgtctttgcagcgtagcccgagtcggtcagcgccggaggacctcagcagccatgtcgaagccccatagtgaagccgggactgccttcattcagacccagcagctgcacgcagccatggctgacacattcctggagcacatgtgccgcctggacattgattcaccacccatcacagcccggaacactggcatcatctgtaccattggcccagcttcccgatcagtggagacgttgaaggagatgattaagtctggaatgaatgtggctcgtctgaacttctctcatggaactcatgagtaccatgcggagaccatcaagaatgtgcgcacagccacggaaagctttgcttctgaccccatcctctaccggcccgttgctgtggctctagacactaaaggacctgagatccgaactgggctcatcaagggcagcggcactgcagaggtggagctgaagaagggagccactctcaaaatcacgctggataacgcctacatggaaaagtgtgacgagaacatcctgtggctggactacaagaacatctgcaaggtggtggaagtgggcagcaagatctacgtggatgatgggcttatttctctccaggtgaagcagaaaggtgccgacttcctggtgacggaggtggaaaatggtggctccttgggcagcaagaagggtgtgaaccttcctggggctgctgtggacttgcctgctgtgtcggagaaggacatccaggatctgaagtttggggtcgagcaggatgttgatatggtgtttgcgtcattcatccgcaaggcatctgatgtccatgaagttaggaaggtcctgggagagaagggaaagaacatcaagattatcagcaaaatcgagaatcatgagggggttcggaggtttgatgaaatcctggaggccagtgatgggatcatggtggctcgtggtgatctaggcattgagattcctgcagagaaggtcttccttgctcagaagatgatgattggacggtgcaaccgagctgggaagcctgtcatctgtgctactcagatgctggagagcatgatcaagaagccccgccccactcgggctgaaggcagtgatgtggccaatgcagtcctggatggagccgactgcatcatgctgtctggagaaacagccaaaggggactatcctctggaggctgtgcgcatgcagcacctgattgcccgtgaggcagaggctgccatctaccacttgcaattatttgaggaactccgccgcctggcgcccattaccagcgaccccacagaagccaccgccgtgggtgccgtggaggcctccttcaagtgctgcagtggggccataatcgtcctcaccaagtctggcaggtctgctcaccaggtggccagataccgcccacgtgcccccatcattgctgtgacccggaatccccagacagctcgtcaggcccacctgtaccgtggcatcttccctgtgctgtgcaaggacccagtccaggaggcctgggctgaggacgtggacctccgggtgaactttgccatgaatgttggcaaggcccgaggcttcttcaagaagggagatgtggtcattgtgctgaccggatggcgccctggctccggcttcaccaacaccatgcgtgttgttcctgtgccgtgatggaccccagagcccctcctccagcccctgtcccacccccttcccccagcccatccattaggccagcaacgcttgtagaactcactctgggctgtaacgtggcactggtaggttgggacaccagggaagaagatcaacgcctcactgaaacatggctgtgtttgcagcctgctctagtgggacagcccagagcctggctgcccatcatgtggccccacccaatcaagggaagaaggaggaatgctggactggaggcccctggagccagatggcaagagggtgacagcttcctttcctgtgtgtactctgtccagttcctttagaaaaaatggatgcccagaggactcccaaccctggcttggggtcaagaaacagccagcaagagttaggggccttagggcactgggctgttgttccattgaagccgactctggccctggcccttacttgcttctctagctctctaggcctctccagtttgcacctgtccccaccctccactcagctgtcctgcagcaaacactccaccctccaccttccattttcccccactactgcagcacctccaggcctgttgctatagagcctacctgtatgtcaataaacaacagctgaagcaccaaaaaaaaaaaaaaaaaaaaa

SEQ ID NO: 1797 - DNA, 1570 bp, Homo Sapiens
  NM_002659
gccgagccagccccttcaccaccagccggccgcgccccgggaagggaagtttgtggcggaggaggttcgtacgggaggagggggaggcgcccacgcatctggggctgactcgctctttcgcaaaacgtctgggaggagtccctggggccacaaaactgcctccttcctgaggccagaaggagagaagacgtgcagggaccccgcgcacaggagctgccctcgcgacatgggtcacccgccgctgctgccgctgctgctgctgctccacacctgcgtcccagcctcttggggcctgcggtgcatgcagtgtaagaccaacggggattgccgtgtggaagagtgcgccctgggacaggacctctgcaggaccacgatcgtgcgcttgtgggaagaaggagaagagctggagctggtggagaaaagctgtacccactcagagaagaccaacaggaccctgagctatcggactggcttgaagatcaccagccttaccgaggttgtgtgtgggttagacttgtgcaaccagggcaactctggccgggctgtcacctattcccgaagccgttacctcgaatgcatttcctgtggctcatcagacatgagctgtgagaggggccggcaccagagcctgcagtgccgcagccctgaagaacagtgcctggatgtggtgacccactggatccaggaaggtgaagaagggcgtccaaaggatgaccgccacctccgtggctgtggctaccttcccggctgcccgggctccaatggtttccacaacaacgacaccttccacttcctgaaatgctgcaacaccaccaaatgcaacgagggcccaatcctggagcttgaaaatctgccgcagaatggccgccagtgttacagctgcaaggggaacagcacccatggatgctcctctgaagagactttcctcattgactgccgaggccccatgaatcaatgtctggtagccaccggcactcacgaaccgaaaaaccaaagctatatggtaagaggctgtgcaaccgcctcaatgtgccaacatgcccacctgggtgacgccttcagcatgaaccacattgatgtctcctgctgtactaaaagtggctgtaaccacccagacctggatgtccagtaccgcagtggggctgctcctcagcctggccctgcccatctcagcctcaccatcaccctgctaatgactgccagactgtggggaggcactctcctctggacctaaacctgaaatccccctctctgccctggctggatccgggggacccctttgcccttccctcggctcccagccctacagacttgctgtgtgacctcaggccagtgtgccgacctctctgggcctcagttttcccagctatgaaaacagctatctcacaaagttgtgtgaagcagaagagaaaagctggaggaaggccgtgggccaatgggagagctcttgttattattaatattgttgccgctgttgtgttgttgttattaattaatattcatattatttattttatacttacataaagattttgtaccagtggacaaggccaaaaaaaaaaaaaaaaaa

SEQ ID NO: 1798 - DNA, 5607 bp, Homo Sapiens
  NM_002662
gctgagctccagctgtgccagaggcacccgagccctgagagtccgccgccaacgcgcaggtgctagcggccccttcgccctgcagcccctttgcttttactctgtccaaagttaacatgtcactgaaaaacgagccacgggtaaatacctctgcactgcagaaaattgctgctgacatgagtaatatcatagaaaatctggacacgcgggaactccactttgagggagaggaggtagactacgacgtgtctcccagcgatcccaagatacaagaagtgtatatccctttctctgctatttataacactcaaggatttaaggagcctaatatacagacgtatctctccggctgtccaataaaagcacaagttctggaagtggaacgcttcacatctacaacaagggtaccaagtattaatctttacactattgaattaacacatggggaatttaaatggcaagttaagaggaaattcaagcattttcaagaatttcacagagagctgctcaagtacaaagcctttatccgcatccccattcccactagaagacacacgtttaggaggcaaaacgtcagagaggagcctcgagagatgcccagtttgccccgttcatctgaaaacatgataagagaagaacaattccttggtagaagaaaacaactggaagattacttgacaaagatactaaaaatgcccatgtatagaaactatcatgccacaacagagtttcttgatataagccagctgtctttcatccatgatttgggaccaaagggcatagaaggtatgataatgaaaagatctggaggacacagaataccaggcttgaattgctgtggtcagggaagagcctgctacagatggtcaaaaagatggttaatagtgaaagattcctttttattgtatatgaaaccagacagcggtgccattgccttcgtcctgctggtagacaaagaattcaaaattaaggtggggaagaaggagacagaaacgaaatatggaatccgaattgataatctttcaaggacacttattttaaaatgcaacagctatagacatgctcggtggtggggaggggctatagaagaattcatccagaaacatggcaccaactttctcaaagatcatcgatttgggtcatatgctgctatccaagagaatgctttagctaaatggtatgttaatgccaaaggatattttgaagatgtggcaaatgcaatggaagaggcaaatgaagagatttttatcacagactggtggctgagtccagaaatcttcctgaaacgcccagtggttgagggaaatcgttggaggttggactgcattcttaaacgaaaagcacaacaaggagtgaggatcttcataatgctctacaaagaggtggaactcgctcttggcatcaatagtgaatacaccaagaggactttgatgcgtctacatcccaacataaaggtgatgagacacccggatcatgtgtcatccaccgtctatttgtgggctcaccatgagaagcttgtcatcattgaccaatcggtggcctttgtgggagggattgacctggcctatggaaggtgggacgacaatgagcacagactcacagacgtgggcagtgtgaagcgggtcacttcaggaccgtctctgggttccctcccacctgccgcaatggagtctatggaatccttaagactcaaagataaaaatgagcctgttcaaaacctacccatccagaagagtattgatgatgtggattcaaaactgaaaggaataggaaagccaagaaagttctccaaatttagtctctacaagcagctccacaggcaccacctgcacgacgcagatagcatcagcagcattgacagcacctccagttattttaatcactatagaagtcatcacaatttaatccatggtttaaaaccccacttcaaactctttcacccgtccagtgagtctgagcaaggactcactagacctcatgctgataccgggtccatccgtagtttacagacaggtgtgggagagctgcatggggaaaccagattctggcatggaaaggactactgcaatttcgtcttcaaagactgggttcaacttgataaaccttttgctgatttcattgacaggtactccacgccccggatgccctggcatgacattgcctctgcagtccacgggaaggcggctcgtgatgtggcacgtcacttcatccagcgctggaacttcacaaaaattatgaaatcaaaatatcggtccctttcttatccttttctgcttccaaagtctcaaacaacagcccatgagttgagatatcaagtgcctgggtctgtccatgctaacgtacagttgctccgctctgctgctgattggtctgctggtataaagtaccatgaagagtccatccacgccgcttacgtccatgtgatagagaacagcaggcactatatctatatcgaaaaccagtttttcataagctgtgctgatgacaaagttgtgttcaacaagataggcgatgccattgcccagaggatcctgaaagctcacagggaaaaccagaaataccgggtatatgtcgtgataccacttctgccagggttcgaaggagacatttcaaccggcggaggaaatgctctacaggcaatcatgcacttcaactacagaaccatgtgcagaggagaaaattccatccttggacagttaaaagcagagcttggtaatcagtggataaattacatatcattctgtggtcttagaacacatgcagagctcgaaggaaacctagtaactgagcttatctatgtccacagcaagttgttaattgctgatgataacactgttattattggctctgccaacataaatgaccgcagcatgctgggaaagcgtgacagtgaaatggctgtcattgtgcaagatacagagactgttccttcagtaatggatggaaaagagtaccaagctggccggtttgcccgaggacttcggctacagtgctttagggttgtccttggctatcttgatgacccaagtgaggacattcaggatccagtgagtgacaaattcttcaaggaggtgtgggtttcaacagcagctcgaaatgctacaatttatgacaaggttttccggtgccttcccaatgatgaagtacacaatttaattcagctgagagactttataaacaagcccgtattagctaaggaagatcccattcgagctgaggaggaactgaagaagatccgtggatttttggtgcaattccccttttatttcttgtctgaagaaagcctactgccttctgttgggaccaaagaggccatagtgcccatggaggtttggacttaagagatattcattggcagctcaaagacttccaccctggagaccacactgcacacagtgacttcctggggatgtcatagccaaagccaggcctgacgcattctcgtatccaacccaaggaccttttggaatgactggggagggctgcagtcacattgatgtaaggactgtaaacatcagcaagactttataattccttctgcctaacttgtaaaaagggggctgcattcttgttggtagcatgtactctgttgagtaaaacacatattcaaattccgtataccaaaatccatttcctttgtaacaagaatttaccagtaactgtgatctaggttgccaaaagttgtctgaatctccttattcttctctgatcttcatttatgcagccaatgtctagctggacctgccctcatcttgcagttcatacaggcactgtttgagagattgtttattattagatgttgtaatgctgcttcaagattcttcatggttacatgggatgcccctgctcatctggtcctgaagtagtaacattcacccaaatgaggatatagtcattattccttttcagtcactgtacgaacacggcagactttagcctacacagtagactgtgttaggcacttctggtaacattgacactgtatcttgacaccactaagcaacaggaaggaataaattccaatattgagacagagatttatttcattttgctcccaaaggcactgacaacatgagtccttgtgattaggcccacctgatcaaatgtaaaaacatgcatgggatatttgattacgtaacaaccagctaaaactgagagcacacagccttcggaaacccccaaggtgtcgaggaggatcagatccagataagagaagatgattccttctagtcctgtaaaatttcctgtcatccttagctgctgggttgattgaaatttgatctctacatttcaaaatcaaactagtgaatacagtttgtctttcaagagaatcagaggcatcgtaactcctaccaagttagtaagtatgagtctaaccttgtttgacattcaggtcttctgctacattatcttctttgagaaaaattaattgattataaaatatgtgctacttcacttacattattaaatatgtattaacgcctctcaccagggcttccagtgaagttacaatgccctagtctgtgaattagtctggaaacgtgtttttccttttcggatgttagagtaccctttgataaactaaattttactaagctgaacaactctgacagtctaaagagctaatgtgggttaccaaaaggcctgtacctgtaaaacaaaatgcaggtgtaatgattatacatgtctatggattacctggacatactctcatttgggttgttcttcaaagaagcaagcagccgatccctgttttcataaagctaatacttcagttggaaaaattaaacaggagcacaaagtcagggataggggttagcagaagagagaaatagtgtcacatcaagggcaggatctcatagctagggaacatttcacaaataaggtgagattttgtaaccaataataaaaatgaatgtttttataagtaaataacttatttttcatatggctaaagatggtaaaatgacttcattctatagccattgtaaataagaatttgctattgatgaaagaagttcagattggcatttgaagtattgagtgtatgggatctctaaggatttcttagattttatatttaaatattttttaaaccttagaggagtcaacaaactggctcttgattttcagcaccctactctcatgaaaaaagcctgaaaggaccctttcccttataagtaatttaatccaatttctccccattttatagatgaggaaactgaggctcagatcagatgagaactcacttaaatccactcaatgtgtagatggtagagctgggactagcaacattgctgcagcccattgttggcctctctcttcactttatcattgcccaagaatgaggatatgcagtaaacagaattcaggcaagatacctctaagctgttttgaaccctctgatattttgtatttatgtgtttgtctgtctccccctactagaatgtaagctccatggggcagggacttcactgtattttgttcatagtgtatccccagagcctggaccagtgcttggcacataggagatggcaataaatgcttgtagaattaataaacaaggtgaaggagagagctaatgaaatgaaaaaaaaaaaaaaaaaa

SEQ ID NO: 1799 - DNA, 1049 bp, Homo Sapiens
  NM_002668
tccggccccgcccgcgtcagctctgcgcggtgattcactccctccttcgccccggggcccccttcccggccagacggcgggcaagacagctgggtgtacagcgtcctcgaaaccacgagcaagtgagcagatcctccgaggcaccagggactccagcccatgccatggcggattctgagcgcctctcggctcctggctgctgggccgcctgcaccaacttctcgcgcactcgaaagggaatcctcctgtttgctgagattatattatgcctggtgatcctgatctgcttcagtgcctccacaccaggctactcctccctgtcggtgattgagatgatccttgctgctattttctttgttgtctacatgtgtgacctgcacaccaagataccattcatcaactggccctggagtgatttcttccgaaccctcatagcggcaatcctctacctgatcacctccattgttgtccttgttgagagaggaaaccactccaaaatcgtcgcaggggtactgggcctaatcgctacgtgcctctttggctatgatgcctatgtcaccttccccgttcggcagccaagacatacagcagcccccactgaccccgcagatggcccggtgtaggcgaacttccctcatttctctctgcaatctgcaaataactcctccattgaaataactcctccccaccccaacaacaacattcccagcagaccaactcccaccccctctttgaggtaaaagtgcctttattgggagacttttgtcttccagcctgccaatcaaccctcctgggtgtggccaccatatgtgtgtgcctaggtcctccttctgcacgatccaataggagacaccagttctgactgaaccatgcccccacctaagtcacaaaatgagggaagtggggagttagatttcagagtccaggccctaggttgggacccactccaaataatctcctcggtgtgggtggtggttctatagagggataaatgaataataaacattgttaaaatatacgataatgaataaagtaatcctttcatcaaa

SEQ ID NO: 1800 - DNA, 3374 bp, Homo Sapiens
  NM_002669
agagcttgcatcacatccgccgcctgggcgcccaattccggaaggtgctgcacagctgtggcggcgggtactgcgttagtgattagagtttcttccctgccggaggtgggatacacggtagcatcatggtcgaggaggtacagaaacattctgtacacacccttgtgttcaggtcgttgaagaggacccatgacatgtttgtagctgataatggaaaacctgtgcctttagatgaagagagtcacaaacgaaaaatggcaatcaagcttcgtaatgagtatggtcctgtgttgcatatgcctacttcaaaagaaaatcttaaagagaagggtcctcagaatgcaacggattcatatgttcataaacagtaccctgccaatcaaggacaagaagttgaatactttgtggcaggtacacatccatacccaccaggacctggggttgctttgacagcagatactaagatccagagaatgccaagtgaatcagctgcacagtccttagcggtggcattacctttgcagaccaaggctgatgcaaatcgtactgcccctagtggaagtgaataccgacatcctggggcttctgaccgtccacagcctacagcgatgaattcaattgtcatggagactggcaataccaagaactctgcactgatggctaaaaaagcccctacaatgccaaaaccccagtggcacccaccgtggaaactctacagggttatcagtgggcatcttggctgggttcgatgtattgctgtggaacctggaaatcagtggtttgttactggatctgctgacagaactataaagatctgggacttggctagtggcaaattaaaactgtcattgactgggcatattagtactgtgcggggcgtgatagtaagcacaaggagcccatatctgttctcttgtggagaagacaaacaagtgaaatgctgggatctcgaatacaataaggttatacggcattatcatggacatttaagtgcagtgtatggtttggatttgcacccgacaatcgatgtgttggtaacctgtagtcgagattcaactgcacggatttgggatgtgagaactaaagccagtgtacacacattatctggacatacaaatgcagttgctacagtgagatgtcaggctgcagaaccacaaattattacaggaagccatgatactacaattcgattatgggatctggtggctggaaaaacaagagtgacattaacaaatcacaaaaaatcagttagggctgtggttttacatccaagacattacacatttgcatctggttctccagataacataaagcagtggaaattccctgatggaagtttcattcaaaatctttccggtcataatgctattattaacacattgacggtaaattctgatggagtgcttgtatctggagctgacaatggcaccatgcatctttgggactggagaactggctacaattttcagagagttcacgcagctgtgcaacctgggtctttggacagtgaatcaggaatatttgcttgtgcttttgatcagtctgaaagtcgattactaacagctgaagctgataaaaccattaaagtatacagagaggatgacacagccacagaagaaactcatccagtcagctggaaaccagaaattatcaagagaaagagattttaatgaatgtggaattttttctctctctttttttttctttttaattaaaaaaaaaaaagcttggcgttcatgaggatatccagtcattttgtgctctggctgggaatataaaggagaaattcacttgcttcaatcattgctgcttcatattttacaataaactgtcccctgtcccctacccctgtgtttttatttctaaaacaatttgtgatactaggaagatgcagatatcaagtaaatgcaggtttattgaacataactattctagatgtaatattttgacagtcttattagaaaacccccttttttaaaaaaaatgtatgaaaccgataattaggacatttgaaggagcagtagtttttttttagtcctttaaaaaataacatctgtgactaataatttgagattaaaagatttgaagtcttaatttatgtatgtttattccaaaaacagtttttgagtgtatgttctacaaagttctgcactagatactgttcaggaaatagacaagtaagatgtgtctatcctctaagacttccagtttggtagcttagtatagaaattctgtaacagaggtgcaggtgaaatgctgggggaacagaagggataagaccatttatttttctcaggaaggattgtggaagacttcatagagtaagtggcattggagattaccttgaagtgaaggaagacaaagaaggaaaagagatgaggcataaagtgatgaaaccaggcacaagaaagtgtgcggtgtgttctgggacaaagaatgttctgctactgtcgaataatgggactaaagctggcttgttctggggaaagctcatataagtatggattttattcctcaactagtaggataccaatactggtattgaaacttggggaaaataactggagataccagtgcagctatttaaagctgtagcaagggctgcaatcttgcggagattttaaagagaagttttaaagtttctaatactgatgcctctttttggtaaatacaagttttataaatcctgccctgggatcctgattccccattaatcaagatttgtcagacttcaccttctataattagaaaacacagttataagaacagtcaattttttaaattttccaaattaaaaaattgcaccatgattttgaacaagcacttccaattacattacccatcttgtatgccataggtgggagtataattgtcacagcctttaggaatgtagttttctgggatttattgaaactttgaaccttttggcctactaagttcattcctaggaaactgcctaatgggaatgatctgacaagtgtacacaagcaaagtcattgcacctttgttctttaatacttaaaactagcccaaatgccctgtcagtaagggactggtttaatagatggtacctttatgcaatttgtttctaagtattcgttaagagagtgaggaatgtctggattattagggcaagatttctaaacttgggtaaaaaaaaaagttgtgcaagcatttttgtggacaacttgatgctctaaaatataagtaacaccacattactaacagtggctttgttaggaagcagaattatggaagaactttcatgggtggctttacatatttctataatgttttaattttctataagcatgtatttcgtaaacttaaataaagaaaaaagaacactacacttgcaaaaaaaaaaaaaaaaa

SEQ ID NO: 1801 - DNA, 2759 bp, Homo Sapiens
  NM_002685
gtctcctcggccgacaagctctcgcgagacgagccgtgcaggctgaaaaaatggcgccacccagtacccgggagcccagggtcctgtcggcgaccagcgcaaccaaatccgacggagagatggtgctgccaggcttcccggacgccgacagctttgtgaagtttgctcttgggtccgtggtggcagtcaccaaggcatctgggggcctaccacagtttggcgatgagtatgatttttaccgaagttttcctggcttccaagcattttgcgaaacacagggagacaggttgcttcagtgcatgagcagagtaatgcagtaccatgggtgtcgcagcaacattaaggatcgaagtaaagtgactgagctggaagacaagtttgatttactagttgatgccaatgatgtaattctggagagagtgggtattttactggatgaagcctcaggtgtaaacaagaatcaacagcctgtcctccctgccggcttgcaggtccccaaaacggtagtgtccagctggaaccgtaaggcagcagaatatggcaaaaaagcaaaatctgaaactttccggctgcttcatgcaaaaaatatcatccgacctcagctcaagtttcgagagaagattgacaattccaacacaccatttcttcctaaaatcttcatcaaacccaatgctcagaaacctctccctcaagctctctctaaggaaaggcgggaacgcccacaggatcgtcctgaggacttggacgtcccccctgcactggctgatttcatccatcagcagagaacccagcaggttgagcaagacatgtttgcacatccttatcaatatgaactaaatcactttaccccagcagatgcagtgcttcaaaagccacaaccccagttatacagacctatagaagagacaccatgccatttcatatcctccctggatgaactcgtggaactcaacgaaaagctcttgaattgtcaggaatttgcagttgacttggagcaccactcttacaggagcttcctgggactgacctgcctgatgcaaatttctactcggacggaagacttcatcattgacaccctcgagcttcgaagtgacatgtacattctcaatgagagcctcacagacccagccatcgttaaggtctttcatggtgctgattcagacatagaatggctacagaaagactttgggttgtatgtagtaaacatgtttgatactcatcaggcagcacgccttcttaacctgggcaggcactcactcgatcatctcctgaaactctactgcaacgtggactcaaacaagcaatatcagctggctgattggagaatacgccctctgcccgaggagatgctcagctacgcccgggatgacacccattacctgctatatatctatgacaaaatgaggctggagatgtgggagcgcggcaacgggcagccggtgcagctgcaggtggtgtggcaacggagcagggacatctgcctcaagaaattcatcaaacctatcttcacggatgagtcctaccttgaactctataggaagcagaagaagcaccttaacacacagcagttgacagcctttcagctgctgtttgcctggagggataaaacagctcgcagggaagatgaaagttacggatatgtactgccaaaccacatgatgctgaaaatagctgaagaactgcctaaggaacctcagggcatcatagcttgctgcaacccagtaccgccccttgtgcggcagcagatcaacgaaatgcaccttttaatccagcaggcccgagagatgcccctgctcaagtctgaagttgcagccggagtgaagaagagcggaccgctgcccagtgctgagagattggagaatgttctctttggacctcacgactgctcccatgcccctccggatggctatccaatcatcccaaccagtggatctgtgccagttcagaagcaggcgagcctcttccctgatgaaaaagaagataacttgctgggtaccacatgcctgattgccacagctgtcatcacgttatttaatgaacctagtgctgaagacagtaaaaagggtccattgacagttgcacagaaaaaagcccagaacatcatggagtcctttgaaaatccatttaggatgatcagcaaccgctggaagctggcccaggtacaagtacaaaaagactctaaagaagctgtcaagaagaaggcagctgagcaaacagctgcccgggaacaggcaaaggaggcgtgcaaagctgcagcagaacaggccatctccgtccgacagcaggtcgtgctagaaaatgctgcaaagaagagagagcgagcaacaagcgacccaaggaccacagaacagaaacaagagaagaaacgactcaaaatttccaagaagccaaaggacccagagccaccagaaaaagagtttacgccttacgactacagccagtcagacttcaaggcttttgctggaaacagcaaatccaaagtttcttctcagtttgatccaaataaacagaccccgtctggcaagaaatgcattgcagccaaaaaaattaaacagtcggtgggaaacaaaagcatgtcctttccaactggaaagtcagacagaggcttcaggtacaactggccacagagatagtcctggaagacacgtggcgcctgtggaccggaagcaccaaatgctggtgctgcttttgtacatacatatttttaaaccattaaaattcttcctgaagaaaaaaaaaaaaaaaaaaaaaaaaaaaaa

SEQ ID NO: 1802 - DNA, 2090 bp, Homo Sapiens
  NM_002688
ggagcgggcggcggcggcggcggcgcggaggggccgctcaccccgcagcccggcctcggcctccgccgcttgtcgtcgcgccccgcccgcgagcccgccccgcacgtcccccgccggcggccaccatgagcacaggcctgcggtacaagagcaagctggcgaccccagaggacaagcaggacattgacaagcagtacgtgggcttcgccacactgcccaaccaggtgcaccgcaagtcggtgaagaaaggctttgacttcacactcatggtggctggtgagtcaggcctggggaagtccacactggtccacagcctcttcctgacagacttgtacaaggaccggaagctgctcagtgctgaggagcgcatcagccagacggtagagattctaaaacacacggtggacattgaggagaagggagtcaagctgaagctcaccatcgtggacacgccgggattcggggacgctgtcaacaacaccgagtgctggaagcccatcaccgactatgtggaccagcagtttgagcagtacttccgtgatgagagcggcctcaaccgaaagaacatccaagacaaccgagtgcactgctgcctatacttcatctcccccttcgggcatgggctgcggccagtggatgtgggtttcatgaaggcattgcatgagaaggtcaacatcgtgcctctcatcgccaaagctgactgtcttgtccccagtgagatccggaagctgaaggagcggatccgggaggagattgacaagtttgggatccatgtataccagttccctgagtgtgactcggacgaggatgaggacttcaagcagcaggaccgggaactgaaggagagcgcgcccttcgccgttataggcagcaacacggtggtggaggccaaggggcagcgggtccggggccgactgtacccctgggggatcgtggaggtggagaaccaggcgcattgcgacttcgtgaagctgcgcaacatgctcatccgcacgcatatgcacgacctcaaggacgtgacgtgcgacgtgcactacgagaactaccgcgcgcactgcatccagcagatgaccagcaaactgacccaggacagccgcatggagagccccatcccgatcctgccgctgcccaccccggacgccgagactgagaagcttatcaggatgaaggatgaggaactgaggcgcatgcaggagatgctgcagaggatgaagcagcagatgcaggaccagtgacgctcgccgcggacacaccgtccgtctccgggacgccctcgcacccctggacaccagaccggactgttcccgacccggagacgcggggccacagcccccagctgaccctaatttattctcagcaccaccccctcccaggtcattgtgtctgtttccgaggggcctggaccgtagcccccgcccagctggccctctctgaccttgggggatcaggagcgaagttgggcgggacttcagagatccgcctcccttgcccttcccccgcccccggacggtcacagcacccaaaccgcaggccctgctctggcaggcaggcaaagctaggcagaagaggattcccaggatcctgggtctgttccctgccccagtgctgcagaacggacttgggagccctcctttgcctgctcccgcgggtcacccagcgagtgctgagaccccattttctgtcgaggcgggccgagtcttcccttatccccagacgcctagcgggcagggttgggctgaatcaaatgggagccctccagacataaggaggccagaggctgcaaggagcggggtcgtgaccgcttacaccccttctccacagcccggcccgacctggagggcccccggggcactgggcggtgagccacctcctggcaactctcggtgccgtcccctgccctcgctcgaggcctcttctccccagcaccgctgtggtgtgccgggatcctgagcctaggcctcccgatgttcccacccgcatgatcccttcccgccacacgatgctccgttttcttccgttgtgaatgccgcgtcctgtcctggtgacaggagaacaatgttggtgaacgtcgcaaaaaaaaaaaaaaaaaa

SEQ ID NO: 1803 - DNA, 1259 bp, Homo Sapiens
  NM_002690
ccggagctgggttgctcctgctcccgtctccaagtcctggtacctccttcaagctgggagagggctctagtccctggttctgaacactctggggttctcgggtgcaggccgccatgagcaaacggaaggcgccgcaggagactctcaacgggggaatcaccgacatgctcacagaactcgcaaactttgagaagaacgtgagccaagctatccacaagtacaatgcttacagaaaagcagcatctgttatagcaaaatacccacacaaaataaagagtggagctgaagctaagaaattgcctggagtaggaacaaaaattgctgaaaagattgatgagtttttagcaactggaaaattacgtaaactggaaaagattcggcaggatgatacgagttcatccatcaatttcctgactcgagttagtggcattggtccatctgctgcaaggaagtttgtagatgaaggaattaaaacactagaagatctcagaaaaaatgaagataaattgaaccatcatcagcgaattgggctgaaatattttggggactttgaaaaaagaattcctcgtgaagagatgttacaaatgcaagatattgtactaaatgaagttaaaaaagtggattctgaatacattgctacagtctgtggcagtttcagaagaggtgcagagtccagtggtgacatggatgttctcctgacccatcccagcttcacttcagaatcaaccaaacagccaaaactgttacatcaggttgtggagcagttacaaaaggttcattttatcacagataccctgtcaaagggtgagacaaagttcatgggtgtttgccagcttcccagtaaaaatgatgaaaaagaatatccacacagaagaattgatatcaggttgatacccaaagatcagtattactgtggtgttctctatttcactgggagtgatattttcaataagaatatgagggctcatgccctagaaaagggtttcacaatcaatgagtacaccatccgtcccttgggagtcactggagttgcaggagaacccctgccagtggatagtgaaaaagacatctttgattacatccagtggaaataccgggaacccaaggaccggagcgaatgaggcctgtatcctccctggcagacacaacccaataggagtcttaatttatttcttaacctttgctatgtaagggtctttggtgtttttaaatgattgtttcttcttcatgcttttgcttgcaatgtagtcaataaaacc

SEQ ID NO: 1804 - DNA, 3470 bp, Homo Sapiens
  NM_002691
gggagtcaggggtcacggcggcgtaggctgtggcgggaaacgctgtttgaagcgggatggatggcaagcggcggccaggcccagggcccggggtgcccccaaagcgggcccgtgggggcctctgggatgatgatgatgcacctcggccatcccaattcgaggaggacctggcactgatggaggagatggaggcagaacacaggctgcaggagcaggaggaggaggagctgcagtcagtcctggagggggttgcagacgggcaggtcccaccatcagccatagatcctcgctggcttcggcccacaccaccagcgctggacccccagacagagcccctcatcttccaacagttggagattgaccattatgtgggcccagcgcagcctgtgcctggggggcccccaccatcccgcggctccgtgcctgtgctccgcgccttcggggtcaccgatgaggggttctctgtctgctgccacatccacggcttcgctccctacttctacaccccagcgccccctggtttcgggcccgagcacatgggtgacctgcaacgggagctgaacttggccatcagccgggacagtcgcggggggagggagctgactgggccggccgtgctggctgtggaactgtgctcccgagagagcatgtttgggtaccacgggcacggcccctccccgttcctgcgcatcaccgtggcgctgccgcgcctcgtggccccggcccgccgtctcctggaacagggcatccgtgtggcaggcctgggcacgcccagcttcgcgccctacgaggccaacgtcgactttgagatccggttcatggtggacacggacatcgtcggctgcaactggctggagctcccagctgggaaatacgccctgaggctgaaggagaaggctacgcagtgccagctggaggcggacgtgctgtggtctgacgtggtcagtcacccaccggaagggccatggcagcgcattgcgcccttgcgcgtgctcagcttcgatatcgagtgcgccggccgcaaaggcatcttccctgagcctgagcgggaccctgtcatccagatctgctcgctgggcctgcgctggggggagccggagcccttcctacgcctggcgctcaccctgcggccctgtgcccccatcctgggtgccaaggtgcagagctacgagaaggaggaggacctgctgcaggcctggtccaccttcatccgtatcatggaccccgacgtgatcaccggttacaacatccagaacttcgaccttccgtacctcatctctcgggcccagaccctcaaggtacaaacattccctttcctgggccgtgtggccggcctttgctccaacatccgggactcttcattccagtccaagcagacgggccggcgggacaccaaggttgtcagcatggtgggccgcgtgcagatggacatgctgcaggtgctgctgcgggagtacaagctccgctcctacacgctcaatgccgtgagcttccacttcctgggcgagcagaaggaggacgtgcagcacagcatcatcaccgacctgcagaatgggaacgaccagacccgccgccgcctggctgtgtactgcctgaaggatgcctacctgccactgcggctgctggagcggctcatggtgctggtgaacgccgtggagatggcgagggtcactggcgtgcccctcagctacctgctcagtcgtggccagcaggtcaaggtcgtatcccagctgttgcggcaggccatgcacgaggggctgctgatgcccgtggtgaagtcagagggcggcgaggactacacgggagccactgtcatcgagcccctcaaagggtactacgacgtccccatcgccaccctggacttctcctcgctgtacccgtccatcatgatggcccacaacctgtgttacaccacgctccttcggcccgggactgcacagaaactgggcctgactgaggatcagttcatcaggacccccaccggggacgagtttgtgaagacctcagtgcggaaggggctgctgccccagatcctggagaacctgctcagtgcccggaagagggccaaggccgagctggccaaggagacagaccccctccggcgccaggtcctggatggacggcagctggcgctgaaggtgagcgccaactccgtatacggcttcactggcgcccaggtgggcaagttgccgtgcctggagatctcacagagcgtcacggggttcggacgtcagatgatcgagaaaaccaagcagctggtggagtctaagtacacagtggagaatggctacagcaccagtgccaaggtggtgtatggtgacactgactccgtcatgtgccgattcggcgtgtcctcggtggctgaggcgatggccctggggcgggaggccgcggactgggtgtcaggtcacttcccgtcgcccatccggctggagtttgagaaggtctacttcccatacctgcttatcagcaagaagcgctacgcgggcctgctcttctcctcccggcccgacgcccacgaccgcatggactgcaagggcctggaggccgtgcgcagggacaactgccccctcgtggccaacctggtcactgcctcactgcgccgcctgctcatcgaccgagaccctgagggcgcggtggctcacgcacaggacgtcatctcggacctgctgtgcaaccgcatcgatatctcccagctggtcatcaccaaggagctgacccgcgcggcctccgactatgccggcaagcaggcccacgtggagctggccgagaggatgaggaagcgggaccccgggagtgcgcccagcctgggcgaccgcgtcccctacgtgatcatcagtgccgccaagggtgtggccgcctacatgaagtcggaggacccgctgttcgtgctggagcacagcctgcccattgacacgcagtactacctggagcagcagctggccaagcccctcctgcgcatcttcgagcccatcctgggcgagggccgtgccgaggctgtgctactgcggggggaccacacgcgctgcaagacggtgctcacgggcaaggtgggcggcctcctggccttcgccaaacgccgcaactgctgcattggctgccgcacagtgctcagccaccagggagccgtgtgtgagttctgccagccccgggagtctgagctgtatcagaaggaggtatcccatctgaatgccctggaggagcgcttctcgcgcctctggacgcagtgccagcgctgccagggcagcctgcacgaggacgtcatctgcaccagccgggactgccccatcttctacatgcgcaagaaggtgcggaaggacctggaagaccaggagcagctcctgcggcgcttcggaccccctggacctgaggcctggtgaccttgcaagcatcccatggggcgggggcgggaccagggagaattaataaagttctggacttttgctaaaaaaaaaaaaaaaaaaaaaaaa

SEQ ID NO: 1805 - DNA, 4464 bp, Homo Sapiens
  NM_002693
gcggaccggccgggtggaggccacacgctaccccgaggctgcgtaggccgcgcgaagggggacgccgtgccgtgggcctggggtcgggggagcagcagaccgggaagcaccgtgaggaccgaggatttggggtggaaggcaggcatggtcaaacccatttcactgacaggagagcagagacaggacgtgtctctctccacgtcttccagccagtaaaagaagccaagctggagcccaaagccaggtgttctgactcccagcgtgggggtccctgcaccaaccatgagccgcctgctctggaggaaggtggccggcgccaccgtcgggccagggccggttccagctccggggcgctgggtctccagctccgtccccgcgtccgaccccagcgacgggcagcggcggcggcagcagcagcagcagcagcagcagcagcagcaacagcagcctcagcagccgcaagtgctatcctcggagggcgggcagctgcggcacaacccattggacatccagatgctctcgagagggctgcacgagcaaatcttcgggcaaggaggggagatgcctggcgaggccgcggtgcgccgcagcgtcgagcacctgcagaagcacgggctctgggggcagccagccgtgcccttgcccgacgtggagctgcgcctgccgcccctctacggggacaacctggaccagcacttccgcctcctggcccagaagcagagcctgccctacctggaggcggccaacttgctgttgcaggcccagctgcccccgaagcccccggcttgggcctgggcggagggctggacccggtacggccccgagggggaggccgtacccgtggccatccccgaggagcgggccctggtgttcgacgtggaggtctgcttggcagagggaacttgccccacattggcggtggccatatccccctcggcctggtattcctggtgcagccagcggctggtggaagagcgttactcttggaccagccagctgtcgccggctgacctcatccccctggaggtccctactggtgccagcagccccacccagagagactggcaggagcagttagtggtggggcacaatgtttcctttgaccgagctcatatcagggagcagtacctgatccagggttcccgcatgcgtttcctggacaccatgagcatgcacatggccatctcagggctaagcagcttccagcgcagtctgtggatagcagccaagcagggcaaacacaaggtccagccccccacaaagcaaggccagaagtcccagaggaaagccagaagaggcccagcgatctcatcctgggactggctggacatcagcagtgtcaacagtctggcagaggtgcacagactttatgtaggggggcctcccttagagaaggagcctcgagaactgtttgtgaagggcaccatgaaggacattcgtgagaacttccaggacctgatgcagtactgtgcccaggacgtgtgggccacccatgaggttttccagcagcagctaccgctcttcttggagaggtgtccccacccagtgactctggccggcatgctggagatgggtgtctcctacctgcctgtcaaccagaactgggagcgttacctggcagaggcacagggcacttatgaggagctccagcgggagatgaagaagtcgttgatggatctggccaatgatgcctgccagctgctctcaggagagaggtacaaagaagacccctggctctgggacctggagtgggacctgcaagaatttaagcagaagaaagctaagaaggtgaagaaggaaccagccacagccagcaagttgcccatcgagggggctggggcccctggtgatcccatggatcaggaagacctcggcccctgcagtgaggaggaggagtttcaacaagatgtcatggcccgcgcctgcttgcagaagctgaaggggaccacagagctcctgcccaagcggccccagcaccttcctggacaccctggatggtaccggaagctctgcccccggctagacgaccctgcatggaccccgggccccagcctcctcagcctgcagatgcgggtcacacctaaactcatggcacttacctgggatggcttccctctgcactactcagagcgtcatggctggggctacttggtgcctgggcggcgggacaacctggccaagctgccgacaggtaccaccctggagtcagctggggtggtctgcccctacagagccatcgagtccctgtacaggaagcactgtctcgaacaggggaagcagcagctgatgccccaggaggccggcctggcggaggagttcctgctcactgacaatagtgccatatggcaaacggtagaagaactggattacttagaagtggaggctgaggccaagatggagaacttgcgagctgcagtgccaggtcaacccctagctctgactgcccgtggtggccccaaggacacccagcccagctatcaccatggcaatggaccttacaacgacgtggacatccctggctgctggtttttcaagctgcctcacaaggatggtaatagctgtaatgtgggaagcccctttgccaaggacttcctgcccaagatggaggatggcaccctgcaggctggcccaggaggtgccagtgggccccgtgctctggaaatcaacaaaatgatttctttctggaggaacgcccataaacgtatcagctcccagatggtggtgtggctgcccaggtcagctctgccccgtgctgtgatcaggcaccccgactatgatgaggaaggcctctatggggccatcctgccccaagtggtgactgccggcaccatcactcgccgggctgtggagcccacatggctcaccgccagcaatgcccggcctgaccgagtaggcagtgagttgaaagccatggtgcaggccccacctggctacacccttgtgggtgctgatgtggactcccaagagctgtggattgcagctgtgcttggagacgcccactttgccggcatgcatggctgcacagcctttgggtggatgacactgcagggcaggaagagcaggggcactgatctacacagtaagacagccactactgtgggcatcagccgtgagcatgccaaaatcttcaactacggccgcatctatggtgctgggcagccctttgctgagcgcttactaatgcagtttaaccaccggctcacacagcaggaggcagctgagaaggcccagcagatgtacgctgccaccaagggcctccgctggtatcggctgtcggatgagggcgagtggctggtgagggagttgaacctcccagtggacaggactgagggtggctggatttccctgcaggatctgcgcaaggtccagagagaaactgcaaggaagtcacagtggaagaagtgggaggtggttgctgaacgggcatggaaggggggcacagagtcagaaatgttcaataagcttgagagcattgctacgtctgacataccacgtaccccggtgctgggctgctgcatcagccgagccctggagccctcggctgtccaggaagagtttatgaccagccgtgtgaattgggtggtacagagctctgctgttgactacttacacctcatgcttgtggccatgaagtggctgtttgaagagtttgccatagatgggcgcttctgcatcagcatccatgacgaggttcgctacctggtgcgggaggaggaccgctaccgcgctgccctggccttgcagatcaccaacctcttgaccaggtgcatgtttgcctacaagctgggtctgaatgacttgccccagtcagtcgcctttttcagtgcagtcgatattgaccggtgcctcaggaaggaagtgaccatggattgtaaaaccccttccaacccaactgggatggaaaggagatacgggattccccagggtgaagcgctggatatttaccagataattgaactcaccaaaggctccttggaaaaacgaagccagcctggaccatagcactgcctggaggctctgtatttgctcccgtggagcttcatcggggtggtgcaggctcccaaactcaggctttcagctgtgctttttgcaaaagggcttgcctaaggccagccatttttcagtagcaggacctgccaagaagattccttctaactgaaggtgcagttgaattcagtgggttcagaaccaagatgccaacatcggtgtggactacaggacaaggggcattgttgcttgttgggtaaaaatgaagcagaagccccaaagttcacattaactcaggcatttcatttattttttccttttcttcttggctggttctttgttctgtcccccatgctctgatgcagtgccctagaaggggaaagaattaatgctctaacgtgataaacctgctccaaggcagtggaaataaaaagaaggaaaaaaaagactctatcttctcaaaaaaaaaaaaaaaaa

SEQ ID NO: 1806 - DNA, 4513 bp, Homo Sapiens
  NM_002698
ggctcggcccccagagagggtggggagatgacacagttgttcccccagccctggcggggcgggcagcatggttcactccagcatgggggctccagaaataagaatgtctaagcccctggaggccgagaagcaaggtctggactccccatcagagcacacagacaccgaaagaaatggaccagacactaatcatcagaacccccaaaataagacctccccattctccgtgtccccaactggccccagtacaaagatcaaggctgaagaccccagtggcgattcagccccagcagcacccctgccccctcagccggcccagcctcatctgccccaggcccaactcatgttgacgggcagccagctagctggggacatacagcagctcctccagctccagcagctggtgcttgtgccaggccaccacctccagccacctgctcagttcctgctaccgcaggcccagcagagccagccaggcctgctaccgacaccaaatctattccagctacctcagcaaacccagggagctcttctgacctcccagccccgggccgggcttcccacacagccccccaaatgcttggagccaccatcccaccccgaggagcccagtgatctggaggagctggagcaattcgcccgcaccttcaagcaacgccgcatcaagctgggcttcacgcagggtgatgtgggcctggccatgggcaagctctacggcaacgacttcagccagacgaccatttcccgcttcgaggccctcaacctgagcttcaagaacatgtgcaaactcaagcccctcctggagaagtggctcaacgatgcagagactatgtctgtggactcaagcctgcccagccccaaccagctgagcagccccagcctgggtttcgacggcctgcccggccggagacgcaagaagaggaccagcatcgagacaaacgtccgcttcgccttagagaagagttttctagcgaaccagaagcctacctcagaggagatcctgctgatcgccgagcagctgcacatggagaaggaagtgatccgcgtctggttctgcaaccggcgccagaaggagaaacgcatcaacccctgcagtgcggcccccatgctgcccagcccagggaagccggccagctacagcccccatatggtcacaccccaagggggcgcggggaccttaccgttgtcccaagcttccagcagtctgagcacaacagttactaccttatcctcagctgtggggacgctccaccccagccggacagctggagggggtgggggcgggggcggggctgcgccccccctcaattccatcccctctgtcactcccccacccccggccaccaccaacagcacaaaccccagccctcaaggcagccactcggctatcggcttgtcaggcctgaaccccagcacgggccctggcctctggtggaaccctgccccttaccagccttgatggcagcgggaatctggtgctgggggcagccggtgcagccccggggagccctggcctggtgacctcgccgctcttcttgaatcatgctgggctgcccctgctcagcaccccgcctggtgtgggcctggtctcagcagcggctgcggctgtggcagcctccatctccagcaagtctcctggcctctcctcctcatcctcttcatcctcatcctcctcctcctccacttgcagcgagacggcagcacagacccctggaggtccaggggggcccgaggcagggtccaaacctgagtgagggccagccatgcctcccctcccattcctctggtccctgccttggtcccttgcctgggaagagggcgaggaggccagtggtggggacgcagagggtcctcagagcaggagtgacaagggaggaaagaccaaaaaaacaaccaaccaaaaaaaaaaaaaaaaaggaaagaaactaaccaacaaaagagaaaaccaaaaataatcacaacagaaaccagctgccccaaaggaaccagaggtgaaaaacaaacaaaaaaaaaccaaaaacaaaccaaaaaaaaaaaaaacccacaaaatcaaacaaaccaaaaaaccagtcgcgagccagacctcagcgtgctcaccctcactgctacgacgccaaataaaaaccccagccaggggcggagaagcctccagcaggtcagacctcatgccaccgagccctggctgtgggaccaacccccaaccctgcctcccccgtgggggctacagaaggaaaaagagaagatgccagcttcctaatcccagcccccagccctgggccagcgaagacagggcacagcctgggcagatgggctggggcttagcaccacccaccaaatgttcttttccagaaggtgaaagagaaagggcctgaacaaccttacaccaaatattcagtagcttcatccaaaggatgtacagaatttttagcattgtgctcaacagaatgtgtccctaccatgtgtccccttctcccctggcccccagctctccccacctgggcagggggtcttgctttaacctcctccctccccccagcaggggagagttcaagggaaggcctgcggacaacttttcatcccctgttcctccctcttttcccctttgaagggtgggctaggccattttgccaagttctagctctcacaagtccctcctcaaccctgtcaccctcctctgctctggaactgactccctccccagcctatgggaaggtggaaatttcaggcaagaggggatgaagacattcagttgagggcattcagttgtctttttccatcctgtctgtttccctgaaaaaaaaaaaaattcatattccagtgcctatccgtgggatccttcacgttctttgacattaaccagaaaccaaaaagagaactcacctcgcttttcccaccctgtgcccctctggtactggcgaatgcctctccctccccccacatgcacgcacgcacacaccccagtggtggggttcctcgagatggcatccccatcagggtccatgtggtggggacagtgccacagcctgtggtccccatctgagagggcgcggtggtggccaccactcccacaagacctccacaactcttggctggaccctgtgtttgaccagccccggacacgtctccactgacgacggacagaggagagacaccactgggagccaccctgccctcctgctattgtggaggccaacaaagttttgaaccgaaaaccaaaaaaacagaaacaaacaaacaataaatttaaactagaaaaaaaatttatatatatatataaacatatatatatatatatatataaaagggaaagaagatgaggactcttcaagaataagatggaaccgcgaggcggagccaagcccctgcaccggtggtccaggcccttgttccccaaggcggatggaaggacggatgcttctttctcttcacaaatacctcatggacgttgtctttgggaaagccggagggggcggctggggcagggcctgtccctcggccagggcagatggaagcgggtgggcggggctgagagagggtatcagggacaggggtgaagagccccaaactcccctcccaaatcaactgaaaaagctttaaaaaaagacaggaaaaaaaggagtaagaaagcaaaaagaacagatgaaggaaaacttaacaacttttgggtggtttgattcctcctttgatttctttttcggttctcttttgtctgacctctctcctcccctccttcctctctcctcccctccttcctctctcctctcctccttcctgtctcctctctctccctttgctctcctctcttctctctcaatcttgttctttctgtgtctctcctcaaaccaaagtgttgcagtgaaggacacgagccattgaaatcagggtggggcctgacagccgtagtgtggcccctgccccttgttgggcaggagcagagagagaggagagccctgagaccgcagggctttggcctgggcagcttccactttctgccggacactctgaggagaggcagatggagctccaggcctcagcgttctcttttttccttgtctcccttctcccacccgggaaatgaaactgttgggctgggcgacggaggcagcagagactcggccattgcaggggcctctgggtgccttgtccgggcagtggtgaagtagccgcccctcccaccccggcacgatggggcctggcacctcgtctacccaacctcaccggaatgtaagcatctccgctgaacgactccctgcccttaccctacctctgagtttgtccatgtttatttcctgaagagagaagggactggcaagagggcttgggccccagcccaagggtggagagggggccaagggctcctgaccaaataggaaggacatttgagcagagcaaaatgaaaggaattacaaccaaaaaccccctccgagaagacaggcagcatggaaggcatggtggagatgactcaaacaaaaactatgattctagaccaaaaaggaaaaaaaaaaaaaaaaaa

SEQ ID NO: 1807 - DNA, 4715 bp, Homo Sapiens
  NM_002702
aggatcaagggaatcgtggctgcctgccccactgagcccactgccccaaccccctctccttcttgtgccagatcccttgggattggagccgctgtgagcagtggctaggcatttgagcacctctgtctctgccttgctccatagcagctgctgtgctgaacaccgctcttccggcaccggtacaagctgccgcaccagtacaggcctcctcgacggcccaaccccggccaccagcccagccccagacgctgttccagacccagccgctgctgcagaccacacctgccatcctcccgcagcccactgctgccaccgctgctgcccctacccccaagccagtggacacccccccacagatcaccgtccagcctgcaggcttcgcatttagcccaggaatcatcagtgctgcttccctcgggggacagacccagatcctggggtccctcactacagctccagtcattaccagcgccattcccagcatgccagggatcagcagtcagatcctcaccaatgctcagggacaggttattggaacccttccatgggtagtgaactcagctagtgtggcggccccagcaccagcccaaagcctgcaggtccaggccgtgaccccccagctgttgttgaacgcccagggccaggtgattgcgaccctggctagcagccccctgcctccacctgtggctgtccggaagccaagcacacctgagtcccctgctaagagtgaggtgcagcccatccagcccacaccaaccgtgccccagcctgctgtggtcattgccagcccagctccagccgccaagccatctgcctctgctcctatcccaattacctgctcagagacccccaccgtcagccagttggtgtccaagccacatactccaagtctggatgaggatgggatcaacttagaagagatccgggagtttgccaagaactttaagatccggcggctctcgctgggccttacacagacccaggtgggtcaggctctgactgcaacggaaggtccagcctacagccagtcagccatctgccggttcgagaagctagacatcacacccaagagtgcccagaagctaaagccggtgctggaaaagtggctaaacgaagctgaactgcggaaccaggaaggccagcagaacctgatggagtttgtgggaggcgagccctccaagaaacgcaaacgccgcacctccttcaccccccaggccatagaggctctcaatgcctattttgagaagaacccactgcccacaggccaggagatcactgaaattgctaaggagctcaactacgaccgtgaggtagtgcgggtctggttctgcaatcggcgccagacgctcaagaacaccagcaagctgaacgtctttcagatcccttagggctcagcccctggccctgtgttctagcactttgtccatttcccgtggcatccggctgcagccactgccatgacagcacctgtcattttgccacgtgcagctgtgctcaccccaggtcatcagactccaccgtgtgcatgtgcatcaatgtccctcttttctcccacacatctcacatcatggggaggccagagggggccacacgagagctccaggctctgggctggtcactccgaagaagaggatttgtgacgtcacttagagaagcaccttgctagcatggtttctgaagggtgaattctggtggggaaccagaaactccctgtctttggggcagggctaaagcagctcctaaggaccactggccattagctcttgcttttgatggcattctctttccaccttgtcttctcctttgctcctctgtgttagtgtggcaggtatgacaactcatccagtggaaacacagcctcacactgcccttccgccccccacactttgcctgcaggtgcaccgaaaggacctgggagataaaattcaaaaaagtgtgatgtgctgctcagaaggtcagactccatgtctgccttgacctcaaggtcagaaggttcccaaacccctggggctggaacatgggatctcctcttccacctcttcctggttcctttgcggggaaaattgcactaaaacagaaccttttcttaatccatgttggaaggaagcaacagtgaactctacctgttctggagttctcctgggtctgcagaaggttgggaatttagaaaataaggctgttctttcatattttaatttaatctctgtcaatggccatccctcccacaaaaaaacgtgggttaagagaacttgcagactggatatgcaagcaaacgggcaactctggagaaaaataaggaaaggaatgctgactttctctttctttctcttgtccccacacccattcccaacccaatactggggccttctcaaaaggagcaaattaaacaataaaccagacagcaaggccctgggggaaaggacaacatcctgaaataaatgatggagcccaggaaggtctcttgtggaagttgacttaactctaattttctttgtaactttaagccttggatacgggaggagaaatctcattttgtcgagtctcagaccatgtctgtgtgtaagcaatccccacagtgtcctctgagccaaggacacccccagatcagattgagttttgcttctagacggggtagctatggtaccttgggggttagctctcatccaagctgttaagtgagtttccagcctcactgtggctggaaagcccctaaaattcagtatgtaactccaggaagtcaggagagaactgagatttgcctagatgaccacaggcttgcggtgtagattatccctaaagggccccaagtcacgggggtcaaccacccctgtcttcagtactcttatccttacagaggctggtctctaacagctgcctccagtggacctcccatgatccaccctgagggaaggaccgtcagctggggacacatcaccacctctgtcagtcactggtgcagagccacctcctagcctagcttcctctggtgtcctgtttcctttcccacttactgttggtgcctcccaggccctgcagtgccagcgtggccaccctcttggtagcctggccagtaagaggaggacagttgtgtgctgaattagcacacgcacgtgcagcgcgcacagacgcgcgcacacacacacacatacacgctctgctgcatttggacaaaccatgcctgccagagtgtagcagaggtgaggaagcaggtgggcagcttgcctgacccagcttttcaggagagcgtgtctccaacagagagtctccacactctagttcagggttatcgacctgcctcaatgagatgacagactcatttgggaggggtgttgcaaacaagttttcagtgagaatagttaagttccagagcttgtaaaggattcagtgactgacacttcagtaaattaggccaggcacattggcttatgcctgtaattccaacactttggaaggccgaggtgggcggatcatttgaggtctggagttcgagaccagcctgaccaacatggtgaaaccccgtctctactaaaaatacaaaaattagccaggtgtggtagtgcacatctgtaatcccagctacttgggaggtggaggcaggagaattgcttgaaccctggaggttgcaatgagctgagatcacactacttcactccagcctgggtgacagagcaagactcggtctcaaacaaacaaaaacttatggcgatgcaggttttcatgctcagacgcttgcattcaggtatgctttcttttttgagagagacaaatgggtcacagctggcaccctgggaatagcacataatccagggtgtgtctgtggtggtggacgtgcaggggaacaccatctgtcctgtgtcatgatgggaaaacaatcatgaaccactggtctaaattaggcctggccatgctttctcagcccctccctcatttaaatttgtcttcccaaagctgagctaaaactaaaccatttctcctctgctggaatgatggattggtcattcagaggaacaataccaggggtgggaggtttgcaggctgagttccccaggcatgggggtgcagggtgtccctgaggtttacccaaagcacagctcgctggcctgtgacctctgcccttcctcccacagtgtaagaccccccaggaagcagctggggcctgaacctctcacctaggaggtaggtttattttattttttgttagcatcaggctctgaaggagttggtatacattttgttttgaaaacatcttctggacttacaccagagcttagtgtcgtctttactatggaaagagaggagaatggacagaaatggtttaactgtgtggagttttgtttgttttgttttaaatggaagaaagaccaaaactttcctggtggatcagctagggcctttgaccctgcattaccacggcattttatccaggtgaagtccagggaaagaactcagccaaatggactaaggaacacacgagtttggaatgcgagactctgacatttttgtgttcttggaaatccaattaccttcccatgcccagatttccttcctgcctcttggaccaggctctggcactgaggttctcactgttcccaacacagacaaagcttcctgagggctggaggggcagcaaggggagaggagaatggggaagaagcgcttgatgtagttgtgtggaataaacagtattttttcttttgtaaaaaaaaaaaaaaaaa

SEQ ID NO: 1808 - DNA, 3756 bp, Homo Sapiens
  NM_002703
gactcggagggggaggagcagggctgagctggccacgccacctagggacagcgcgcgccgccgcagtagctggggccaccctcgggaaggaagagcctgtcgcgagcgcgagcttctgagctcgacgggccgagctggcagctggttggtgcttacaccttggccgcagcggcaggtccttccacgtgctttcggcggcgacatggagctggaggagttggggatccgagaggaatgtggcgtgttcgggtgcatcgcctcaggagagtggcccacgcagctggatgtaccgcatgtgatcactctgggactcgtggggctgcagcaccggggtcaggagagtgctggtattgtgactagtgatgggagttcggtgccaacattcaaatcacacaagggaatgggtcttgtaaatcacgtctttactgaagacaatttgaaaaaattatatgtttcaaatcttggaattggacacaccaggtatgccaccacaggaaaatgtgaactagaaaattgtcagcccttcgttgttgaaacacttcatgggaagatagctgtggcacataatggcgaattggtaaatgctgctcgattaaggaaaaagcttctgcgtcatggtattggtctgtctacaagttctgatagtgaaatgattacccagttactggcgtatacccctcctcaggaacaagatgacaccccagactgggtagccaggattaaaaacttgatgaaggaagcacccacagcatactccctgcttataatgcacagagatgttatttatgcagtacgagatccttatggaaatcgtcccttatgcattggtcgtcttattccagtgtctgatataaatgacaaagagaaaaaaacatcagaaacagaaggatgggtggtgtcttcagaatcttgtagcttcttatctattggtgcaagatattaccgtgaagtcttgcctggagaaattgtggaaatatccagacacaatgtccaaactcttgatattatatcaaggtctgaaggaaacccagtggctttttgtatctttgaatatgtttattttgcaagaccagacagtatgttcgaagaccaaatggtttatacagtaagataccgttgtggccagcagctagcgattgaagcacctgtggatgcagatttggttagcactgttccagaatctgctacgcctgctgctcttgcttacgcaggaaagtgtggacttccatatgtggaggtgctgtgtaaaaaccggtatgtagggagaaccttcattcagccaaacatgaggttaagacaacttggtgttgcaaaaaaatttggagtattgtcagacaactttaaaggcaaaagaattgttcttgtagatgattcaattgtcagaggcaataccatctcacctataataaaactgctcaaagaatctggtgcaaaagaggtacacattcgagtagcttcaccaccaattaaatatccatgcttcatgggaataaacattcctacaaaagaagagctcattgccaataaaccagaatttgatcaccttgcagaatatctaggagcaaacagtgttgtgtatctgtcagtagaaggactggtttcatctgtacaagaagggataaagtttaaaaaacagaaagagaaaaagcacgatattatgatccaagaaaatggaaatggtctggaatgttttgaaaagagtggtcattgtacagcttgtctcactggaaaatatcctgtagaattagaatggtagctggtagggttggatgtgtgtagtttcaagatagaaagttggtcaagaagttatagtggtcacacctcatctatttactgttactcagttggtacaatgtaaaatgccatgcttatgtttataagttttgagattttttttttttctgaaaaggataccaaagtgcgataactgaacatttccaattgcatataatacaacaatatgtggtgttcttttttttacacaagcattggctagcctttttaacctggtcagagaaggcaggtggtcactgacatttcccaagtccatgctttaaagggtttgcaagaagttagggttaaggagaggtgatgccaacaagacaggtgagttaaatataccatttcacacaaagtttgaatagaatacattatacctcataggtgtctagcctctacagttctggctgtagttatgaccttggcttccctgtctaactgtagacaaatctttaaaaaaaaataataataatctggtgcctcagtttccccacatgtgcaatgggatacttattaaataattaataagaatgtgaataagtgtcatacttttgtgatttgagccatcatttcacttctgattttaagacaactcatgattgttagctttcagaaagctaatgattgttaactttttgaaattagtttacaattaattaagatttcattatgatggaaggagacataattggcagatctttgccatctctctttgagatgtcctaaaaagggttgtaaaaatctgtgaaaaagtttttcctacatttgactagaaaatgtgatccatagtatttagtgccctgatactataagctcagcaagtaacctggtacatttgaaataaaaaccaaatttttagattcaaacaatccctttatccttaatttaattaattatcatatgctttttttaatgaagtgcttgatcacttgcaaacatatatacatgtagatgtacatatacatgtacacatacacataaatattattgcaattaagtgatcaagtacagacacaataggggccagttttgtttaaggatcaaagagacaaccactttggggaattagtatcaacttacaatccaagtccaagtatcatcttataatcacttttttctactatattaagatctaatgaatttgatttcttttttgaagttttttcttgtaacatctgagattagaagtttaagatgacttgaccccaaacctttgtttatgtaagaatttttaaacataaaagtgtttgtttctgttatgttaccataatttgatgtatatagtgtccagatccatttagaaatttaatatttattaataactgaaactgtttgtcttcctttggtatatagtctcgcatattatattatagcaggccaagataaaattttgacagctctttaagcccacatgcagcagtgggtcagataaccctgtggcagtgacacgggcaaattggcatttgaataaagccctgggaccacctcaacatgcgtagcctcttgtcttaaatgtactccccatggcagcatggaggaggcaagacctgtgggtcaattttgaactggccttactttgatttttaaaacaagagactcagggaaagtactaaaccaaaatctctgattttactttgcgttttctgtagtttttgttttactgagatgcttttgtaaaggaaaataatactgtgacagtttagtaattctacagattcttaatatttctccatcatggccttttacttcacaattttctgaagtctgaattcaattacaatttttttttaccaatttaatctcaaatgttgtttaactgctttaaattcatatacgtagagtattataaactgcagagatgaaaaatgtgttttcacgggatttatattgtgaactaaactaagcctactttttgtgacttatttgtgatgccttgttgataaatatgtgtaataagtatgtttaaaaaaaaaaaaa

SEQ ID NO: 1809 - DNA, 1307 bp, Homo Sapiens
  NM_002704
acttatctgcagacttgtaggcagcaactcaccctcactcagaggtcttctggttctggaaacaactctagctcagccttctccaccatgagcctcagacttgataccaccccttcctgtaacagtgcgagaccacttcatgccttgcaggtgctgctgcttctgtcattgctgctgactgctctggcttcctccaccaaaggacaaactaagagaaacttggcgaaaggcaaagaggaaagtctagacagtgacttgtatgctgaactccgctgcatgtgtataaagacaacctctggaattcatcccaaaaacatccaaagtttggaagtgatcgggaaaggaacccattgcaaccaagtcgaagtgatagccacactgaaggatgggaggaaaatctgcctggacccagatgctcccagaatcaagaaaattgtacagaaaaaattggcaggtgatgaatctgctgattaatttgttctgtttctgccaaacttctttaactcccaggaagggtagaattttgaaaccttgattttctagagttctcatttattcaggatacctattcttactgtattaaaatttggatatgtgtttcattctgtctcaaaaatcacattttattctgagaaggttggttaaaagatggcagaaagaagatgaaaataaataagcctggtttcaaccctctaattcttgcctaaacattggactgtactttgcatttttttctttaaaaatttctattctaacacaacttggttgatttttcctggtctactttatggttattagacatactcatgggtattattagatttcataatggtcaatgataataggaattacatggagcccaacagagaatatttgctcaatacatttttgttaatatatttaggaacttaatggagtctctcagtgtcttagtcctaggatgtcttatttaaaatactccctgaaagtttattctgatgtttattttagccatcaaacactaaaataataaattggtgaatatgaatcttataaactgtggttagctggtttaaagtgaatatatttgccactagtagaacaaaaatagatgatgaaaatgaattaacatatctacatagttataattctatcattagaatgagccttataaataagtacaatataggacttcaaccttactagactcctaattctaaattctacttttttcatcaacagaactttcattcattttttaaaccctaaaacttatacccacactattcttacaaaaatattcacatgaaataaaaatttgctattga

SEQ ID NO: 1810 - DNA, 2165 bp, Homo Sapiens
  NM_002707
gtcccgttaccgcctcctgctcctgccgcgcgcacccccggggcttcggctccggcacgggtcgcgcccagctttcctgcacctgaggccgccggccagccgccgccatgggtgcctacctctcccagcccaacacggtgaagtgctccggggacggggtcggcgccccgcgcctgccgctgccctacggcttctccgccatgcaaggctggcgcgtctccatggaggatgctcacaactgtattcctgagctggacagtgagacagccatgttttctgtctacgatggacatggaggggaggaagttgccttgtactgtgccaaatatcttcctgatatcatcaaagatcagaaggcctacaaggaaggcaagctacagaaggctttagaagatgccttcttggctattgacgccaaattgaccactgaagaagtcattaaagagctggcacagattgcagggcgacccactgaggatgaagatgaaaaagaaaaagtagctgatgaagatgatgtggacaatgaggaggctgcactgctgcatgaagaggctaccatgactattgaagagctgctgacacgctacgggcagaactgtcacaagggccctccccacagcaaatctggaggtgggacaggcgaggaaccagggtcccagggcctcaatggggaggcaggacctgaggactcaactagggaaactccttcacaagaaaatggccccacagccaaggcctacacaggcttttcctccaactcggaacgtgggactgaggcaggccaagttggtgagcctggcattcccactggtgaggctgggccttcctgctcttcagcctctgacaagctgcctcgagttgctaagtccaagttctttgaggacagtgaggatgagtcagatgaggcggaggaagaagaggaagacagtgaggaatgcagcgaggaagaggatggctacagcagtgaggaggcagagaatgaggaagatgaggatgacaccgaggaggctgaagaggacgatgaagaagaagaagaagagatgatggtgccagggatggaaggcaaagaggagcctggctctgacagtggtacaacagcggtggtggccctgatacgagggaagcagttgattgtagccaacgcaggagactctcgctgtgtggtatctgaggctggcaaagctttagacatgtcctatgatcacaaaccagaggatgaagtagaactagcacgcatcaagaatgctggtggcaaggtcaccatggatgggcgagtcaacgggggcctcaacctctccagagccattggggaccacttctataagagaaacaagaacctgccacctgaggaacagatgatttcagcccttcctgacatcaaggtgctgactctcactgacgaccatgaattcatggtcattgcctgtgatggcatctggaatgtgatgagcagccaggaagttgtagatttcattcaatcaaagatcagccagcgtgatgaaaatggggagcttcggttattgtcatccattgtggaagagctgctggatcagtgcctggcaccagacacttctggggatggtacagggtgtgacaacatgacctgcatcatcatttgcttcaagccccgaaacacagcagagctccagccagagagtggcaagcgaaaactagaggaggtgctctctactgagggggctgaagaaaatggcaacagcgacaagaagaagaaggccaagcgagactagcagtcatccagacccctgcccacctagactgttttctgagccctccggacctgagactgagttttgtctttttcctttagccttagcagtgggtatgaggtgtgcagggggagctgggtggcttcactccgcccattccaaagagggctctccctccacactgcagccgggagcctctgctgtccttcccagccgcctctgctcctcgggctcatcaccggttctgtgcctgtgctctgttgtgttggagggaaggactggcggttctggtttttactctgtgaactttatttaaggacattcttttttattggcggctccatggccctcggccgcttgcacccgctctctgttgtacactttcaatcaacactttttcagactaaaggccaaaacctaatcgtaaaaaaaaaaaaa

SEQ ID NO: 1811 - DNA, 2483 bp, Homo Sapiens
  NM_002710
actccccgcgcgcatccgtgcgccgcccgaggctgtctaaggagtcggcggccattttgttcttctcgtggttccagtggggagagaaggaggaagtagggagcggggtggcaggggggggacccgccgcggctgctgccaccgccgccaccaccgcctctgctcgtggcgtgggaaaggaggtgtgagtcccgggcgcgagccggcggcggcgccgctgcgggagggtcggcggtgggaaggcgatggcggatttagataaactcaacatcgacagcattatccaacggctgctggaagtgagagggtccaagcctggtaagaatgtccagcttcaggagaatgaaatcagaggactgtgcttaaagtctcgtgaaatctttctcagtcagcctatcctactagaacttgaagcaccactcaaaatatgtggtgacatccatggacaatactatgatttgctgcgactttttgagtacggtggtttcccaccagaaagcaactacctgtttcttggggactatgtggacaggggaaagcagtcattggagacgatctgcctcttactggcctacaaaataaaatatcctgagaatttttttcttctcagagggaaccatgaatgtgccagcatcaacagaatttatggattttatgatgaatgtaaaagaagatacaacattaaactatggaaaactttcacagactgttttaactgtttaccgatagcagccatcgtggatgagaagatattctgctgtcatggaggtttatcaccagatcttcaatctatggagcagattcggcgaattatgcgaccaactgatgtaccagatcaaggtcttctttgtgatcttttgtggtctgaccccgataaagatgtcttaggctggggtgaaaatgacagaggagtgtccttcacatttggtgcagaagtggttgcaaaatttctccataagcatgatttggatcttatatgtagagcccatcaggtggttgaagatggatatgaattttttgcaaagaggcagttggtcactctgttttctgcgcccaattattgcggagagtttgacaatgcaggtgccatgatgagtgtggatgaaacactaatgtgttcttttcagattttaaagcctgcagagaaaaagaagccaaatgccacgagacctgtaacgcctccaaggggtatgatcacaaagcaagcaaagaaatagatgtcgttttgacactgcctagtcgggacttgtaacatagagtatataaccttcatttttaagactgtaatgtgtactggtcagcttgctcagatagatctgtgtttgtgggggcccttccttccatttttgatttagtgaatggcatttgctggttataacagcaaatgaaagactcttcactccaaaaagaaaagtgttttgttttttaattctctgttccttttgcaaacaattttaatgatggtgttaaagctgtacaccccaggacagtttatcctgtctgaggagtaagtgtacaattgatcttttttaattcagtacaacccataatcatgtaaatgctcattttctttaggacataaagagagccctagggtgctctgaatctgtacatgttcttgtcataaaatgcatactgttgatacaaaccactgtgaacattttttatttgagaattttgtttcaaagggattgctttttcctctcattgtcttgttatgtacaaactagtttttatagctatcaacattaggagtaactttcaaccttgccagcatcactggtatgatgtatatttaattaaagcacacttttccccgaccgtatacttaaaatgacaaagccattcttttaaatatttgtgactctttcctaaagccaaagtttctgttgaattatgttttgacacacccctaagtacaaggtggtatggttgtatacacatgctgccttcttggggattcaaaaacaggtttttgattttgaatagcaattagtgatatagtgctgtttaagctactaacgataaaaggtaataacattttatacaatttccatatagtctattcattaagtaatctttttacagttgcatcaggcctgaacccgtccattcagaaagcttcaaattatagaaacaatactgttctatacgagtgaccgattatgctttctttggcctacattctttattctgcggtgaagttgaggcttataagttaaaacaaaggaactaacttactgtccaccagtttatacagaactcacagtacctatgacttttttaaactaagatctgttaaaaaagaaatctgtttcaacagatgaccgtgtacaataccgtgtggtgaaaatgaattcagacttattaaatgatgaacttgttaaatcttctcagtgtctatttatcagcacaatacacacaggagaactgttgatggcatattgaatagattttcctgaataaattgctctggaaaccac

SEQ ID NO: 1812 - DNA, 1299 bp, Homo Sapiens
  NM_002712
gaattggcagccaacatggcggcggaacgcggcgcggggcagcaacagtcgcaggagatgatggaggttgacaggcgggtcgagtctgaagaatccggcgatgaagaagggaagaaacacagcagtggcatcgtggccgacctcagtgaacagagcctgaaggatggggaggagcggggggaggaggacccagaagaagaacatgagctgcctgtggacatggaaaccatcaacctggacagagatgcagaggatgttgatttgaatcactatcgcatagggaagattgaaggatttgaggtactgaagaaagtgaagactctctgcctccgccaaaatttaattaaatgcattgagaatctggaggagctacagagtcttcgagagctggatctttacgacaaccagatcaagaagattgagaatctggaggcgctaacagagctggagattctagatatttcttttaatctgctgagaaacatcgaaggggttgacaagttgacacgactgaaaaaactcttcttggtcaacaataaaatcagtaaaattgagaacttaagcaacttacatcaactacagatgctagagctgggatctaaccgcatccgggcaatcgaaaatatcgacaccttaaccaacctggagagtttgtttttggggaaaaacaaaattactaaacttcagaacctggatgcgctcaccaacctgacagtcctcagtatgcagagcaaccggctgaccaagatcgagggtctgcagaacctggtgaacctgcgggagctgtaccttagccacaatggcatcgaggtcatcgagggcctggagaacaataacaaactcacgatgttggacattgcatcaaatagaatcaaaaagattgaaaatatcagccatctaacagagctgcaagagttctggatgaacgacaatctccttgagagctggagcgacctcgacgagctgaagggagccaggagcctggagacagtgtacctggagcggaaccccttgcagaaggacccccagtaccggcggaaggtcatgctcgccctcccctccgtgcggcagatcgatgccacgttcgtcaggttctgagtccttcttggctcctcatgtggtccctctcctcggaagaactgcccagccacgggtttttaacccacctgttgctcctgaggtcgtcactatatcaacagtcacaaacccaatggcaataaaggcactgacgatagctggcgcgcgcgacgccacacaccattttcagatgccgttgcaattaaatcttgccacactgtc

SEQ ID NO: 1813 - DNA, 3945 bp, Homo Sapiens
  NM_002717
aggtgacgtcactggccaggccagccggcgccattttgaaagtggagtcgcctgcccctgccgctgccgccgccgccgtcgctgtcgtagtcgccgccgccgctgccggagaaagagcacgagcggggaagccccagagtgaaatctagcatcctgccggctggtctgcccgcccctccttccttttccccccggcccccgtcccctccccccgcaggtgccatccgccgccatccgccctctctacccccccatccccaggtgaggggggtgagttcaggaagcggagaccccgaggaacccagcagggtcaccatttgcagcgcaacatggcaggagctggaggagggaatgatattcagtggtgtttttctcaggtgaaaggagcagtagatgatgatgtagcagaagcagatataatttctacagtagaatttaatcattctggagaattactagcaacaggagataaaggtggtagagttgtcatctttcaacaggagcaggagaacaaaatccagtctcatagcagaggagaatataatgtttacagcaccttccagagccatgaaccagagtttgactacttgaaaagtttagaaatagaagaaaagatcaacaaaattaggtggttaccccagaaaaatgctgctcagtttttattgtctaccaatgataaaacaataaaattatggaaaatcagtgaaagggacaaaagaccagaagggtataacttgaaagaggaggatggaaggtatagagatcctactacagttactacactacgagtgccagtctttaggcctatggatctaatggttgaggccagtccacgaagaatatttgccaatgctcatacatatcacatcaactcaatttctattaatagtgattatgaaacatatttatctgcagatgatttgcggattaatctttggcatctggaaattacagacaggagttttaacattgtggatatcaagcctgccaatatggaagagctaacagaggtgattacagcagcagaatttcatccaaacagctgtaacacatttgtatacagcagcagtaaaggaactattcggctatgtgacatgagggcatctgccctctgtgatagacattctaaattgtttgaagaacctgaagatcccagtaacaggtcatttttttccgaaatcatctcctctatttcggatgtaaaattcagccatagtggtcgatatatgatgactagagactatttgtcagtcaaaatttgggacttaaatatggaaaacaggcctgtggaaacataccaggtgcatgaatacctcagaagtaaactctgttcactgtatgaaaatgactgcatatttgacaaatttgaatgttgttggaatggatctgacagtgttgtcatgactggatcttacaataatttcttcagaatgtttgacagaaacacaaagcgagacataaccctagaagcatcgcgggaaaacaataagcctcgcacagttctgaagcctcgcaaagtctgtgcaagtggcaagcgaaagaaagatgaaataagtgttgacagcctagacttcaataagaaaatccttcacacagcctggcaccccaaggaaaatatcattgccgtagctactacaaacaatctgtatatatttcaagacaaagtgaattagggttggcattcctagcagaagaacccacttcctgcttagttgagatagttgaatctagcattcgttcctataaaagagagaggtccattgtggcgcccctttccagtgtttgacagtgtgccattcgacaacacattgttatagctacatggagaaagctctgtggattcatcactgtggtgttctccatgtctgctagccatttaggtaagggtagggcacttttaatttaaatgacttcttgcaccatcttgcctaatggactagattggactgtatcaacattgatttactccactttttatgccttccattgtgatgacgtcaaacacagtgaaagccttcagtcatgctatgggatttaattgtgtatcctcattactgtatcatttgtggggtacaccccttccccctttttttaaattaaatacagctcattcttactgtggcttgtagcattcctcctcttctggcctcctggactgctccccttcatctcttacccttgccccctccacccggtcttggtggtggtatattaaaaaaagaaagaatgaaagcacacaaaatgagtcagtttggggtcagtggtataaagggggtatatgttgcaaacaaatgttttagtaacagttggctgtaatcactcctcgccgtgtctggcactgaaaataaggaaaaaaaacctactactgaataaaagtgacaaagaatggagaatctggttttctttttctttttaacctacctcttgtagccaatattttgtgtcatacctttgggcacagtgaaacaaaatgggttttcattgtttattggtatttttgttaattatttttaacaagtgttcttttacatgcaggaggagaggtattggttctctatgaacatattttgaatataggttttattaaggatttcacaatctataaatgctactagtttttttttttttttttaccatcatgagggtattggatacattgtgtctctatttaactcattatgtgttaatgaaattgttgtaaatgggaaccaaatttgtagaacttaatttctactttttagagtgcttaatttcatttttgccttactaaatagtcaaagacttataaaacatttttaacaagttagaacttttttgttattcagtcatataaaatagcagaaaactaacatcaagtgacactgcactaaatactttttttgtattttactgctatcaaatcagaatgaaatatactttaccatagatatttttcttctatttttggttttccaaagctatatgaaagacaaatttttaaaggtacagcgttcaaaaagtgcttaatgaactccaacagctgcctcaaataaaaatctgtatatgaatacattttccctaagcggtgatacattatccaaagatgaagagtgctcctatttttaataggtagaatgtacctttgtcagtcttgcagaaactttaatggagaagaaatggactttatttttgaaaggtgaaatgaacaggcatttatattattagagaatggtagtcttattttggtggaacataatgtaacaaccttgaatttcagaggactctgagtgcttctatgtccactacctattgttctattcttcaataatgaaaaagaattcaacgagccgaccgtgattccctctactacaaatattatgtcttgtaagttagcatttttagcacacaggagaaattttatgtaataaaattactgtatcttttggatttaacaaatttgtatttgaaacacattctatgtctgataattcttaatggcacttttactaatttatttggggatcttgggtacattcttaatttgtgtttattcttcacgcttgacttgcaagtgggatattcccctgccacaagtgtcaaacagtgatattcttcctgtgttgtgactggacagttttccagatcttttttgggagattttcctacagcttggttgtatgtcttgagataacaccaccaaacagctctcagaaattcttttttgattgatcagtagctatgatgattctcctccatgacactaaggattagtttatatatttaagagaaataattgctaaaattaaaatgcctctatcaaggaatgctattataaattattgttaacattctcaagtattaattttttaatttcattggtgtagcaaactctaagcccagccactcattttacatggccatggttaatctttttattaataaaaattatacttagaataaaaaaaa

SEQ ID NO: 1814 - DNA, 6814 bp, Homo Sapiens
  NM_002718
aggaggaggaggaggaggagaaggaggtaggggcctgcgggtggctgggcggggcgcgctcgggcctccgctcttcacgcgccgcattcgtagcccgagagtccgcgccgcggggaggcttggaggcaagcgctgcccgcgagctgagccgccggaggaggagccgcgggcaacgaggtttctctgtcattcacagaaaaatgaatcatttaaacctttggaggactcagttatcacaatacttctctactaccaactaagatttatgatagtaaatttatgagagcaaatttccatgttatagaactgttgaagaactaaaagaggatattctttcatcaaaataattctgcagtatcataatattactaaataaaattaaaaagcacaattattaaattattaaatttgccacacatgtgcagcagctactgtatcctgatagtgaccaaacctcaaatataaatggtttcccttcatgggaaaagccattatatttggaagaaaccactgaacattgttattaaatatattttcagctaactgtcatttaggagaattttcatgaaacaagttctagaaagttccaagtcccaccagtaagtggatttgatattatggcagcaacttacagacttgtggttagtactgtgaaccactacagcagcgtggtgatagaccggcgttttgaacaagctatacattattgcactggaacctgccacaccttcacacatggaattgactgcattgtggtacaccatagtgtttgtgcagacctcttgcacatccctgtgtctcagttcaaagatgcagatctgaactctatgtttctaccccatgaaaatgggctttcttcggctgaaggagactatccccaacaggccttcacaggcatacccagggtcaagagaggatctacatttcagaatacctacaacttaaaggatattgcaggagaagcaatcagttttgccagtgggaaaataaaagaattttcctttgaaaaactcaaaaactctaaccatgcagcttacagaaagggaaggaaagttaagtctgactcatttaataggaggtcagttgatttggacttgctttgtggccattataacaacgatgggaacgccccatcctttggtttactgcggagttcctcagttgaggaaaaacctttgtctcatagaaactcactggatacgaacctgacttccatgtttcttcaaaacttttctgaagaagacttggttactcagattttggaaaaacataaaatagataatttttcttctgggacagacataaagatgtgcttggacatcttattgaaatgctccgaggatttaaaaaaatgcacagacatcataaaacaatgcataaagaaaaaatcagggagtagcatcagtgaaggaagtggtaatgatacaatttctagctctgaaactgtctatatgaatgtaatgaccaggttagcatcctatctgaaaaagttaccatttgaattcatgcagtctgggaataatgaggctctagatttaacagaactgatcagtaatatgcctagcttacaactgactcccttctccccagtgtttggcactgaacaaccccctaaatatgaagatgttgtccagctctcagcttctgactctggacgatttcaaactattgaattgcaaaatgacaagcctaattctaggaagatggacactgtacaatccattccaaacaactccacaaattccttatataacttagaggtaaatgatcctagaactctaaaagctgtccaggtccaatcacagtcattaaccatgaatcctttagaaaatgtttcttctgacgacttaatggaaactctttatattgaagaagagtcagatggaaagaaagcattagataaaggacaaaagacagagaatggacctagtcatgagttattaaaggtaaatgaacatagagcagaatttccagaacatgctactcatcttaaaaaatgccccaccccaatgcaaaatgaaattggtaagatatttgagaaatcatttgttaatctacctaaggaagactgtaaatcaaaagtttctaaatttgaagagggagaccagagagattttacaaattccagtagccaggaagagatagataaattgttaatggatttggaatctttttcacagaagatggagacctctctaagagagccacttgcgaagggtaaaaactctaattttttaaatagtcacagtcagttgaccggtcagacccttgtagatcttgagcctaaatctaaagtctcttcacccatagaaaaagtctcaccttcctgtctaacaaggattattgaaaccaatggacacaaaatagaggaagaggatcgagccctcttactgcgaatcctggaaagcattgaagactttgctcaagaactagttgaatgcaaatcaagcagagggagcctatcacaagaaaaggaaatgatgcaaattctacaggaaaccttgacaacttcctcccaggccaatttatcagtctgtagaagtcctgttggtgataaagccaaagatactacttcagcagttttgattcagcagactccagaggtgatcaagattcaaaataaaccagaaaagaaacctggaacaccactcccacctccagccacctctccaagtagtccccgacctctctccccggttccccatgtgaataatgttgtgaatgcgccattgtccataaacattccacggttctactttcctgaaggactcccagatacctgtagtaatcatgaacaaactctaagcagaattgaaactgctttcatggatattgaagaacagaaagcagacatttatgaaatggggaaaattgcaaaggtctgtggctgtcctctctattggaaagcccccatgttcagggctgcagggggagagaagacaggatttgtgacagcacagtcattcattgccatgtggagaaagttgctgaataaccatcatgatgatgcctctaaattcatctgtcttctagcaaagcccaactgcagctctctagaacaggaggatttcatccctctacttcaggatgtggtggatacccaccctggtctcacgttcctgaaagatgctccagaattccactcccgctacatcaccacggttattcagagaatattctacacagtcaacagatcttggagtggaaaaattacttcgacagagataagaaaaagcaactttttgcaaaccctagcacttttggaagaagaggaagatataaaccaaattacagattacttctcctatgaacatttctatgttatttattgtaaattctgggaactagatactgatcacgacctctacatcagccaggccgatctgtctcgatacaatgaccaggcttcatcaagcaggattattgaaaggatattctctggtgcagtaacaaggggaaaaacaatacagaaagagggaagaatgagctatgcagattttgtttggtttttgatctctgaagaagacaaaaggaatcctaccagcattgagtattggttccgctgcatggatgtggatggagacggtgtactctccatgtatgagctggagtacttctatgaggagcagtgtgaacggatggaagccatgggaattgagcccttgccattccatgatttactgtgccagatgcttgacctagtgaagccagctgttgatggcaaaataactctaagagatctgaagaggtgcagaatggctcacatcttctatgacactttctttaatctggagaaatacttagaccatgaacagagagatccctttgcggtccagaaggatgttgagaacgatgggcctgagccctcagactgggaccggtttgccgctgaggagtatgagacgcttgttgcagaggaatctgcccaagcacaattccaggaaggctttgaagattatgaaacagatgaacctgcctctccctctgaatttggaaacaaaagcaataaaatattaagtgcaagccttccagagaaatgtggaaagcttcaatcagtggatgaagaatagctgccggtgtctacaatgaaacgaagatgtgtattttaaatgtttctttcttgtgaagagatgttctcgtttgcatactgctttttaaagactttgatttctccaagtgtgtatcatctgcactaggaactttgtttttaagcaataggtctggatacacatttaacttaggaggctcctccaatttgcctcaaacctcttacggagcttctcctcagaagtggtaccatcgccttccaaagtcagcactctacactcttgaatgtaccaaggatctcttggcgacagtaccaagcacggttctctacacaggtgactgaagttgcctctgtgttggctggcatccctgagtcccctccgggctcctatggagcctagaagaaaccttcacttgcagaaaacttgagtcagaaaattctggaacttgaaaaagtagtaagggcctccagaattgacttagccctagtaataaaagcactgccaaaacatctcagagacttcttttatgtatactggagttcaaagatctttaacttacctggcttaatgtaatttcacagttacctgccaaactactagtcactttacatcctcaggtattgtaaccactgggccttccaactttgctggcaagctctggtaacctccctgactgtggatcttatataaaatctcaagataaaaaaacacttcttaaatgaagtatagaatttgactcatacttggaaaaagcccttttaacttttatcttttattcattgaactattgaatgatgtatttaatatccaaattagttgataactgttttcacttcctatcagaaggcctgcttgaagacataaaggaataatgatacattaaaattcttactagatagatatattccttcctcccaggagtattagactagctaatagtaaaggcctcaacgttattctttacttcatgttgaaaacaattactacagatatttcatccacctcagtatttatcaaggaaatggaaaatgatacagctataaaagaaagctgttatttactgtagttgtagatgtattcactacagaatcctacatttttcagcaggccacagtccagccaaatcctataatatccttgaaaagaaactattaaaaaggatagacatttctgatgtaagtaaaacccccaagcaacttaatatccatctgtcagtcatcaacttttcccctagattttttttttaactagttctgaaagtgtcaagaatagcttccctttccaccctacctaggttccctccttgctggcataaaggccaagcagtgaaatgaaccttgggttagagttatggtaggcaaaaagaaaaggagaatttaggaaataaatatgctataaacaaggtacagtacagtgagagttaacaatcctaggaatcctgcctgtcacaagctcccagttccctgtcattttatcttcatgattagaactgatcttccatttaactattacagaaagcagtaactattgcaactatctaatagttcacacaaaagaattaaaagcttaaaaataatttttaggaaacacaatattcaaaatctaaacacactgataaattattaagattaagattatttatgtgataaatgaaatctcctaccaatccatccagcctttaccagggaagaaaagcaattatttcatttcagatagaaatacaaaaaaaaaaaaaatacttttcttagaagccagatatggtttaaatgttttattatccataatgatctaaactaataagattcaccaaaaagtaaaaattcaattttacaatatacatttttttttttaactatttggctttacctttttaccttggttctccttactgaagtcctcttgctttcactttgatctggtttttgaagtctcttaattattggctgggcatggtgactcatgcctgtaatcccggcactttgggaggccaagggaggtgatcacttgagcccaggagtaaagaccagcctgggcaacatagtgagactccgtctctacaaaaaataaatttagctgggcatggtggtgcacatctgtagtcctaccaacttgggaggctgaggcaggagaatcgcttgagccccaggcttcgaggctgcagtgagctatgattacgacactgcactccagcctaggcgacagagcaagaccccattctcttacaaagtctctattataaaagtacatccatcaataccattccatttaaaatgggctattgtaatttacccacattatcacattttcaggaattataagaatgtgttttattgtactccttccttggagctgaatgcaaggaatgtgaattctgaggaattaaggtagaatatatttgactttctggtaaagatcatggttaagtataatcattactgccaaactggaattttcaagttattataatatcccaggccccttgataaaagctgagggttatcatgaccttaatgctaattcaatgagaaatgagtttaatagcataacattaccaaggtaatcaaactaataaaattccatatatcttccctgcatcttgtcactgtgtaccattcaaagtgtttataaaactctagattcatcaaatgagatttgctcagctttttgaaatgttaagatgtgtttggagaaggctgcatgactttgtttttcccttttagcaaaactaaataaagttgtcaaatatgaatcatgttcattaaggt

SEQ ID NO: 1815 - DNA, 4256 bp, Homo Sapiens
  NM_002721
gaagcgggctctcttggggcctgcagtcggggttcagccagagggggcgccgggcgtaccgacgtagcggggagaaacgggtcgcgctttaacggcgctgcgcaggcgccactcacgggccggacgtgacgcagggaaagttccggcttcggcctccgccgctgccgccgccgctgctacagccgccgccgccgctgttgccgcggcttgttattcttaaaatggcgccgctagacctggacaagtatgtggaaatagcgcggctgtgcaagtacctgccagagaacgacctgaagcggctatgtgactacgtttgtgacctcctcttagaagagtcaaatgttcagccagtatcaacaccagtaacagtgtgtggagatatccatggacagttttatgacctttgtgaactgttcagaactggaggtcaggttcctgacacaaactacatatttatgggtgattttgtagacagaggttactatagtttggagaccttcacttaccttcttgcattaaaggctaaatggcctgatcgtattacacttttgcgaggaaatcatgagagtagacagataacacaggtctatggattttatgatgagtgccaaaccaaatatggaaatgctaatgcctggagatactgtaccaaagtttttgacatgctcacagtagcagctttaatagatgagcagattttgtgtgtccatggtggtttatctcctgatatcaaaacactggatcaaattcgaaccatcgaacggaatcaggaaattcctcataaaggagcattttgtgatctggtttggtcagatcctgaagatgtggatacctgggctatcagtccccgaggagcaggttggctttttggagcaaaggtcacaaatgagtttgttcatatcaacaacttaaaactcatctgcagagcacatcaactagtgcacgaaggctataaatttatgtttgatgagaagctggtgacagtatggtctgctcctaattactgctatcgttgtggaaatattgcttcgatcatggtcttcaaagatgtaaatacaagagaaccaaagttattccgggcagttccagattcagaacgtgttattcctcccagaacgacaacgccatatttcctttgaggccttcgcccatcctgctgacccatttttctgccctcttcttaccccaattttcttgtattaccctctacaatatactttttattgagcactttgctgctgaaatgctgcctcttgcctttttttttttaaattttaaattatctaaatttattgtttgttgtggtgtctatagcaaagtttttctatcaattttcccccatcccatccccaccctggactcatttgagaagacttgagaaatgtcttaatactcacactgctgcatgtagctcttgcttatttactggtctgggaaacaggatgtgtttcctttttttaaaagccaattgacagattacacctaaatactcctccttttgtatcattcagccttttgttttagtttggtaagttttaagaaatttcagcagcaaagttgttattcagtgggcacgatggactccaaatgcctcaagttatgtatacctgtcccagatgtaaacttcattgtcctttgttggatgatattttaaatggatataaaataaattggtctaaagggctgccctccttgttgtgtttttaaattttagttaaaaactgctacagcttatgactttgtactttaagataattgtattgatcttttttcagattccttgtattttttaataaagtaatcttaaataaaactcagataggttaagtgttagaaattttaaacagcttacattgttagcgtaaagttatcttttcttttttcctaatcagagttcttgaccctttggttattgagtttaaaacttcaattgaaattcaatagtatttatttttgaaaaaaatcactaaactgtgcctaaagaacataactgccatattaatgttttggtttatatcctctatagtaatagaaaaacatttaatacttgtaatgctgatgtgttaatttgataccagttgagtagaatgtgatcaatccagtttacaatctatcatgagtattattaactaaaatctatgtgcttttcaataggaatcattcttctcttgctgtaacacttgaccttaacttttagaaagtgttcatttttaaactgcaactggaaaggttgaaaagttaggactcttgtatttgtgaactgtaatctgaagcagattatttaaagtgtagaaaaagaaacaagttcttcttttttgcaaaggtctgtgataccatatttcagctttgtgtaagtaatttgaatatccaaagggttgtgatgatcagttctgaatatgcaactgtccacttaataaggacaagtattccagtatctcttatgactgtagtcataaatgatgttggaatgtacattttgtgaaatagttggtatccctttactatgattaatttttgttattccaggaaatacttgtgaagccagccaattaataaagcactttagcatctgttcaggtagttttgaaaacccacttttccccttcaggataagaacttccaggttacctaaaaatgcaataaaaatctttatagtctaagcttcttggcatataatttttcatcagggttttcttttattaattgagcacaatactgttttgatttaatttttttccctcaaaccacccagctccttacatagtttttaattatatagctatatgaaagaggtggctaagacatttgctgcacacacttgaactaatgttgggtcagtagcttcgtgttactgccctgatcccagtgtaattcaggtggaaaggtatttttatctcacagggatatgtagctatgtattttactaattgtgaaacactggaaattaatgatgcagacaacttggtgtggtctttgaacagctctctgcagtatttttttttttcctgttaccataaattgtatttaagtgcttgctttccacttaagttgtactaatagaaccggtaactcccagccctccctgtttgacactccttagcttagattgatgtagttgtttttgttatccctataatgtgacttttatttttaagtcattgtgtactgcatttgtttgtcactagttgggcacgtgccaataatattctctccattccttatctgccatctctgttttgcctgatttctcttcaactgaataatggctttttgcatggaaaaaatagtttttactattagacgtgtaaagggaagagagagctaatgtattggactttgtgagcctacaaggaatattttggatccctccaataaataagggctatgtactatatgtactatatagagttatcatgtggtggaagatacttgcaagtcatagatttatgggcaggaggatttgttactccctatatctaggctgaatgtaaaatcccttatgttgtatcaatgggggtaaaaactatttttatttgcctatgatatacttggtttctaataaagtgccctaggctctagtgagaactgtctactttgaattgccatttactccctttcctcctttggccgatatgctcttggctagctttttataagttaatgtgtttccccaaaaagtttcactactttatattcatttgagtgtgatcctaaaacacctggatcaacagtacatctcatatgcaatctgcatcagctcctattctgtctggatgtctagaactgttggaagattttgacgtcttaagccctaggttttgctttgggaaataaggtttgaaatattgttcattgcattaagatttgtgtgtgtgtgctttgtaagcccagaaccaggttttggaaaatgcctgtactgtgaaagcaaattaggactctttctgagcctctttcattgtcagaaatagaatcactttccatcagcttccaggaaattgtgtatctggagtcgaagagatttgacatcaagaatccagatttttaaatgtaattgttttttaaatgctaatgtttgtaaagcaccttcagttcttcggatgaaaggtgctatattccctcagtgtaaattaataaaaagattacaggaagtttgtcaaaaaattcaatgcatagtctgtagtatgtcctgacaagaagttagcattttatataagaaattaaaaaatgcttattcctccaaaaaaaaaaaaaaaaaa

SEQ ID NO: 1816 - DNA, 1270 bp, Homo Sapiens
  NM_002727
attttctaaaagggacagagagcaccctgctacatttcctaatcaagaagttggcgtgcagctgggagagctagactaagttggtcatgatgcagaagctactcaaatgcagtcggcttgtcctggctcttgccctcatcctggttctggaatcctcagttcaaggttatcctacgcggagagccaggtaccaatgggtgcgctgcaatccagacagtaattctgcaaactgccttgaagaaaaaggaccaatgttcgaactacttccaggtgaatccaacaagatcccccgtctgaggactgacctttttccaaagacgagaatccaggacttgaatcgtatcttcccactttctgaggactactctggatcaggcttcggctccggctccggctctggatcaggatctgggagtggcttcctaacggaaatggaacaggattaccaactagtagacgaaagtgatgctttccatgacaaccttaggtctcttgacaggaatctgccctcagacagccaggacttgggtcaacatggattagaagaggattttatgttataaaagaggattttcccaccttgacaccaggcaatgtagttagcatattttatgtaccatggttatatgattaatcttgggacaaagaattttatagaaatttttaaacatctgaaaaagaagcttaagttttatcatccttttttttctcatgaattcttaaaggattatgctttaatgctgttatctattttattgttcttgaaaatacctgcattttttggtatcatgttcaaccaacatcattatgaaattaattagattcccatggccataaaatggctttaaagaatatatatatatttttaaagtagcttgagaagcaaattggcaggtaatatttcatacctaaattaagactctgacttggattgtgaattataatgatatgccccttttcttataaaaacaaaaaaaaaaataatgaaacacagtgaatttgtagagtgggggtatttgacatattttacagggtggagtgtactatatactattacctttgaatgtgtttgcagagctagtggatgtgtttgtctacaagtatgattgctgttacataacaccccaaattaactcccaaattaaaacacagttgtgctgtcaatacctcatactgctttacctttttttcctggatatctgtgtattttcaaatgttactatatattaaagcagaaatataaccaaaggttaaaaaaaaaaaaaaaaaa

SEQ ID NO: 1817 - DNA, 874 bp, Homo Sapiens
  NM_002728
aggaagcaaagaaggacctgggctttgggaagatctaaagacccaggaaggtctctgggtgggataaagccaagatgaaactccccttacttctggctcttctatttggggcagtttctgctcttcatctaaggtctgagacttccacctttgagacccctttgggtgctaagacgctgcctgaggatgaggagacaccagagcaggagatggaggagaccccttgcagggagctggaggaagaggaggagtggggctctggaagtgaagatgcctccaagaaagatggggctgttgagtctatctcagtgccagatatggtggacaaaaaccttacgtgtcctgaggaagaggacacagtaaaagtggtgggcatccctgggtgccagacctgccgctacctcctggtgagaagtcttcagacgtttagtcaagcttggtttacttgccggaggtgctacaggggcaacctggtttccatccacaacttcaatattaattatcgaatccagtgttctgtcagcgcgctcaaccagggtcaagtctggattggaggcaggatcacaggctcgggtcgctgcagacgctttcagtgggttgacggcagccgctggaactttgcgtactgggctgctcaccagccctggtcccgcggtggtcactgcgtggccctgtgtacccgaggaggccactggcgtcgagcccactgcctcagaagacttcctttcatctgttcctactgagctggtcccagccagcagttcagagctgccctctcctgggcagctgcctcccctcctctgcttgccatccctccctccacctccctgcaataaaatgggttttactgaaatggaaaaaaaaaaaaaaaaaa

SEQ ID NO: 1818 - DNA, 1772 bp, Homo Sapiens
  NM_002729
ggataaatgtagcgccgcggcgcgggccagcagctctgcgaggggccggagcgcggcggagccatgcagtacccgcaccccgggccggcggcgggcgccgtgggggtgccgctgtacgcgcccacgccgctgctgcaacccgcacacccgacgcccttttacatcgaggacatcctgggccgcgggcccgccgcgcccacgcccgcccccacgctgccgtcccccaactcctccttcaccagcctcgtgtccccctaccggaccccggtgtacgagcccacgccgatccatccagccttctcgcaccactccgccgccgcgctggccgctgcctacggacccggcggcttcgggggccctctgtaccccttcccgcggacggtgaacgactacacgcacgccctgctccgccacgaccccctgggcaaacctctactctggagccccttcttgcagaggcctctgcataaaaggaaaggcggccaggtgagattctccaacgaccagaccatcgagctggagaagaaattcgagacgcagaaatatctctctccgcccgagaggaagcgtctggccaagatgctgcagctcagcgagagacaggtcaaaacctggtttcagaatcgacgcgctaaatggaggagactaaaacaggagaaccctcaaagcaataaaaaagaagaactggaaagtttggacagttcctgtgatcagaggcaagatttgcccagtgaacagaataaaggtgcttctttggatagctctcaatgttcgccctcccctgcctcccaggaagaccttgaatcagagatttcagaggattctgatcaggaagtggacattgagggcgataaaagctattttaatgctggatgatgaccactggcattggcatgttcagaaaactggatttaggaataatgttttgctacagaaaatcttcatagaagaactggaaggctatataagaaagggaatcaattctctggtattctggaaacctaaaaatatttggtgcactgctcaattaacaaacctacatggagaccttaattttgacttaacaaatagtttatgtactgctcttaggttgttttgataaagtgacattatagtgattaaattcttccccctttaaaaaaacagttagtggttttcactatttataaaaaattaattttgaactttttgttaaatttttaagttatagctttaaaggttttaataggaccttcttgaacgacttttctgtaatctgtttatctcccacttaatggaaaggcaaaggggtaccccaaatccagaggtgcctacatttcaggcagccttggagtattttaaaaggaaaacattctttacttttatatgacattcttatactgctgtctcaaatccaaaaacatttcagagctcttgtctcagagatgtgtgttctttttgtcagagatatggttgatgagaatcttaaatgcttgttttgcactatcacttagtacctgtttgaccaaggtgttaaggggatagtacctcccaattcaagcagagaaactgacctgactaaagttaatcgcagatgaactagaagtcacaggttaattaaatgtaagtagattgtagatactgttttatatcaaacaatgtttataatgtgtatatagaattgttcactgtaaaaaaaatggccaaaatgtgttttttttttaataagtaacttgactataaaataaagccgtccgtgggacgactgacctcgttgcaaaaaaaaaaaaaaa

SEQ ID NO: 1819 - DNA, 1707 bp, Homo Sapiens
  NM_002733
ggatgtggggcggggcctgccccaagagagtttcctaaagcgaggaaaccaagccgggcgcctcttgcaatggagacggtcatttcttcagatagctccccagctgtggaaaatgagcatcctcaagagaccccagaatccaacaatagcgtgtatacttccttcatgaagtctcatcgctgctatgacctgattcccacaagctccaaattggttgtatttgatacgtccctgcaggtgaagaaagctttttttgctttggtgactaacggtgtacgagctgcccctttatgggatagtaagaagcaaagttttgtgggcatgctgaccatcactgatttcatcaatatcctgcaccgctactataaatcagccttggtacagatctatgagctagaagaacacaagatagaaacttggagagaggtgtatctccaggactcctttaaaccgcttgtctgcatttctcctaatgccagcttgtttgatgctgtctcttcattaattcggaacaagatccacaggctgccagttattgacccagaatcaggcaatactttgtacatcctcacccacaagcgcattctgaagttcctcaaattgtttatcactgagttccccaagccagagttcatgtccaagtctctggaagagctacagattggcacctatgccaatattgctatggttcgcactaccacccccgtctatgtggctctggggatttttgtacagcatcgagtctcagccctgccagtggtggatgagaaggggcgtgtggtggacatctactccaagtttgatgttatcaatctggcagcagaaaagacctacaacaacctagatgtatctgtgactaaagccttgcaacatcgatcacattactttgagggtgttctcaagtgctacctgcatgagactctggagaccatcatcaacaggctagtggaagcagaggttcaccgacttgtagtggtggatgaaaatgatgtggtcaagggaattgtatcactgtctgacatcctgcaggccctggtgctcacaggtggagagaagaagccctgagctgggggaaggggtcatgcagcaccaggggatatgcccaactcactgcctgctggaagctctgtgggaatcagatgaaacttgagggaattgtgactctgttccctgttcagggtcccctgcccttctatctgggagctagggaaggtatgggggaggaaagagaatggatttatagctacccttaccctcacacatacacttgaaaaaactttcagcctagccagttctagcccctgtcctcttagatatatccccctttctgggtgaactataggctctgtgcctctcagacaaattctgatctctaagagatccccagacctcacttgcctctgcctccatcttggccctgattcaaccctaagataatagcacaacaaaattcttcataaagatatttttattcacctgttccgtgctatatggaggaggccaagtccatttagtgacatttcttcccataatgtgagtggggaggattgtggggaggaggggctttgggttcctgtgtttgtgcatatgaagggagatgggggttaggtggaggaggagagcagcgtggttagctaaggttattgctttttgtggcaaatctaattaaatgacaggaatctcttcacgataaaaaaaaaaaaaaaa

SEQ ID NO: 1820 - DNA, 2512 bp, Homo Sapiens
  NM_002735
gtggagggcggcgccgctgcagtgcggggacccgctcgctcgctcgccagccgtccccgcgccccgcgtccccgcgcagccgcctcctggcctcgggcgccgcgcatccaggaaggaagcagccaccctcgccatggcctccccgcccgcctgcccctcggaggaggacgagagcctgaagggctgtgagctgtacgtgcagctgcacgggatccagcaggtcctcaaagactgtatcgtccacctctgcatctccaagcccgaacgccccatgaagttcctccgggagcacttcgagaagctggagaaggaagaaaacaggcagattttggcgcggcaaaagtcaaactcacagtcggactcccatgatgaggaggtgtcgcccacccccccgaaccctgtggtgaaggcccgccgccggcgaggaggcgtgagtgccgaggtgtacaccgaggaggacgccgtgtcctacgtcaggaaggtgattcccaaggactacaaaaccatgactgcgctggccaaggccatctccaagaacgtgctcttcgctcacctggatgacaacgagaggagtgacatattcgatgccatgttccctgtcactcacatcgctggggagactgttatacagcaagggaatgaaggagacaacttctatgtcgttgatcaaggggaagtggatgtgtacgtgaacggagagtgggtgaccaacatcagcgagggaggcagcttcggggagctggcgctcatctacggcacccccagggctgcgaccgtgaaagccaagacggacctcaagctctgggggatcgaccgggacagctaccggcgcatccttatgggcagcacgctgaggaaacgcaagatgtacgaggagttcctcagcaaggtctccatcctagagtccctggagaagtgggagcgtctgaccgtggcggatgcgctggagcccgtccagtttgaagatggagagaaaattgtggtccagggagagcctggggacgacttttacatcatcacggagggcaccgcgtccgtgctgcagcgccggtcccccaatgaggagtacgtggaggtggggcgcctgggaccctctgactacttcggggagattgcactgctgctgaaccggccccgggcggccactgtcgtggcccgggggcccctcaagtgtgtgaagctggaccggccccgcttcgagcgtgtgctggggccctgctctgagatcctcaagaggaacattcagcgttacaacagcttcatctccctcaccgtctgagcacagctcccgccctgcagccccagctccccagtgtggtggccgtgccctgctcgtctgtgtcgggggcccgggagccgctgtgtgaggtgtgggccgggtggggctgggtcccggcagcgtgaggactgccccttccccggactcactttttggaataaatgatcaccttgtgcatttccaaatcaaaggacaagcggacaaaatgcatcccaagatcaaggaagggacaggccagcttcctccccacacgcctccccggctgcctctgtgggcttctcctggggggcccaccccacccctgccagtctcctggagatgcttgaggatcggtcctccccagaaccaggccaggacgttgcccctggggcctggtgaccctgtgaggtcaggtcccccagattgaggtctgagtgtgggcaagtgtgtcaaaaggggctgccccccaggggagatgaggctgagagcagggagttgaggccgaagaagtcaaggcccctcccgcaaatgtgtacccctgcccgcgccactgcaccccgccgcacccccacctcccccgggggccctgctgcggatgccggagtgggagagtctctgagctgtgagattgatcttgcccctaattggagaggaagccgggcgccaagacacacggggctcctgccttgggagccagggccgcggccgcaggtagaccccagtagggggggccgggctcgaagttcctttgggaggggctggcgggactccagcaggccgtcctcacctttcttagaaagtccacccagggcaagttgatgttgggggaaagcagaagtcaagccagccgcgggccccacacgccccgacccgctcaaccgacttgtcccttaaatgtgtcttggatcccgcagtgatgacgtgagccagccaggcccgaaagggtgaggccagtgcagagaagcttcccaggggattcctgggttcccccgaaagacaagcgaggtcattgcagttcacctgatgttgctcctgtcccgtgcgtcccggggaggctgtccttggtccgaggctgctcgttgcagcccctcccctgctggcggttacgatgcgtggggtccccctccccacccagccccggccacgtcgccgtgtcccgcctgtgcctgtgacgtccctgtggacctgtgagccatccccccccttatctctgctctgaatactgcatgaagcattaaacgtgcaatgaagtac

SEQ ID NO: 1821 - DNA, 8787 bp, Homo Sapiens
  NM_002737
ggccgcagctccccggcggaggcaagaggtggttgggggggaccatggctgacgttttcccgggcaacgactccacggcgtctcaggacgtggccaaccgcttcgcccgcaaaggggcgctgaggcagaagaacgtgcacgaggtgaaggaccacaaattcatcgcgcgcttcttcaagcagcccaccttctgcagccactgcaccgacttcatctgggggtttgggaaacaaggcttccagtgccaagtttgctgttttgtggtccacaagaggtgccatgaatttgttactttttcttgtccgggtgcggataagggacccgacactgatgaccccaggagcaagcacaagttcaaaatccacacttacggaagccccaccttctgcgatcactgtgggtcactgctctatggacttatccatcaagggatgaaatgtgacacctgcgatatgaacgttcacaagcaatgcgtcatcaatgtccccagcctctgcggaatggatcacactgagaagagggggcggatttacctaaaggctgaggttgctgatgaaaagctccatgtcacagtacgagatgcaaaaaatctaatccctatggatccaaacgggctttcagatccttatgtgaagctgaaacttattcctgatcccaagaatgaaagcaagcaaaaaaccaaaaccatccgctccacactaaatccgcagtggaatgagtcctttacattcaaattgaaaccttcagacaaagaccgacgactgtctgtagaaatctgggactgggatcgaacaacaaggaatgacttcatgggatccctttcctttggagtttcggagctgatgaagatgccggccagtggatggtacaagttgcttaaccaagaagaaggtgagtactacaacgtacccattccggaaggggacgaggaaggaaacatggaactcaggcagaaattcgagaaagccaaacttggccctgctggcaacaaagtcatcagtccctctgaagacaggaaacaaccttccaacaaccttgaccgagtgaaactcacggacttcaatttcctcatggtgttgggaaaggggagttttggaaaggtgatgcttgccgacaggaagggcacagaagaactgtatgcaatcaaaatcctgaagaaggatgtggtgattcaggatgatgacgtggagtgcaccatggtagaaaagcgagtcttggccctgcttgacaaacccccgttcttgacgcagctgcactcctgcttccagacagtggatcggctgtacttcgtcatggaatatgtcaacggtggggacctcatgtaccacattcagcaagtaggaaaatttaaggaaccacaagcagtattctatgcggcagagatttccatcggattgttctttcttcataaaagaggaatcatttatagggatctgaagttagataacgtcatgttggattcagaaggacatatcaaaattgctgactttgggatgtgcaaggaacacatgatggatggagtcacgaccaggaccttctgtgggactccagattatatcgccccagagataatcgcttatcagccgtatggaaaatctgtggactggtgggcctatggcgtcctgttgtatgaaatgcttgccgggcagcctccatttgatggtgaagatgaagacgagctatttcagtctatcatggagcacaacgtttcctatccaaaatccttgtccaaggaggctgtttctatctgcaaaggactgatgaccaaacacccagccaagcggctgggctgtgggcctgagggggagagggacgtgagagagcatgccttcttccggaggatcgactgggaaaaactggagaacagggagatccagccaccattcaagcccaaagtgtgtggcaaaggagcagagaactttgacaagttcttcacacgaggacagcccgtcttaacaccacctgatcagctggttattgctaacatagaccagtctgattttgaagggttctcgtatgtcaacccccagtttgtgcaccccatcttacagagtgcagtatgaaactcaccagcgagaacaaacacctccccagcccccagccctccccgcagtgggaagtgaatccttaaccctaaaattttaaggccacggccttgtgtctgattccatatggaggcctgaaaattgtagggttattagtccaaatgtgatcaactgttcagggtctctctcttacaaccaagaacattatcttagtggaagatggtacgtcatgctcagtgtccagtttaattctgtagaagttacgtctggctctaggttaacccttcctagaaagcaagcagactgttgccccattttgggtacaatttgatatactttccataccctccatctgtggatttttcagcattggaatcccccaaccagagatgttaaagtgagcctgtcccaggaaacatctccacccaagacgtctttggaatccaagaacaggaagccaagagagtgagcagggagggattgggggtgggggaggcctcaaaataccgactgcgtccattctctgcctccatggaaacagcccctagaatctgaaaggccgggataaacctaatcactgttcccaaacattgacaaatcctaacccaaccatggtccagcagttaccagtttaaacaaaaaaacctcagatgagtgttgggtgaatctgtcatctggtaccctccttggttgataactgtcttgatacttttcattctttgtaagaggccaaatcgtctaaggacgttgctgaacaagcgtgtgaaatcatttcagatcaaggataagccagtgtgtacatatgttcattttaatctctgggagattatttttccatccagggtgccatcagtaatcatgccactactcaccagtgttgttcgccaacacccacccccacacacaccaacattttgctgcctaccttgttatccttctcaagaagctgaagtgtacgccctctccccttttgtgcttatttatttaataggctgcagtgtcgcttatgaaagtacgatgtacagtaacttaatggaagtgctgactctagcatcagcctctaccgattgattttcctcccttctctagccctggatgtccacttagggataaaaagaatatggttttggttcccatttctagttcacgttgaatgacaggcctggagctgtagaatcaggaaacccggatgcctaacagctcaaagatgttttgttaatagaaggattttaatacgttttgcaaatgcatcatgcaatgaattttgcatgtttataataaaccttaataacaagtgaatctatattattgatataatcgtatcaagtataaagagagtattataataattttataagacacaattgtgctctatttgtgcaggttcttgtttctaatcctcttttctaattaagttttagctgaatcccttgcttctgtgctttccctccctgcacatgggcactgtatcagatagattactttttaaatgtagataaaatttcaaaaatgaatggctagtttacgtgatagattaggctcttactacatatgtgtgtgtatatatatgtatttgattctacctgcaaacaaatttttattggtgaggactatttttgagctgacactccctcttagtttcttcatgtcacctttcgtcctggttcctccgccactcttcctcttggggacaacaggaagtgtctgattccagtctgcctagtacgttggtacacacgtggcattgccgcagcacctgggctgacctttgtgtgtgcgtgtgtgtgtgtttccttcttcccttcagcctgtgactgttgctgactccaggggtgggagggatggggagactcccctcttgctgtgtgtactggacacgcaggaagcatgctgtcttgctgcctctgcaacgacctgtcgtttgctccagcatgcacaaacttcgtgagaccaacacagccgtgccctgcaggcaccagcacgtgcttttcagaggctgcggactttcttccagccattgtggcattggcctttccagtcttgggaggagcgcgctgctttggtgagacacccccatgcaaggtcctcagagtagccgggttctaccacaaacagaaacagaatgaaagtagctgtcagtccttgtagagagccgctctgtttcctcccagaagcatctcccagctaagctcgcattatttttctcctctggctgtttgcctgaagttcacagaacacacaaccatgaaaggctttttgaggtgagaggcccaggtggtcctggcaaccctgagtagaaggagagacggggtagggaacgggcccggccagaaaagaaccatttcttctgccatcttttatgcaccatagacatcgagactccagggggtcctggctcccctgtccctgcagccctgcaggtcagtgcatgatctgggttcgtgtcctgaccaggtgctcctcctttgatccgaggggaaagggactggtttatagaaagagcctaggagacaaaagggccagtccccctgcccagaatggagcagcagcaggacagacccccacgaggccccccagagaggaggaagatcccacggaggaacacatgaggttagggacccttgttcagcaccccaaacagcctgcctgtttaaagcaggcagcaggcttaggccttccctgcaaccccaacacccacaagtttgtttctctaggaaacacattcactgtctcagctggctgttactctctcagaccatatggcaaagttttccaagaaaatgccccgacaggggtgcccagcacactgcctgagggacaacagacatcagaacaaacccccagagagaaacagtcaaaatcagggcccggtgcagtgttgtcatgtggaacctgctttatccattgctgagtgttgaatgtgggtaatggttagggctttccagatctcagcagccaaagacagttattgttggaagactgtcatgtagataaccatgagcaatggctcgcctcagaatcagttcataaaattctatggtactggccccttcgtgggtattgtgtgaaatgagatggtggcgaggggtgcgctgtggaactgccgcagccacgcaggaggtccctgggggatgctttgggaagtccttgcccctgagcactgcctgattgccagggcctgtggaggtctaggccgcctggcagaatctagcaccgtccgaatccccgcaggacccatggagctatgaccacaccaggccattcaaatggctctgcattatcttcccttggaaggtggccactcctcggtggcagggcctttccctgaggctgcaggccgtgggctggcagcccgtctcttggcatttcaattgaaggtcaccaggtgctgggtttgaaaggaagtcactggagtgctgccaggggccgccctccaaggttaatgagaggcccacatccaggcaagaactaattcaaaaggcagatcagaaaccacaggagtcaaaattattgctccggcagtgcttcccttcctttcatccactggcctcgtgtggtccatgcagggccactgtctgccctttctgatgccacgtattaggctttcttactcagaattttgatagaaaaccatggggccaagagctctggaagcctggccggaaagaccaaggttcatgcagcccaacaaatgattgttgagcacctctcggagccaaagtccttaggcgagtgtggtgacttcctggaaggaggatgcagacttccagagagcccccccaacggacgtgctgagaagggagagggaggcgggggctgtagtcaggaaggagccagagaagaacagggtttgggtgcatccagaaatatgcctgcagtaggagggagaggaaggggtgccaccgtcaacggcttcccatcggaggtggttggtgcagatggaagtttctgtctgctggccctcaagagagtgttttgccagggacacagtctgttcctcctcagaaaacaccccccaaatgctaacaacatccccaccagctgctagaagcccctttcccctccccaccttgaagtagctcatagttctctgggcagagccagaccatccagtgtaccccagaggccagtaggttcctgcccattttcctctctggcttcctgccaagaattatggcagctgaggatgaatggagaagtaaaaacaactaacaccgcacaactaacaactaacaccgcagttcccacctgggttccacttagcaggagacatttcggagggttttttttgtttttgttcctgttttttttttttttgctggaatttgttttctcagtactgaaaagagaaaaagtgacaatcttgtatttttaaaagcctcggaaaggtgataccatctgacagtcattttctcacgttggtcttctaaagtcacctatttcttgtgtgtgcacatcacaccatttcctgtttctttataacccgacaagggtaggagtgcctgtttcccctgctgggcacaccagacaatcgtaatcacaaaacagacactgagccaggggcccaaagggtgtgatcatgagagttaccgggacagcagtaggcatgacagtcaccaggaaggacaagggtgctctgttgttagtggccacacaccaatttgacaaggagtgttgcgaaatttttatttatttatttatttattttgagatggagtttcactcttgttgcccaggctggagtgcggtggtacaatctcggctcactgcaacctccacctcccaggttcaagcgattctcctgcctcagcctcccaagtacctgggactacaggtgcgtgccaccacacccagctaaattttgtgtttttagtagagatggggtttcaccatgttggccaggatggtcttgaacccctgacctcatgatctgcctgcctcggcctcccaaagtgctgggattacaggcatgagccaccacgcccagccaaaatatttttttaaagtcattttccttaagctgcttgggctacatgtgaaatacactggacggtcaacattcctgtctcctcccatttgggctgatgcagcagatccagggaatgttacctgtttctgctgctagaagatccaggaaattgggaaggttacctgacgcacacatggatgaaggccatcatctagaaatggggtcaaccacaattgtgttaattccgtagtgtcagggattcttcgggaaggtcaacagtatgaaggattctgacccctgtgcctcccatttatgtgatcaggtgacagttaataaccgtggaggtcacactcagccatccaacagccttacagtgaccctacacaaaagcccccaaattccaaagactttttcttaacctaaaggaagaaattatttgttaattccagtagagcaactgaatatactgggctatttgtacttttttatagagaactttaataataattctttaaaaatgagtttttagaacaaagcaactgacgatttcctaagattccaatgccctggagcttgtaggaggacttagcctgggtcagctggagcacccccgacctgatctcccactgccagattttcccatgctcctagggtatggagtccacgtgggaatgactgcaagttcaggtggaacttggccgactgatgctctgcgagtttttaatagacactggggacaactgcttaaggtttagaaacttccaaaccacaggaaagacatttttagtgtcccccatccagaggcagccctggaataggattcccaggggtttctgggacccctttccttgctccgtgaggctctgtggccatcttttggcaggaggaggatgcttccttggctctgtgcccagacccgcctggtccccaggtctctcaccttgggtgaagattcagagatgccctgtaaggattttgcccactgggcaactcagaaatacttcgatctcccaagatataagaggcagcagcaaacgtgcctattgacgtctgtttcatagttaccacttacgcgagtagacagaactcggcttttcagaaaataggtgtcaagtccactttataagaacctttttttctaaaataagataaaaggtggctttgcattttctgattaaacgactgtgtctttgtcacctctgcttaactttaggagtatccattcctgtgattgtagacttttgttgatattcttcctggaagaatatcattcttttcttgaagggttggtttactagaatattcaaaatcaatcatgaaggcagttactattttgagtctaaaggttttctaaaaattaacctcacatcccttctgttagggtctttcagaatatcttttataaacagaagcatttgaagtcattgcttttgctacatgatttgtgtgtgtgaaggacataccacgtttaaatcattaattgaaaaacatcatataagccccaactttgtttggaggaagagacggaggttgaggtttttccttctgtataagcacctactgacaaaatgtagaggccattcaaccgtcaaacaccatttggttatatcgcagaggagacggatgtgtaaattactgcattgctttttttttcagtttgtataacctctaatctccgtttgcatgatacgctttgttagaaacattaattgtagtttggaagcaagtgtgtatgaataaagataatgatcattccaaaaaaaaaaaaaaaaa

SEQ ID NO: 1822 - DNA, 1902 bp, Homo Sapiens
  NM_002746
ctggcgcgcgcggccctgcgggtgacaggcaggcgggaaggggcggggcctcgggcggggccgccgtggggaggagggcggtgggaggggaggagtggagatggcggcggcggcggctcaggggggcgggggcggggagccccgtagaaccgagggggtcggcccgggggtcccgggggaggtggagatggtgaaggggcagccgttcgacgtgggcccgcgctacacgcagttgcagtacatcggcgagggcgcgtacggcatggtcagctcggcctatgaccacgtgcgcaagactcgcgtggccatcaagaagatcagccccttcgaacatcagacctactgccagcgcacgctccgggagatccagatcctgctgcgcttccgccatgagaatgtcatcggcatccgagacattctgcgggcgtccaccctggaagccatgagagatgtctacattgtgcaggacctgatggagactgacctgtacaagttgctgaaaagccagcagctgagcaatgaccatatctgctacttcctctaccagatcctgcggggcctcaagtacatccactccgccaacgtgctccaccgagatctaaagccctccaacctgctcatcaacaccacctgcgaccttaagatttgtgatttcggcctggcccggattgccgatcctgagcatgaccacaccggcttcctgacggagtatgtggctacgcgctggtaccgggccccagagatcatgctgaactccaagggctataccaagtccatcgacatctggtctgtgggctgcattctggctgagatgctctctaaccggcccatcttccctggcaagcactacctggatcagctcaaccacattctgggcatcctgggctccccatcccaggaggacctgaattgtatcatcaacatgaaggcccgaaactacctacagtctctgccctccaagaccaaggtggcttgggccaagcttttccccaagtcagactccaaagcccttgacctgctggaccggatgttaacctttaaccccaataaacggatcacagtggaggaagcgctggctcacccctacctggagcagtactatgacccgacggatgagccagtggccgaggagcccttcaccttcgccatggagctggatgacctacctaaggagcggctgaaggagctcatcttccaggagacagcacgcttccagcccggagtgctggaggccccctagcccagacagacatctctgcaccctggggcctggacctgcctcctgcctgcccctctcccgccagactgttagaaaatggacactgtgcccagcccggaccttggcagcccaggccggggtggagcatgggcctggccacctctctcctttgctgaggcctccagcttcaggcaggccaaggccttctcctccccacccgccctccccacggggcctcgggacctcaggtggccccagttcaatctcccgctgctgctgctgcgcccttaccttccccagcgtcccagtctctggcagttctggaatggaagggttctggctgccccaacctgctgaagggcagaggtggagggtggggggcgctgagtagggactcagggccatgcctgcccccctcatctcattcaaaccccaccctagtttccctgaaggaacattccttagtctcaagggctagcatccctgaggagccaggccgggccgaatcccctccctgtcaaagctgtcacttcgcgtgccctcgctgcttctgtgtgtggtgagcagaagtggagctggggggcgtggagagcccggcgcccctgccacctccctgacccgtctaatatataaatatagagatgtgtctatggctgaaaaaaaaaaaaaaaaaaaaaaaaaaa

SEQ ID NO: 1823 - DNA, 4225 bp, Homo Sapiens
  NM_002748
cccctcttcctcgccctctctcgcgggtcggggttacatggcggcgactgcggcaaagcgagagcctcggagacgccgctgccgccagcacagccggagacctgagccgacactgggggcagtccgcgagccccgcactctctcgatgagtcggagaagtcccgttgtatcagagtaagatggacggtagctttgattgtgattgtggtgagctggagccacctgatcactaacaaaagacatcttctgttaaccaacagccgccagggcttcctgttgaaataaatatatagcaacaaaggaaaaaaagaagcaaaacggaaatagtgcttaccagcaccttagaatgatgctgctcaggaccagtccaacactgaatgtatctgcactgtgaggagaatgttcatagaagcctgttgtgtgcatatttattcacatttttgttaaatgttaaatcgtttagcacggtaatctgagtgcacagtatgtcatttcattccgtttgagtttcttgttttcgttaaatgtctgcagagttgctgcccctttcttgaactatgagtactgcaatctttttaattctcaatatgaatagagctttttgagctttaaatctaaggggaactcgacaggcctgtttggcatatgcaatgaacatcaagaaaccatcttgctgtggaagcataattatttttcttctccctttttgaaagatctttccttttgatgccagttttcttccttgtttacacaagttcaatttgaaaggaaaaggcaatagtaagggtttcaaaatggcagagaaatttgaaagtctcatgaacattcatggttttgatctgggttctaggtatatggacttaaaaccattgggttgtggaggcaatggcttggttttttctgctgtagacaatgactgtgacaaaagagtagccatcaagaaaattgtccttactgatccccagagtgtcaaacatgctctacgtgaaatcaaaattattagaagacttgaccatgataacattgtgaaagtgtttgagattcttggtcccagtggaagccaattaacagacgatgtgggctctcttacggaactgaacagtgtttacattgttcaggagtacatggagacagacttggctaatgtgctggagcagggccctttactggaagagcatgccaggcttttcatgtatcagctgctacgggggctcaagtatattcactctgcaaatgtactgcacagagatctcaaaccagctaatcttttcattaatacggaagacttggtgctgaagataggtgactttggtcttgcacggatcatggatcctcattattcccataagggtcatctttctgaaggattggttactaaatggtacagatctccacgtcttttactttctcctaataattatactaaagccattgacatgtgggctgcaggctgcatctttgctgaaatgctgactggtaaaaccctttttgcaggtgcacatgaacttgaacagatgcagctgattttagaatctattcctgttgtacatgaggaagatcgtcaggagcttctcagcgtaattccagtttacattagaaatgacatgactgagccacacaaacctttaactcagctgcttccaggaattagtcgagaagcactggatttcctggaacaaattttgacatttagccccatggatcggttaacagcagaagaagcactctcccatccttacatgagcatatattcttttccaatggatgagccaatttcaagccatccttttcatattgaagatgaagttgatgatattttgcttatggatgaaactcacagtcacatttataactgggaaaggtatcatgattgtcagttttcagagcatgattggcctgtacataacaactttgatattgatgaagttcagcttgatccaagagctctgtccgatgtcactgatgaagaagaagtacaagttgatccccgaaaatatttggatggagatcgggaaaagtatctggaggatcctgcttttgataccaattactctactgagccttgttggcaatactcagatcatcatgaaaacaaatattgtgatctggagtgtagccatacttgtaactacaaaacgaggtcatcatcatatttagataacttagtttggagagagagtgaagttaaccattactatgaacccaagcttattatagatctttccaattggaaagaacaaagcaaagaaaaatctgataagaaaggcaaatcaaaatgtgaaaggaatggattggttaaagcccagatagcgctagaggaagcatcacagcaactggctggaaaagaaagggaaaagaatcagggatttgattttgattcctttattgcaggaactattcagcttagttcccagcatgagcctactgatgttgttgataaattaaatgacttgaatagctcagtgtcccaactagaattgaaaagtttgatatcaaagtcagtaagccaagaaaaacaggaaaaaggaatggcaaatctggctcaattagaagccttgtaccagtcttcttgggacagccagtttgtgagtggtggggaggactgttttttcataaatcagttttgtgaggtaaggaaggatgaacaagttgagaaggaaaacacttacactagttacttggacaagttctttagcaggaaagaagatactgaaatgctagaaactgagccagtagaggatgggaagcttggggagagaggacatgaggaaggatttctgaacaacagtggggagttcctctttaacaagcagctcgagtccataggcatcccacagtttcacagtccagttgggtcaccacttaagtcaatacaggccacattaacaccttctgctatgaaatcttcccctcaaattcctcatcaaacatacagcagcattctgaaacatctgaactaaaacactcagcagacatttatctttgtattcttcatgaaatgtgttttgtctttttttattactagtgtttaagtcattttttacttgaatcagatggtgtcatttagtaaggattttatgagttcttgttttttaaaatccagactttctttttctacatgtgagatagttttcattttaactggcatgtcatttgcacacaaaaataaagactagagcaaaataatgcaacgcaggaggagaaaagaaatgcactaagacaagaacattctctcatagaacattgatctgttttacaggaaacaaaccttgccttgaaatttacacagtgagactgtacataattgcatgaaaatagctatttttttcctaagacatttttcattcatgaatattttcaagtttttcatactgtacacatttcttaaaacacatgataccagcagcaactgaaaatgaatgccgaatttggtacacatgtgttatctacctcaaggtaacaagagtatgtggcaaaacatataccacccatagtgcttcacaaaatgcacttctatttagccagcgtttattgtagtaaactattcttaataaaactcactcactgtttataaatgttctggtatgcattctttatagtgaagtgttaatacatcacatcttatttattttagcaaatcagtatattttctgtatttaattataaaaaattaacttagtttttaaaatttatttgcaaatatactttactttttccatttggcactatggtttgttgcctacctagctgcatctataatgtcagcttatcctaaggctgtccacgtacttaatttacttaagtgttcattttaagtaacgtgctcactgtgtataggaatttgtattttggaggtgcttgatctatctacaaagaaaaattaattaggaattactttattataaaatgctcctagaagtcttaattgtgtttattttttaaaaaaacaaatgttagacttgtgtgcatggaagtaattaaggtacatcattattgtagtttgaaagttgtacatgataagacattttgtttttactgtatgtttttactgaatgatctattccccatcccaaggcaagcatgaataaaattaggttaaacgtagcatgtggcatcgcagtctcttagaatttgtttcatctattttattttattgaatactgtctgtatctttggttatcctgtttgaagaaaaaggacaaataaaacatggccagcaaataca

SEQ ID NO: 1824 - DNA, 2061 bp, Homo Sapiens
  NM_002756
aaagttctcagttggcccgtgtgaggagaaggccggggcagcggaggcttccggcggaaaatccaagaggaagaaggatctacggatatcctgcatgtccaagccacccgcacccaaccccacacccccccggaacctggactcccggaccttcatcaccattggagacagaaactttgaggtggaggctgatgacttggtgaccatctcagaactgggccgtggagcctatggggtggtagagaaggtgcggcacgcccagagcggcaccatcatggccgtgaagcggatccgggccaccgtgaactcacaggagcagaagcggctgctcatggacctggacatcaacatgcgcacggtcgactgtttctacactgtcaccttctacggggcactattcagagagggagacgtgtggatctgcatggagctcatggacacatccttggacaagttctaccggaaggtgctggataaaaacatgacaattccagaggacatccttggggagattgctgtgtctatcgtgcgggccctggagcatctgcacagcaagctgtcggtgatccacagagatgtgaagccctccaatgtccttatcaacaaggagggccatgtgaagatgtgtgactttggcatcagtggctacttggtggactctgtggccaagacgatggatgccggctgcaagccctacatggcccctgagaggatcaacccagagctgaaccagaagggctacaatgtcaagtccgacgtctggagcctgggcatcaccatgattgagatggccatcctgcggttcccttacgagtcctgggggaccccgttccagcagctgaagcaggtggtggaggagccgtccccccagctcccagccgaccgtttctcccccgagtttgtggacttcactgctcagtgcctgaggaagaaccccgcagagcgtatgagctacctggagctgatggagcaccccttcttcaccttgcacaaaaccaagaagacggacattgctgccttcgtgaaggagatcctgggagaagactcataggggctgggcctcggaccccactccggccctccagagccccacagccccatctgcgggggcagtgctcacccacaccataagctactgccatcctggcccagggcatctgggaggaaccgagggggctgctcccacctggctctgtggcgagccatttgtcccaagtgccaaagaagcagaccattggggctcccagccaggcccttgtcggccccaccagtgcctctccctgctgctcctaggacccgtctccagctgctgagatcctggactgagggggcctggatgccccctgtggatgctgctgcccctgcacagcaggctgccagtgcctgggtggatgggccaccgccttgcccagcctggatgccatccaagttgtatatttttttaatctctcgactgaatggactttgcacactttggcccagggtggccacacctctatcccggctttggtgcggggtacacaagaggggatgagttgtgtgaataccccaagactcccatgagggagatgccatgagccgcccaaggccttcccctggcactggcaaacagggcctctgcggagcacactggctcacccagtcctgcccgccaccgttatcggtgtcattcacctttcgtgttttttttaatttatcctctgttgattttttcttttgctttatgggtttggcttgtttttcttgcatggtttggagctgatcgcttctcccccaccccctagggtaccagcaggcagagccttgccctctgctcaggctggggtccagtgggaggggcccaagatctctgctcagagaagtgcagggggagccttccagctcactctccctgaggactggcttgacaggggctatgggtttgctttggtgttgtttttaaaaaaagaaaatatatttttttgaaaaaacgactgcccatcccgggtcctttccctgatgggttggggcagttacctggttgctgttttaattaaaaaaaaaaaaaaaaaaaggactaaa

SEQ ID NO: 1825 - DNA, 2334 bp, Homo Sapiens
  NM_002757
ggagtaacagtgtcgccgccgccttcctcctcctcctctcgccgctaccgccgtcgccgccgccgcagccgccgccggtccgcgcggcctcgggtggccggagctcagcctgcgcgcgccgcgccctgtgtctccgggtggggcagaagactcgccccttgaacctcccgcggggactctccgtggtgtggcggccctggggctctttcttaatagccccggactgagtcccctccagtcgaggaccctctcctagtccactgacgagcggtggacacctgccgctgtatctcccccaaaccgagtccttgccctgctgcctcctcatacccacacggcggcagagaccttcaccatagcgttcgctcaactccagaaccttccgacctccgctagttcctgcgggcctttgcccgcttcccggtgcaccctccccgggagacacctcagacccccgacagcctgggcaggctcggtgcctgcgggtgcgttcctgatcacccctcccctcttccctccccctcatcctccattcccttgttttcaccctctgtcctctgcccgtcactccccttgtcacctcttggagccccctcctaaccagcggccagtgggtttcccataccccaggatgtgagcctctttaacctgtaatgctgtggctagcccttggcccctttcctgccatggagaaccaggtgctggtaattcgcatcaagatcccaaatagtggcgcggtggactggacagtgcactccgggccgcagttactcttcagggatgtgctggatgtgataggccaggttctgcctgaagcaacaactacagcatttgaatatgaagatgaagatggtgatcgaattacagtgagaagtgatgaggaaatgaaggcaatgctgtcatattattattccacagtaatggaacagcaagtaaatggacagttaatagagcctctgcagatatttccaagagcctgcaagcctcctggggaacggaacatacatggcctgaaggtgaatactcgggccggaccctctcaacacagcagcccagcagtctcagattcacttccaagcaatagcttaaagaagtcttctgctgaactgaaaaaaatactagccaatggccagatgaatgaacaagacatacgatatcgggacactcttggtcatggcaacggaggcacagtctacaaagcatatcatgtcccgagtgggaaaatattagctgtaaaggtcatactactagatattacactggaacttcagaagcaaattatgtctgaattggaaattctttataagtgcgattcatcatatatcattggattttatggagcattttttgtagaaaacaggatttcaatatgtacagaattcatggatgggggatctttggatgtatataggaaaatgccagaacatgtccttggaagaattgcagtagcagttgttaaaggccttacttatttgtggagtttaaagattttacatagagacgtgaagccctccaatatgctagtaaacacaagaggacaggttaagctgtgtgattttggagttagcactcagctggtgaattctatagccaagacgtatgttggaacaaatgcttatatggcgcctgaaaggatttcaggggagcagtatggaattcattctgatgtctggagcttaggaatctcttttatggagattcagaaaaaccagggatctttaatgcctctccagcttctgcagtgcattgttgatgaggattcgcccgtccttccagttggagagttctcggagccatttgtacatttcatcactcagtgtatgcgaaaacagccaaaagaaaggccagcacctgaagaattgatgggccacccgttcatcgtgcagttcaatgatggaaatgccgccgtggtgtccatgtgggtgtgccgggcgctggaggagaggcggagccagcaggggcccccgtgaggctgccgcagggcactgaaagcccaggaccagtaaccaaggagaacaacccacccgtcgcccttctccgtatgctgcctgcgccagaagagctttgctgggccctggcttccctgccctcgccttcacctctgtcagcaggtggccttgcctggggagccccatgtgtggcccaccccaccaggccatccccataccttctggtttgaaggcgctgacactggcagagaggtaaagggtggggcattgagaatggaggctcccagggtccctgcccacttctgttttcctaatgtttttctctataaagggtcaggcccgtcagcatcactgatgggaataaaagtattaatgctttgtgaca

SEQ ID NO: 1826 - DNA, 2156 bp, Homo Sapiens
  NM_002764
agctaatcgttgccagcggggtgtggacttcgccgctgaccccacctccgccgctttgggtaatttagagccgcgcgccgggcgggaatgtaagatggcggagtagcaacgcaaagcgcttggtattgagtctgtggccgacttcggttccggtctctgcagcagccgtgatcgcttagtggagtgcttagggtagttggccaggatgccgaatatcaaaatcttcagcggcagctcccaccaggacttatctcagaaaattgctgaccgcctgggcctggagctaggcaaggtggtgactaagaaattcagcaaccaggagacctgtgtggaaattggtgaaagtgtacgtggagaggatgtctacattgttcagagtggttgtggcgaaatcaatgacaatttaatggagcttttgatcatgattaatgcctgcaagattgcttcagccagccgggttactgcagtcatcccatgcttcccttatgcccggcaggataagaaagataagagccgggcgccaatctcagccaagcttgttgcaaatatgctatctgtagcaggtgcagatcatattatcaccatggacctacatgcttctcaaattcagggcttttttgatatcccagtagacaatttgtatgcagagccggctgtcctaaagtggataagggagaatatctctgagtggaggaactgcactattgtctcacctgatgctggtggagctaagagagtgacctccattgcagacaggctgaatgtggactttgccttgattcacaaagaacggaagaaggccaatgaagtggaccgcatggtgcttgtgggagatgtgaaggatcgggtggccatccttgtggatgacatggctgacacttgtggcacaatctgccatgcagctgacaaacttctctcagctggcgccaccagagtttatgccatcttgactcatggaatcttctccggtcctgctatttctcgcatcaacaacgcatgctttgaggcagtagtagtcaccaataccatacctcaggaggacaagatgaagcattgctccaaaatacaggtgattgacatctctatgatccttgcagaagccatcaggagaactcacaatggagaatccgtttcttacctattcagccatgtccctttataatagagtaacttctgaggctttttgagaataaaatccaccccacccttgtttccccttggtatttgatgacaaattcagcagaagacccggcttgctccagtgtagctttctacatcccacatcaggtatattagagcttatccgaactggggaaagacggattgagattaactgctgggacctcctacctgcattatctcattctggcttccttgataattctgtgggccttgcagctttaactatagctcagctgctgcaagatttcagacttttgaggatgttgtgtgagggtgtttgactgtgactggggaagctcagactactttgtatgtgaatgcttcagggttttctttgttgagaacaactagcaacaaaggcaacccatgtgtgaccagttctccccaaggtctatgctaaattatagcaagagccctgggcaaccccaaacctagtcctggtagctgagcaccctgtaaggcaggagcaggcagctcagcttgagcagacattgggtggggggtggggggtggttgaggggggaggcagcacagtgcagcaaatgtttcttgggaggaagaagcctgatccatcaccatctgcttgactatgtagcttggattctcctttgtacctatccctttcgatttggctttaccttcatctatcttgatcctttcctggccaaatatcctcttgggcccaaatgaacattgtaccatagtcttctggaaagcaaacatgcttcctgctatgtaattgctaacattcatattagatgatgtgctgtagcttgatcttccttagcctactgccactgaggcagtaggttttaggtggtatcgtagtgccttttgattaatttaagtatttaattttcatcttccttctttggatctatttggcctctcaaatgaactgagattcctgttaaaaaagattgatgttattgtctcttgtagaggaaactaataaagtgtgtgtacctgtgtga

SEQ ID NO: 1827 - DNA, 2359 bp, Homo Sapiens
  NM_002766
aaaaagttggaaacacctggggccactaccgaggtaggctgctcctcccaagaaagtgagaccgaaagagctcccgtggaagcggtcaaagcaggggcggggcgaacctgtgacatgcccctcggaagaacaggcttttagagagtcgccaggctccctgccctcatccgagatggcggcctgagggcgctctagccgacgctcttcggatgcccggagggggcggtggccttgcctctggctctgaggcggcggcgccgggcgctgcgaaggctcggccgctgtagtcagtggtgtggggtgcgcaagggcacggacctcggagctctccccgcttgcgccgagtttctcagcgccttccccacccaaaccggggtctcgcagtcggaagcactcagagtgcagccccgcgcggggccggtcgtaaccgcgccgcgggccggacgatgcccaagaagctgctgctgttgcccccgccctccgcgtcctcggctttccgcgtcccgcgcgcccgccccgttcccccgccggccatgaacgccgctcgcaccggctaccgagtcttctcggccaactccacggccgcctgcacggagctggccaagcgcatcacagagcgccttggtgctgaattggggaagtctgttgtatatcaagagaccaatggagaaacaagagttgaaataaaagaatctgttcgtggccaagatattttcattatacagacaatacccagagatgtgaatacagctgtgatggagttgctcatcatggcttacgcactgaagactgcctgtgccaggaacattattggggtcatcccctacttcccctacagcaagcagagcaagatgaggaagaggggttccattgtgtgcaagctgctagcatccatgctggcgaaagcaggtttaactcacattatcactatggatcttcatcaaaaggaaatacaaggctttttcagctttcctgtggacaaccttagagcctcacctttcctgcttcagtatatccaggaagaaattccaaattacagaaatgcagtcattgtagctaagtctcctgatgctgcaaagagggcccagtcctatgcggagagactgcgtctgggtttggccgtcattcacggggaagctcagtgcacggaactggacatggacgatggtcgtcactccccgcctatggtcaaaaatgctactgtgcacccaggcctggagttgccattgatgatggccaaagagaagccaccgataactgtagttggagatgttggaggccgcatcgcaatcatcgtggatgacattattgacgatgtggagagttttgttgctgccgcggagatcctgaaagagagaggcgcctataagatctatgttatggccacccacggcatcctgtctgcagaggcccctcgcctgattgaggagtcctccgtagacgaggtggtggtgacgaatactgtccctcatgaggttcagaagctgcaatgtcccaagataaagactgtggatatcagtttgattctttctgaagccattcggagaatccacaatggagagtccatggcctaccttttccgaaacatcactgtggatgactagctttcacgagggtctcgaccctggacctcctgagggaaacatggaaaaagcagtgccatgagtgatacagtgtttccttgcaagggaggactcgaaacagcctggagttagatatcttcttttgcccggattgatggggaggagggattaaaagagtcaggaagaagacagagctaatggataaatatcataacatggccttacatgtctgctgtcatcagccctgttccttaaaagttctagctgctttcttaaaaataatctgaaaatcttattgatactaaagaggagttaaaggcacataaagtcttaactctataatgttcatttagttgtttcagctccagggaaatggaggtattgatgttgaacctggttagggaagctgagcgcctgtggccctattactatccagttggcctctcccaaatcaacttcaagtcttttatagagaatcgtatttttctttcagaaattgttatgcctacagccattgaaaaatgaagcattcatgttgttacatcttccaaggatgtcagattagaaaatagcatcccacctctgggtatctgagtggctctgaagttgcaaataaaataatttgttgtcttgctagtcttttcattagacagcagaagaccatggatacagaacagcagtcaggtctgtggctggacacaaacactttcccaggttccaccctcttcctaagtgttgaagctaaatccttgttgaatactgtattttaaatcttt

SEQ ID NO: 1828 - DNA, 1890 bp, Homo Sapiens
  NM_002767
ctagagaggccgccaggagacccggcgctttcttccttctgcagctgaggctgcggcggggccggggctggggtcggggccaggaggaattttgttgtcagagaataaaaggaggttgtccataattgactttaagcagcaatcagtaaaacattgagctcttcagctccgcctttcttgctctgaaaattggaaaaccaagaaggttttgatgttttgtgtgacgccacctgaattagaaaccaagatgaacataaccaaaggtggtctggtgttgttttcagcaaactcgaattcatcatgtatggagctatcaaagaaaattgcagagcggctaggggtggagatgggcaaagtgcaggtttaccaggaacctaacagagaaacaagagtacaaattcaagagtctgtgaggggaaaagatgttttcatcatccaaactgtttcgaaggacgtgaacaccaccatcatggagctcctgatcatggtgtatgcatgtaagacctcttgtgccaagagcatcattggcgtgataccctactttccttacagcaagcagtgcaagatgagaaaaagaggctccattgtctctaaattgctggcttccatgatgtgcaaagctggtctaactcatcttattactatggatttacaccagaaggaaattcagggcttcttcaatattcctgttgacaatttaagagcatctcccttcttattacagtatattcaagaagagatcccagattacaggaatgcagtaatcgtggccaagtctccagcctcggcgaagagggcacagtcttttgctgagcgcctgcgcctgggaattgcagtgattcatggagaggcgcaggatgccgagtcggacttggtggatggacggcattccccacccatggtcagaagtgtggctgccatccaccccagcctggagatccccatgctgattcctaaagaaaagcccccaatcacggttgtgggtgatgttggaggaaggattgccatcatcgtggatgacatcattgatgatgttgacagctttcttgctgcagcagagaccctgaaggaaagaggtgcatataagatctttgtgatggcaactcatggcttgttgtcttctgacgccccccggcggattgaagagtctgccattgatgaggtggtggtcaccaatacaattccacatgaagtccagaagctccagtgccccaagattaaaactgtggatatcagcatgatcctttcagaggcgatccgtcggatccacaatggggagtccatgtcctaccttttcagaaacataggcttagatgactgagttttcctttaggaaaactcccgagggccaaactggaaacataagagtgactgctcggtgggatggatttcacaggaaccgtcatgcttgttcctccctctcccctgtaacctcacttcttattgattcctaagaagatagaccaactttttatgtcggtttgggtgtttgtgagtttggggagcaatttttataaaagaaaaactttattctcctcttttgaaaaggtaagacctcgttttagttgtaactgtttaaaaaataacacttggaataagatttgtaagctcacaaagccttcttccaaagttgcttgagccaagtgcttaaaaagttaataaaataaaatgatctgtatgatacctgcaattgaaaagccgaaaagattatactgtcaagtccagtaaatgacatttttagagatgcttttgtagacaagcatatggaatatgtgattgtatttattttctgcaactaaaaaaggaataaaaacttgtgtttgtgtgtttttctaaaactttgtgttttggcaatcgttttataactaaaataaaatgaaagctaaatct

SEQ ID NO: 1829 - DNA, 2138 bp, Homo Sapiens
  NM_002775
caatgggctgggccgcgcggccgcgcgcactcgcacccgctgcccccgaggccctcctgcactctccccggcgccgctctccggccctcgccctgtccgccgccaccgccgccgccgccagagtcgccatgcagatcccgcgcgccgctcttctcccgctgctgctgctgctgctggcggcgcccgcctcggcgcagctgtcccgggccggccgctcggcgcctttggccgccgggtgcccagaccgctgcgagccggcgcgctgcccgccgcagccggagcactgcgagggcggccgggcccgggacgcgtgcggctgctgcgaggtgtgcggcgcgcccgagggcgccgcgtgcggcctgcaggagggcccgtgcggcgaggggctgcagtgcgtggtgcccttcggggtgccagcctcggccacggtgcggcggcgcgcgcaggccggcctctgtgtgtgcgccagcagcgagccggtgtgcggcagcgacgccaacacctacgccaacctgtgccagctgcgcgccgccagccgccgctccgagaggctgcaccggccgccggtcatcgtcctgcagcgcggagcctgcggccaagggcaggaagatcccaacagtttgcgccataaatataactttatcgcggacgtggtggagaagatcgcccctgccgtggttcatatcgaattgtttcgcaagcttccgttttctaaacgagaggtgccggtggctagtgggtctgggtttattgtgtcggaagatggactgatcgtgacaaatgcccacgtggtgaccaacaagcaccgggtcaaagttgagctgaagaacggtgccacttacgaagccaaaatcaaggatgtggatgagaaagcagacatcgcactcatcaaaattgaccaccagggcaagctgcctgtcctgctgcttggccgctcctcagagctgcggccgggagagttcgtggtcgccatcggaagcccgttttcccttcaaaacacagtcaccaccgggatcgtgagcaccacccagcgaggcggcaaagagctggggctccgcaactcagacatggactacatccagaccgacgccatcatcaactatggaaactcgggaggcccgttagtaaacctggacggtgaagtgattggaattaacactttgaaagtgacagctggaatctcctttgcaatcccatctgataagattaaaaagttcctcacggagtcccatgaccgacaggccaaaggaaaagccatcaccaagaagaagtatattggtatccgaatgatgtcactcacgtccagcaaagccaaagagctgaaggaccggcaccgggacttcccagacgtgatctcaggagcgtatataattgaagtaattcctgataccccagcagaagctggtggtctcaaggaaaacgacgtcataatcagcatcaatggacagtccgtggtctccgccaatgatgtcagcgacgtcattaaaagggaaagcaccctgaacatggtggtccgcaggggtaatgaagatatcatgatcacagtgattcccgaagaaattgacccataggcagaggcatgagctggacttcatgtttccctcaaagactctcccgtggatgacggatgaggactctgggctgctggaataggacactcaagacttttgactgccattttgtttgttcagtggagactccctggccaacagaatccttcttgatagtttgcaggcaaaacaaatgtaatgttgcagatccgcaggcagaagctctgcccttctgtatcctatgtatgcagtgtgctttttcttgccagcttgggccattcttgcttagacagtcagcatttgtctcctcctttaactgagtcatcatcttagtccaactaatgcagtcgatacaatgcgtagatagaagaagccccacgggagccaggatgggactggtcgtgtttgtgcttttctccaagtcagcacccaaaggtcaatgcacagagaccccgggtgggtgagcgctggcttctcaaacggccgaagttgcctcttttaggaatctctttggaattgggagcacgatgactctgagtttgagctattaaagtacttcttacacattgcaaaaaaaaaaaaaaaaaa

SEQ ID NO: 1830 - DNA, 1001 bp, Homo Sapiens
  NM_002777
cgtgggtgcaccctggaccccaccatggctcaccggccccccagccctgccctggcgtccgtgctgctggccttgctgctgagcggtgctgcccgagctgcggagatcgtgggcgggcacgaggcgcagccacactcccggccctacatggcctccctgcagatgcgggggaacccgggcagccacttctgcggaggcaccttgatccaccccagcttcgtgctgacggccgcgcactgcctgcgggacataccccagcgcctggtgaacgtggtgctcggagcccacaacgtgcggacgcaggagcccacccagcagcacttctcggtggctcaggtgtttctgaacaactacgacgcggagaacaaactgaacgacgttctcctcatccagctgagcagcccagccaacctcagtgcctccgtcgccacagtccagctgccacagcaggaccagccagtgccccacggcacccagtgcctggccatgggctggggccgcgtgggtgcccacgaccccccagcccaggtcctgcaggagctcaatgtcaccgtggtcaccttcttctgccggccacataacatttgcactttcgtccctcgccgcaaggccggcatctgcttcggagactcaggtggccccctgatctgtgatggcatcatccaaggaatagactccttcgtgatctggggatgtgccacccgccttttccctgacttcttcacgcgggtagccctctacgtggactggatccgttccacgctgcgccgtgtggaggccaagggccgcccctgaaccgcccctcccacagcgctggccgggaccccgagcctggctccaaaccctcgaggcggatctttggacagaagcagctcttccccgaacactgtggcgtccgggacggccccacccgtccccccacactccctcccacggggctccgggagacaggccggccctgcacctcaccccaccgtgacctcaataaacgttgaaactcc

SEQ ID NO: 1831 - DNA, 1281 bp, Homo Sapiens
  NM_002786
gatatctctggaatagactgcgctaccctgcgccgccgccgtcaaactcccgcagacttctctgtagatcgctgagcgatactttcggcagcacctccttgattctcagttttgctggaggccgcaaccaggcccgcgccgccaccatgtttcgaaatcagtatgacaatgatgtcactgtttggagcccccagggcaggattcatcaaattgaatatgcaatggaagctgttaaacaaggttcagccacagttggtctgaaatcaaaaactcatgcagttttggttgcattgaaaagggcgcaatcagagcttgcagctcatcagaaaaaaattctccatgttgacaaccatattggtatctcaattgcggggcttactgctgatgctagactgttatgtaattttatgcgtcaggagtgtttggattccagatttgtattcgatagaccactgcctgtgtctcgtcttgtatctctaattggaagcaagacccagataccaacacaacgatatggccggagaccatatggtgttggtctccttattgctggttatgatgatatgggccctcacattttccaaacctgtccatctgctaactattttgactgcagagccatgtccattggagcccgttcccaatcagctcgtacttacttggagagacatatgtctgaatttatggagtgtaatttaaatgaactagttaaacatggtctgcgtgccttaagagagacgcttcctgcagaacaggacctgactacaaagaatgtttccattggaattgttggtaaagacttggagtttacaatctatgatgatgatgatgtgtctccattcctggaaggtcttgaagaaagaccacagagaaaggcacagcctgctcaacctgctgatgaacctgcagaaaaggctgatgaaccaatggaacattaagtgataagccagtctatatatgtattatcaaatatgtaagaatacaggcaccacatactgatgacaataatctatactttgaaccaaaagttgcagagtggtggaatgctatgttttaggaatcagtccagatgtgagttttttccaagcaacctcactgaaacctatataatggaatacatttttctttgaaagggtctgtataatcattttctagaaagtatgggtatctatactaatgtttttatatgaagaacataggtgtctttgtggttttaaagacaactgtgaaataaaattgtttcaccgcctggtaaaaaaaaaaaaaaaaaaaaaaaaaaaa

SEQ ID NO: 1832 - DNA, 1235 bp, Homo Sapiens
  NM_002789
cccgccccaacccagcggttctgcgcatgcgcgggggccatattagcagcggttattcggtgagcggtggtggtttattcttccgtggagttaagggctccgtggacatctcaggtcttcagggtcttccatctggaactatataaagttcagaaaacatgtctcgaagatatgactccaggaccactatattttctccagaaggtcgcttataccaagttgaatatgccatggaagctattggacatgcaggcacctgtttgggaattttagcaaatgatggtgttttgcttgcagcagagagacgcaacatccacaagcttcttgatgaagtctttttttctgaaaaaatttataaactcaatgaggacatggcttgcagtgtggcaggcataacttctgatgctaatgttctgactaatgaactaaggctcattgctcaaaggtatttattacagtatcaggagccaataccttgtgagcagttggttacagcgctgtgtgatatcaaacaagcttatacacaatttggaggaaaacgtccctttggtgtttcattgctgtacattggctgggataagcactatggctttcagctctatcagagtgaccctagtggaaattacgggggatggaaggccacatgcattggaaataatagcgctgcagctgtgtcaatgttgaaacaagactataaagaaggagaaatgaccttgaagtcagcacttgctttagctatcaaagtactaaataagaccatggatgttagtaaactctctgctgaaaaagtggaaattgcaacactaacaagagagaatggaaagacagtaatcagagttctcaaacaaaaagaagtggagcagttgatcaaaaaacatgaggaagaagaagccaaagctgagcgtgagaagaaagaaaaagaacagaaagaaaaggataaatagaatcagagattttattactcatttggggcaccatttcagtgtaaaagcagtcctactcttccacactaggaaggctttactttttttaactggtgcagtgggaaaataggacattacatactgaattgggtccttgtcatttctgtccaattgaatactttattgtaacgatgatggttacccttcatggacgtcttaatcttccacacacatcccctttttttggaataaaatttggaaaatggaaatgaaggaataaattctctgtagcagtaaaaaaaaaaaaaaaaa

SEQ ID NO: 1833 - DNA, 3838 bp, Homo Sapiens
  NM_002790
agttggtccttagtactgcggccgtgtgggtgagttggctgccggtgagttgggtgccggtggagtcgtgttggtcctcagaatccccgcgtagccgctgcctcctcctaccctcgccatgtttcttacccggtctgagtacgacaggggcgtgaatactttttctcccgaaggaagattatttcaagtggaatatgccattgaggctatcaagcttggttctacagccattgggatccagacatcagagggtgtgtgcctagctgtggagaagagaattacttccccactgatggagcccagcagcattgagaaaattgtagagattgatgctcacataggttgtgccatgagtgggctaattgctgatgctaagactttaattgataaagccagagtggagacacagaaccactggttcacctacaatgagacaatgacagtggagagtgtgacccaagctgtgtccaatctggctttgcagtttggagaagaagatgcagatccaggtgccatgtctcgtccctttggagtagcattattatttggaggagttgatgagaaaggaccccagctgtttcatatggacccatctgggacctttgtacagtgtgatgctcgagcaattggctctgcttcagagggtgcccagagctccttgcaagaagtttaccacaagtctatgactttgaaagaagccatcaagtcttcactcatcatcctcaaacaagtaatggaggagaagctgaatgcaacaaacattgagctagccacagtgcagcctggccagaatttccacatgttcacaaaggaagaacttgaagaggttatcaaggacatttaaggaatcctgatcctcagaacttctctgggacaatttcagttctaataatgtccttaaattttatttccagctcctgttccttggaaaatctccattgtatgtgcattttttaaatgatgtctgtacataaaggcagttctgaaataaagaaaattttaaaatatttgttaatagactgttctcttctaatagtcttttttttttttttttttttaagagatgaggtctcactatattgcccaggctggtttcaaactcctgggttcaagtgatcttcccgcctctgcctcctgaagtgctaggattataggcgagagccactgtgcccagccattgtaatacagtcttttgtttgaaatgcaaatgttagtgggccaaaaggacagtgttattaatatccctattctatgaagatgtctgttctaaaactgttttagtgatgctctataacagaatcaactatatccattaatcccatggtgttgataaatgaactagtccagctcttcccagtggttaatagatgttaacagcactgtaaatccatttcggccctataatttctggagcaaacgtgtatttttgctgcttttcttataaggagatgctactaattgactatcagaagaacatgttttgaggtcctcctcaaaacattgatgggttggaatcagccatcaacagtgttgtaccagttcttgggtcttgatagacaatttggaaagagatttccttgtttacgaagtgaaggactaagaattaaattaatgaccttggcctcactggcaatcaattacaaatctctatatcagtaagagaattgtaaaattcagaagcagtttacattagactttggaatgaatgatgaactttccccattagagctgccatcatatgattggtggagattgtttaaagaatcattctatctcagcctcaaaaattaccacgggaagatggtatcagtatcactacttaacagatgaagaatctaatgctgtgtgcccatggacacacaaaattaagctgttgggacttgaacagctcaaattttcttgtttcagatcaccagctcttgagtaatagggaaatctggagatttgaaaagtacttgcactgtccacaacatggctaatccatatgtggatgatgcagaattgatttaattcactaacagggaccccataattatttgctgggctctgggtatattgatgtgtaggaagttgtactatatgttaataaattatgactatttggataggctgaattcatactaaatccatactgtagttcaacaaaaaacaacatgtttatatacatttggaaactgcaatgataggaaacatttggaagaaagggattttgccctagaataacacataaggaaagcagagaattagagtatattgttactgaatgttccagagacttctagtgattttaacacttattaagtatagcatgttgatggggagatttgtttctctaaagatcactttgttttattaaatcctaatagaaaatacccttgaaaatcctatctcatttattcctgtaacaaatttattgagcacctacctactatatgccaagaaatgtattagccatcaggcagagagctgttcaaatggtagatatgatctgtgctcctgtgaaacttctagtggggagagccaaacaataaacaatattcctttttaactctaggttaatgcagaaatggataaagcccatgttgcttttgggagaggtgagttgtgtctctgaatcacatgcatttcatagggggaaaaatgcccaaatactaaggagtagctcttagcctatgtccgttcgcctcagcttaagttgttttccctcccactggctgggcagcatatttgtgttttacctggtaaaacagtaaatttcgtaccttctataattggcattcttcaaagaggtagaactttgatttttttgtagaatattaaaacaagctttcttaggttaaagaagtgatcttactacgaacagcaatggtttcatgatgtgtaattgctttatgttatctttctgctatagaatgtttcctggagaaaggtacggtttttagtaataagataaatttactttagtcctgcaaataaggtgaaatcttatgtccagtatctcacaaaggagaactgacagtgccacttttatatttaatgtcaatctcattagacaaaaatgaaatatagttcctagggtttccaatttaaaaagtgaaataataaatatattcactcaaacattttctcagtgccatatgcaagttaccatgtcccagaagctgatacagtttgaagaaggaaatatataagtactgtaagcctgtgataactaaaagcaacatactaaaaagtgaaggtacagataattggaacaaatttaatagcgtttaaaagtgtatttggtaatttctccaggaggtggcactgttgagttgttttttcttttcagacagtaagacaatagaccattcatctttgtgtcacccaaacaaagaaatattcctttataaccccctttcctccccccacctaatcacatgctactggaactgactgtcttgtgatctactcccatagttggcatagatttaaaaataatcttttttaaattaatctgatagtagttatggaaaggaacaaattgttcaccaattttcatcagctttatcttttcagtccagtaactgagaacttaaaaagactattctagtgattttactatcctgctcagatggcattcaaaaacatttttcacttctcacgtcttggaaaaatttgtaaattcgttaagtctttttgtttgaaagttaatgtgactggaaatattttaatgtaaatatcgggttgggtgcattgtatcattttgctctacaatgactatatcctcatttgggtttatggccagtttataattaaaagtaatctttacttgctttgagtgtaaaaaaaaaaaaaa

SEQ ID NO: 1834 - DNA, 1035 bp, Homo Sapiens
  NM_002791
gcggctggtaccccggaagcagtcgctgcaacttccgggaggtgcttgtgtgcctggtgcgggagctacggggcccagggattgtgtttaaagtagtgcttctaccaacatgtcccgtggttccagcgccggttttgaccgccacattaccattttttcacccgagggtcggctctaccaagtagaatatgcttttaaggctattaaccagggtggccttacatcagtagctgtcagagggaaagactgtgcagtaattgtcacacagaagaaagtacctgacaaattattggattccagcacagtgactcacttattcaagataactgaaaacattggttgtgtgatgaccggaatgacagctgacagcagatcccaggtacagagggcacgctatgaggcagctaactggaaatacaagtatggctatgagattcctgtggacatgctgtgtaaaagaattgccgatatttctcaggtctacacacagaatgctgaaatgaggcctcttggttgttgtatgattttaattggtatagatgaagagcaaggccctcaggtatataagtgtgatcctgcaggttactactgtgggtttaaagccactgcagcgggagttaaacaaactgagtcaaccagcttccttgaaaaaaaagtgaagaagaaatttgattggacatttgaacagacagtggaaactgcaattacatgcctgtctactgttctatcaattgatttcaaaccttcagaaatagaagttggagtagtgacagttgaaaatcctaaattcaggattcttacagaagcagagattgatgctcaccttgttgctctagcagagagagactaaacattgtcgttagtttaccagatccgtgatgccacttacctgtgtgtttggtaacaacaaaccaacatcatggaggtccctggattgaaaaaggagcctctcccactcctcctaccaccgaagtggttaggactctatataaataaaaacaaggcttttggaaaataaaaaaaaaaaaaaaaaaa

SEQ ID NO: 1835 - DNA, 784 bp, Homo Sapiens
  NM_002795
gagcggttgcgcagtgaaggctagacccggtttactggaattgctctggcgatcgaggggtcctagtacaccgcaatcatgtctattatgtcctataacggaggggccgtcatggccatgaaggggaagaactgtgtggccatcgctgcagacaggcgcttcgggatccaggcccagatggtgaccacggacttccagaagatctttcccatgggtgaccggctgtacatcggtctggccgggctcgccactgacgtccagacagttgcccagcgcctcaagttccggctgaacctgtatgagttgaaggaaggtcggcagatcaaaccttataccctcatgagcatggtggccaacctcttgtatgagaaacggtttggcccttactacactgagccagtcattgccgggttggacccgaagacctttaagcccttcatttgctctctagacctcatcggctgccccatggtgactgatgactttgtggtcagtggcacctgcgccgaacaaatgtacggaatgtgtgagtccctctgggagcccaacatggatccggatcacctgtttgaaaccatctcccaagccatgctgaatgctgtggaccgggatgcagtgtcaggcatgggagtcattgtccacatcatcgagaaggacaaaatcaccaccaggacactgaaggcccgaatggactaaccctgttcccagagcccacttttttttctttttttgaaataaaatagcctgtctttcaaaaaaaaaaaaaaaaaaaaaaaaaaaaaaa

SEQ ID NO: 1836 - DNA, 1009 bp, Homo Sapiens
  NM_002801
agacgtgaagcctagcagaggactttttagctgctcactggccccgcttgtctggccgactcatccgcccgcgacccctaatcccctctgcctgccccaagatgctgaagccagccctggagccccgagggggcttctccttcgagaactgccaaagaaatgcatcattggaacgcgtcctcccggggctcaaggtccctcacgcacgcaagaccgggaccaccatcgcgggcctggtgttccaagacggggtcattctgggcgccgatacgcgagccactaacgattcggtcgtggcggacaagagctgcgagaagatccacttcatcgcccccaaaatctactgctgtggggctggagtagccgcggacgccgagatgaccacacggatggtggcgtccaagatggagctacacgcgttatctacgggccgcgagccccgcgtggccacggtcactcgcatcctgcgccagacgctcttcaggtaccagggccacgtgggtgcatcgctgatcgtgggcggcgtagacctgactggaccgcagctctacggcgtgcatccccatggctcctacagccgtctgcccttcacagccctgggctctggtcaggacgcggccctggcggtgctagaagaccggttccagccgaacatgacgctggaggctgctcaggggctgctggtggaagccgtcaccgccgggatcttgggtgacctgggctccgggggcaatgtggacgcatgtgtgatcacaaagactggcgccaagctgctgcggacactgagctcacccacagagcccgtgaagaggtctggccgctaccactttgtgcctggaaccacagctgtcctgacccagacagtgaagccactaaccctggagctagtggaggaaactgtgcaggctatggaggtggagtaagctgaggcttagagcttggaacaagggggaataaacccagaaaatacagttaaacaaaaaaaaaaaaaaaaaaaaaaaaaaaaaaa

SEQ ID NO: 1837 - DNA, 1586 bp, Homo Sapiens
  NM_002802
agtggtggaggaacttccggcagcggcagctcaagtggccaaggcaagatgggtcaaagtcagagtggtggtcatggtcctggaggtggcaagaaggatgacaaggacaagaaaaagaaatatgaacctcctgtaccaactagagtggggaaaaagaagaagaaaacaaagggaccagatgctgccagcaaactgccactggtgacacctcacactcagtgccggttaaaattactgaagttagagagaattaaagactatcttctcatggaggaagaattcattagaaatcaggaacaaatgaaaccattagaagaaaagcaagaggaggaaagatcaaaagtggatgatctgagggggaccccgatgtcagtaggaaccttggaagagatcattgatgacaatcatgccatcgtgtctacatctgtgggctcagaacactacgtcagcattctttcatttgtagacaaggatctgctggaacctggctgctcggtcctgctcaaccacaaggtgcatgccgtgataggggtgctgatggatgacacggatcccctggtcacagtgatgaaggtagaaaaggccccccaggagacctatgcagatattggggggttggacaaccaaattcaggaaattaaggaatctgtggagcttcctctcacccatcctgaatattatgaagagatgggtataaagcctcctaagggggtcattctctatggtccacctggcacaggtaaaaccttgttagccaaagcagtagcaaaccaaacctcagccactttcttgagagtggttggctctgaacttattcagaagtacctaggtgatgggcccaaactcgtacgggaattgttccgagttgctgaagaacatgcaccgtccatcgtgtttattgatgaaattgacgccattgggacaaaaagatatgactccaattctggtggtgagagagaaattcagcgaacaatgttggaactgctgaaccagttggatggatttgattctaggggagatgtgaaagttatcatggccacaaaccgaatagaaactttggatccagcacttatcagaccaggccgcattgacaggaagattgagttccccctgcctgatgaaaagacgaagaagcgcatctttcagattcacacaagcaggatgacgctggctgatgatgtaaccctggacgacctgatcatggctaaagatgacctctctggtgctgacatcaaggcaatctgtacagaagctggtctgatggccttaagagaacgtagaatgaaagtaacaaatgaagacttcaaaaaatctaaagaaaatgttctttataagaaacaggaaggcacccctgaggggctgtatctctaatgaaccatggctgtcatcaggaaaatggttgggagatttctcaatccctgaaagggatgaggttgggggagttgcccagaggaatccctgttcccactgatttttattagcaaaacatcctgtgtcttttggagtacgatgtgtaagtgcccattgggtggcctgttggtcactgtgcagcagtctgcttcccaataaagcgtgctctttcacaa

SEQ ID NO: 1838 - DNA, 1372 bp, Homo Sapiens
  NM_002805
gtcttcaggtcccaatcctccgcttccgcgcttgcgcgccaagacggctcggatgccggcggtctctgctgaagagagaagatggcgcttgacggaccagagcagatggagctggaggaggggaaggcaggcagcggactccgccaatattatctgtccaagattgaagaactccagctgattgtgaatgataagagccaaaacctccggaggctgcaggcacagaggaacgaactaaatgctaaagttcgcctattgcgggaggagctacagctgctgcaggagcagggctcctatgtgggggaagtagtccgggccatggataagaagaaagtgttggtcaaggtacatcctgaaggtaaatttgttgtagacgtggacaaaaacattgacatcaatgatgtgacacccaattgccgggtggctctaaggaatgacagctacactctgcacaagatcctgcccaacaaggtagacccattagtgtcactgatgatggtggagaaagtaccagattcaacttatgagatgattggtggactggacaaacagatcaaggagatcaaagaagtgatcgagctgcctgttaagcatcctgagctcttcgaagcactgggcattgctcagcccaagggagtgctgctgtatggacctccaggcactgggaagacactgttggcccgggctgtggctcatcatacggactgtacctttattcgtgtctctggctctgaactggtacagaaattcataggggaaggggcaagaatggtgagggagctgtttgtcatggcacgggaacatgctccatctatcatcttcatggacgaaatcgactccatcggctcctcgcggctggaggggggttctggaggggacagtgaagtgcagcgcacgatgctggagttgctcaaccagctcgacggctttgaggccaccaagaacatcaaggttatcatggctactaataggattgatatcctggactcggcactgcttcgcccagggcgcattgacagaaaaattgaattcccaccccccaatgaggaggcccggctggacattttgaagattcattctcggaagatgaacctgacccgggggatcaacctgagaaaaattgctgagctcatgccaggagcatcaggggctgaagtgaagggcgtgtgcacagaagctggcatgtatgccctgcgagaacggcgagtccatgtcactcaggaggactttgagatggcagtagccaaggtcatgcagaaggacagtgagaaaaacatgtccatcaagaaattatggaagtgagtggacagcctttgtgtgtatctctccaataaagctctgtgggccaagtcctctaggaaaaaaaaaaaaa

SEQ ID NO: 1839 - DNA, 1599 bp, Homo Sapiens
  NM_002806
atggccattcccggcatcccctatgagagacggcttctcatcatggcggaccctagagataaggcgcttcaggactaccgcaagaagttgcttgaacacaaggagatcgacggccgtcttaaggagttaagggaacaattaaaagaacttaccaagcagtatgaaaagtctgaaaatgatctgaaggccctacagagtgttgggcagatcgtgggtgaagtgcttaaacagttaactgaagaaaaattcattgttaaagctaccaatggaccaagatatgttgtgggttgtcgtcgacagcttgacaaaagtaagctgaagccaggaacaagagttgctttggatatgactacactaactatcatgagatatttgccgagagaggtggatccactggtttataacatgtctcatgaggaccctgggaatgtttcttattctgagattggagggctatcagaacagatccgggaattaagagaggtgatagaattacctcttacaaacccagagttatttcagcgtgtaggaataatacctccaaaaggctgtttgttatatggaccaccaggtacgggaaaaacactcttggcacgagccgttgctagccagctggactgcaatttcttaaaggttgtatctagttctattgtagacaagtacattggtgaaagtgctcgtttgatcagagaaatgtttaattatgctagagatcatcaaccatgcatcatttttatggatgaaatagatgctattggtggtcgtcggttttctgagggtacttcagctgacagagagattcagagaacgttaatggagttactgaatcaaatggatggatttgatactctgcatagagttaaaatgatcatggctacaaacagaccagatacactggatcctgctttgctgcgtccaggaagattagatagaaaaatacatattgatttgccaaatgaacaagcaagattagacatactgaaaatccatgcaggtcccattacaaagcatggtgaaatagattatgaagcaattgtgaagctttcggatggctttaatggagcagatctgagaaatgtttgtactgaagcaggtatgttcgcaattcgtgctgatcatgattttgtagtacaggaagacttcatgaaagcagtcagaaaagtggctgattctaagaagctggagtctaaattggactacaaacctgtgtaatttactgtaagatttttgatggctgcatgacagatgttggcttattgtaaaaataaagttaaagaaaataatgtatgtattggtaatgatgtcattaaaagtatatgaataaaaatatgagtaacatcataaaaattagtaattcaacttttaagatacagaagaaatttgtatgtttgttaaagttgcatttattgcagcaagttacaaagggaaagtgttgaagcttttcatatttgctgcgtgagcattttgtaaaatattgaaagtggtttgagatagtggtataagaaagcatttcttatgacttattttgtatcatttgttttcctcatctaaaaagttgaataaaatctgtttgattcagttctcctacatataaaaaaa

SEQ ID NO: 1840 - DNA, 1332 bp, Homo Sapiens
  NM_002810
aattggaggagttgttgttaggccgtcccggagacccggtcgggagggaggaaggtggcaagatggtgttggaaagcactatggtgtgtgtggacaacagtgagtatatgcggaatggagacttcttacccaccaggctgcaggcccagcaggatgctgtcaacatagtttgtcattcaaagacccgcagcaaccctgagaacaacgtgggccttatcacactggctaatgactgtgaagtgctgaccacactcaccccagacactggccgtatcctgtccaagctacatactgtccaacccaagggcaagatcaccttctgcacgggcatccgcgtggcccatctggctctgaagcaccgacaaggcaagaatcacaagatgcgcatcattgcctttgtgggaagcccagtggaggacaatgagaaggatctggtgaaactggctaaacgcctcaagaaggagaaagtaaatgttgacattatcaattttggggaagaggaggtgaacacagaaaagctgacagcctttgtaaacacgttgaatggcaaagatggaaccggttctcatctggtgacagtgcctcctgggcccagtttggctgatgctctcatcagttctccgattttggctggtgaaggtggtgccatgctgggtcttggtgccagtgactttgaatttggagtagatcccagtgctgatcctgagctggccttggcccttcgtgtatctatggaagagcagcggcagcggcaggaggaggaggcccggcgggcagctgcagcttctgctgctgaggccgggattgctacgactgggactgaagactcagacgatgccctgctgaagatgaccatcagccagcaagagtttggccgcactgggcttcctgacctaagcagtatgactgaggaagagcagattgcttatgccatgcagatgtccctgcagggagcagagtttggccaggcggaatcagcagacattgatgccagctcagctatggacacatctgagccagccaaggaggaggatgattacgacgtgatgcaggaccccgagttccttcagagtgtcctagagaacctcccaggtgtggatcccaacaatgaagccattcgaaatgctatgggctccctggcctcccaggccaccaaggacggcaagaaggacaagaaggaggaagacaagaagtgagactggagggaaagggtagctgagtctgcttaggggactgcatgggaagcacggaatatagggttagatgtgtgttatctgtaaccattacagcctaaataaagcttggcaactttttttccttttttgcttcaaa

SEQ ID NO: 1841 - DNA, 1546 bp, Homo Sapiens
  NM_002814
attggtgaagctctaacggctgttttgactggcgtagccggagccggcgacgtgaggcgggcgttgctcgcgcgacaagtagttgctgggacagcgaaatggaggggtgtgtgtctaacctaatggtctgcaacctggcctacagcgggaagctggaagagttgaaggagagtattctggccgataaatccctggctactagaactgaccaggacagcagaactgcattgcactgggcatgctcagctggacatacagaaattgttgaatttttgttgcaacttggagtgccagtgaatgataaagacgatgcaggttggtctcctcttcatattgcggcttctgctggccgggatgagattgtaaaagcccttctgggaaaaggtgctcaagtgaatgctgtcaatcaaaatggctgtactcccttacattatgcagcttcgaaaaacaggcatgagatcgctgtcatgttactggaaggcggggctaatccagatgctaaggaccattatgaggctacagcaatgcaccgggcagcagccaagggtaacttgaagatgattcatatccttctgtactacaaagcatccacaaacatccaagacactgagggtaacactcctctacacttagcctgtgatgaggagagagtggaagaagcaaaactgctggtgtcccaaggagcaagtatttacattgagaataaagaagaaaagacacccctgcaagtggccaaaggtggcctgggtttaatactcaagagaatggtggaaggttaaacagcttggatttattcttactttgtatgttgtgttgttgtccccagtgtcctacaaactaatgtatttgtgcacaagacatcatctatgaatgatgaagttttctcaccttcaaagtcttataaacatgttgactcttgttcctgctgagttacttgttcgaagcttacagcttgttttccaggcatcgaataactgttgagattgttctactgttgtcgtatattcttctatattgaattctggttaatttggagtaactaattctgtggctgttgtgagtcttcagcaccctcccatgtaccttatatccctctctgaaacagaacagctccaatagcaacaagctagttgttctgccagatgtttctatgtggattctgtaatgttcctccatacagttaaaacatcctaacttgtttttcaagctcactcaggcctacgccaaacgtttctgttttttttaaccatgaggtttaatttatttttgtgataggagggatatttacatattttagtggaccacattttaagttggatggtgtgctctaaaatactgaaaaacaatagcccatatacctatgtatttgtttttgatgggttgtttactctgaaataaaatgtatggttttcttaaaaggaagttttaaagtacctattttgtgtcatcctgtattgaaaagaatgtcaagcttgttaaaatgacatgtaacaaaaatgtattttgatttgtatttcagaaactaaaaaataaaatgttgaaagaa

SEQ ID NO: 1842 - DNA, 1814 bp, Homo Sapiens
  NM_002816
ctgagcgggtgcgcgggcaacttccggtgtgggtgacgagtggtggccgaagcagggggacagcaagggacgctcaggcggggaccatggcggacggcggctcggagcgggctgacgggcgcatcgtcaagatggaggtggactacagcgccacggtggatcagcgcctacccgagtgtgcgaagctagccaaggaaggaagacttcaagaagtcattgaaacccttctctctctggaaaagcagactcgtactgcttccgatatggtatcgacatcccgtatcttagttgcagtagtgaagatgtgctatgaggctaaagaatgggatttacttaatgaaaatattatgcttttgtccaaaaggcggagtcagttaaaacaagctgttgccaaaatggttcaacagtgctgtacttatgttgaggaaatcacagaccttcctatcaaacttcgattaattgatactctacgaatggttaccgaaggcaagatttatgttgaaattgagcgtgcgcgactgactaaaacattagcaactataaaagaacaaaatggtgatgtgaaagaggcagcctccattttacaggagttacaggtggaaacctacgggtcaatggaaaagaaagagcgagtggaatttattttggagcaaatgaggctctgcctagctgtgaaggattacattcgaacacaaatcatcagcaagaaaattaacaccaaatttttccaggaagaaaatacagagaaattaaagttgaagtactataatttaatgattcagctggatcaacatgagggatcctatttgtctatttgtaagcactacagagcaatatatgatactccctgtatacaggcagaaagtgaaaaatggcagcaggctctgaagagtgttgtactctatgttatcctggctccttttgacaatgaacagtcagatttggttcaccgaataagtggtgacaagaagttagaagaaattcccaaatacaaggatcttttaaagctttttaccacaatggagttgatgcgttggtccacacttgttgaggactatggaatggaattaagaaaaggttcccttgagagtcctgcaacggatgtttttggttctacagaggaaggtgaaaaaaggtggaaagacttgaagaacagagttgttgaacataatattagaataatggccaagtattatactcggataacaatgaaaaggatggcacagcttctggatctatctgttgatgagtccgaagcctttctctcaaatctagtagttaacaagaccatctttgctaaagtagacagattagcaggaattatcaacttccagagacccaaggatccaaataatttattaaatgactggtctcagaaactgaactcattaatgtctctggttaacaaaactacgcatctcatagccaaagaggagatgatacataatctacaataagggtcttagtgctttagaaaaaagttaaaattggaagtcattaaaaaaagactgttataatggtgtatatgttggggttttttttctaagcttctttgtcttaaattttaaaatagtgaatatgtttgagactccctttgacctttcagttccccaagttcattgttaactttgcatttgcaattggtgcaaaaatacagatttctgtcgtctgaatacacaaaaagttgtgtcataacttacccagatatgtttttctatcatttgaaacctttttagctactgtttgttttcattcaactaacaaacatattccaataataaaagcagtatatacataaaaaaaaaaaaaaaaaa

SEQ ID NO: 1843 - DNA, 829 bp, Homo Sapiens
  NM_002818
tggggagtgaaagcgaaagcccgggcgactagccgggagaccagagatctagcgactgaagcagcatggccaagccgtgtggggtgcgcctgagcggggaagcccgcaaacaggtggaggtcttcagacagaatcttttccaggaggctgaggaattcctctacagattcttgccacagaaaatcatatacctgaatcagctcttgcaagaggactccctcaatgtggctgacttgacttccctccgggccccactggacatccccatcccagaccctccacccaaggatgatgagatggaaacagataagcaggagaagaaagaagtccataagtgtggatttctccctgggaatgagaaagtcctgtccctgcttgccctggttaagccagaagtctggactctcaaagagaaatgcattctggtgattacatggatccaacacctgatccccaagattgaagatggaaatgattttggggtagcaatccaggagaaggtgctggagagggtgaatgccgtcaagaccaaagtggaagctttccagacaaccatttccaagtacttctcagaacgtggggatgctgtggccaaggcctccaaggagactcatgtaatggattaccgggccttggtgcatgagcgagatgaggcagcctatggggagctcagggccatggtgctggacctgagggccttctatgctgagctttatcatatcatcagcagcaacctggagaaaattgtcaacccaaagggtgaagaaaagccatctatgtactgaacccgggactagaaggaaaataaatgatctatatgttgtgtgga

SEQ ID NO: 1844 - DNA, 3340 bp, Homo Sapiens
  NM_002819
tgcgggcgtctccgccattttgtgagtctataactcggagccgttgggtcggttcctgctattccggcgcctccactccgtcccccgcgggtctgctctgtgtgccatggacggcattgtcccagatatagccgttggtacaaagcggggatctgacgagcttttctctacttgtgtcactaacggaccgtttatcatgagcagcaactcggcttctgcagcaaacggaaatgacagcaagaagttcaaaggtgacagccgaagtgcaggcgtcccctctagagtgatccacatccggaagctccccatcgacgtcacggagggggaagtcatctccctggggctgccctttgggaaggtcaccaacctcctgatgctgaaggggaaaaaccaggccttcatcgagatgaacacggaggaggctgccaacaccatggtgaactactacacctcggtgacccctgtgctgcgcggccagcccatctacatccagttctccaaccacaaggagctgaagaccgacagctctcccaaccaggcgcgggcccaggcggccctgcaggcggtgaactcggtccagtcggggaacctggccttggctgcctcggcggcggccgtggacgcagggatggcgatggccgggcagagccccgtgctcaggatcatcgtggagaacctcttctaccctgtgaccctggatgtgctgcaccagattttctccaagttcggcacagtgttgaagatcatcaccttcaccaagaacaaccagttccaggccctgctgcagtatgcggaccccgtgagcgcccagcacgccaagctgtcgctggacgggcagaacatctacaacgcctgctgcacgctgcgcatcgacttttccaagctcaccagcctcaacgtcaagtacaacaatgacaagagccgtgactacacacgcccagacctgccttccggggacagccagccctcgctggaccagaccatggccgcggccttcggtgcacctggtataatctcagcctctccgtatgcaggagctggtttccctcccacctttgccattcctcaagctgcaggcctttccgttccgaacgtccacggcgccctggcccccctggccatcccctcggcggcggcggcagctgcggcggcaggtcggatcgccatcccgggcctggcgggggcaggaaattctgtattgctggtcagcaacctcaacccagagagagtcacaccccaaagcctctttattcttttcggcgtctacggtgacgtgcagcgcgtgaagatcctgttcaataagaaggagaacgccctagtgcagatggcggacggcaaccaggcccagctggccatgagccacctgaacgggcacaagctgcacgggaagcccatccgcatcacgctctcgaagcaccagaacgtgcagctgccccgcgagggccaggaggaccagggcctgaccaaggactacggcaactcacccctgcaccgcttcaagaagccgggctccaagaacttccagaacatattcccgccctcggccacgctgcacctctccaacatcccgccctcagtctccgaggaggatctcaaggtcctgttttccagcaatgggggcgtcgtcaaaggattcaagttcttccagaaggaccgcaagatggcactgatccagatgggctccgtggaggaggcggtccaggccctcattgacctgcacaaccacgacctcggggagaaccaccacctgcgggtctccttctccaagtccaccatctaggggcacaggcccccacggccgggccccctggcgacaacttccatcattccagagaaaagccactttaaaaacagctgaagtgaccttagcagaccagagattttatttttttaaagagaaatcagtttacctgtttttaaaaaaattaaatctagttcaccttgctcaccctgcggtgacagggacagctcaggctcttggtgactgtggcagcgggagttcccggccctccacacccggggccagaccctcggggccatgccttggtggggcctgtgtcgggcgtggggcctgcaggtgggcgccccgaccacgacttggcttccttgtgccttaaaaaacctgccttcctgcagccacacacccacccggggtgtcctggggacccaaggggtgggggggtcacaccagagagaggcagggggcctggccggctcctgcaggatcatgcagctggggcgcggcggccgcggctgcgacaccccaaccccagccctctaatcaagtcacgtgattctcccttcaccccgcccccagggccttcccttctgcccccaggcgggctccccgctgctccagctgcggagctggtcgacataatctctgtattatatactttgcagttgcagacgtctgtgcctagcaatatttccagttgaccaaatattctaatcttttttcatttatatgcaaaagaaatagttttaagtaactttttatagcaagatgatacaatggtatgagtgtaatctaaacttccttgtggtattaccttgtatgctgttacttttattttattccttgtaattaagtcacaggcaggacccagtttccagagagcaggcggggccgcccagtgggtcaggcacagggagccccggtcctatcttagagcccctgagcttcagggaaggggcgggcgtgtcgccgcctctggcatcgcctccggttgccttacaccacgccttcacctgcagtcgcctagaaaacttgctctcaaacttcagggttttttcttccttcaaattttggaccaaagtctcatttctgtgttttgcctgcctctgatgctgggacccggaaggcgggcgctcctcctgtcttctctgtgctctttctaccgcccccgcgtcctgtcccgggggctctcctaggatcccctttccgtaaaagcgtgtaacaagggtgtaaatatttataattttttatacctgttgtgagacccgaggggcggcggcgcggttttttatggtgacacaaatgtatattttgctaacagcaattccaggctcagtattgtgaccgcggagccacaggggaccccacgcacattccgttgccttacccgatggcttgtgacgcggagagaaccgattaaaaccgtttgagaaactcctcccttgtctagccctgtgttcgctgtggacgctgtagaggcaggttggccagtctgtacctggacttcgaataaatcttctgtatcctcgctccgttccgccttaaaaaaaaaaaaaaaaaaaaaaaaaaaaaaaaaaaaaaaaaaaaaaaaaaaaaaaaaaa

SEQ ID NO: 1845 - DNA, 1558 bp, Homo Sapiens
  NM_002825
gagtgcaaagcgctctccctccctcgcccagccttcgtcctcctggcccgctcctctcatccctcccattctccatttcccttccgttccctccctgtcagggcgtaattgagtcaaaggcaggatcaggttccccgccttccagtccaaaaatcccgccaagagagccccagagcagaggaaaatccaaagtggagagaggggaagaaagagaccagtgagtcatccgtccagaaggcggggagagcagcagcggcccaagcaggagctgcagcgagccgggtacctggactcagcggtagcaacctcgccccttgcaacaaaggcagactgagcgccagagaggacgtttccaactcaaaaatgcaggctcaacagtaccagcagcagcgtcgaaaatttgcagctgccttcttggcattcattttcatactggcagctgtggatactgctgaagcagggaagaaagagaaaccagaaaaaaaagtgaagaagtctgactgtggagaatggcagtggagtgtgtgtgtgcccaccagtggagactgtgggctgggcacacgggagggcactcggactggagctgagtgcaagcaaaccatgaagacccagagatgtaagatcccctgcaactggaagaagcaatttggcgcggagtgcaaataccagttccaggcctggggagaatgtgacctgaacacagccctgaagaccagaactggaagtctgaagcgagccctgcacaatgccgaatgccagaagactgtcaccatctccaagccctgtggcaaactgaccaagcccaaacctcaagcagaatctaagaagaagaaaaaggaaggcaagaaacaggagaagatgctggattaaaagatgtcacctgtggaacataaaaaggacatcagcaaacaggatcagttaactattgcatttatatgtaccgtaggctttgtattcaaaaattatctatagctaagtacacaataagcaaaaacaaaaagaaaagaaaatttttgtagtagcgttttttaaatgtatactatagtaccagtaggggcttataataaaggactgtaatcttatttaggaagttgacttatagtacatgataaatgatagacaattgaggtaagttttttgaaattatgtgacattttacattaaattttttttacattttttgggcagcaatttaaatgttatgactatgtaaactacttctcttgttaggtaatttttttcacctagatttttttcccaattgagaaaaatatatactaaacaaaatagcaataaaacataatcactctatttgaagaaaatatcttgttttctgccaatagattttttaaaatgtagtcagcaaaatgggggtggggaagcagagcatgtcctagttcaatgttgactttttttttttttaaagaaaagcattaagacataaaattctttcactttggcagaagcatttgttttcttgatgaaattatttttccatctgaggaaaaaaatactaggaaaataaatcaaggtgatgctgaaaaaaaaaaaaaaaaaa

SEQ ID NO: 1846 - DNA, 3316 bp, Homo Sapiens
  NM_002826
ggaggcaggcggtgccgcggcgccgggacccgactcatccggtgcttgcgtgtggtggtgagcgcagcgccgaggatgaggaggtgcaacagcggctccgggccgccgccgtcgctgctgctgctgctgctgtggctgctcgcggttcccggcgctaacgcggccccgcggtcggcgctctattcgccttccgacccgctgacgctgctgcaggcggacacggtgcgcggcgcggtgctgggctcccgcagcgcctgggccgtggagttcttcgcctcctggtgcggccactgcatcgccttcgccccgacgtggaaggcgctggccgaagacgtcaaagcctggaggccggccctgtatctcgccgccctggactgtgctgaggagaccaacagtgcagtctgcagagacttcaacatccctggcttcccgactgtgaggttcttcaaggcctttaccaagaacggctcgggagcagtatttccagtggctggtgctgacgtgcagacactgcgggagaggctcattgacgccctggagtcccatcatgacacgtggcccccagcctgtcccccactggagcctgccaagctggaggagattgatggattctttgcgagaaataacgaagagtacctggctctgatctttgaaaagggaggctcctacctgggtagagaggtggctctggacctgtcccagcacaaaggcgtggcggtgcgcagggtgctgaacacagaggccaatgtggtgagaaagtttggtgtcaccgacttcccctcttgctacctgctgttccggaatggctctgtctcccgagtccccgtgctcatggaatccaggtccttctataccgcttacctgcagagactctctgggctcaccagggaggctgcccagaccacagttgcaccaaccactgctaacaagatagctcccactgtttggaaattggcagatcgctccaagatctacatggctgacctggaatctgcactgcactacatcctgcggatagaagtgggcaggttcccggtcctggaagggcagcgcctggtggccctgaaaaagtttgtggcagtgctggccaagtatttccctggccggcccttagtccagaacttcctgcactccgtgaatgaatggctcaagaggcagaagagaaataaaattccctacagtttctttaaaactgccctggacgacaggaaagagggtgccgttcttgccaagaaggtgaactggattggctgccaggggagtgagccgcatttccggggctttccctgctccctgtgggtcctcttccacttcttgactgtgcaggcagctcggcaaaatgtagaccactcacaggaagcagccaaggccaaggaggtcctcccagccatccgaggctacgtgcactacttcttcggctgccgagactgcgctagccacttcgagcagatggctgctgcctccatgcaccgggtggggagtcccaacgccgctgtcctctggctctggtctagccacaacagggtcaatgctcgccttgcaggtgcccccagcgaggacccccagttccccaaggtgcagtggccaccccgtgaactttgttctgcctgccacaatgaacgcctggatgtgcccgtgtgggacgtggaagccaccctcaacttcctcaaggcccacttctccccaagcaacatcatcctggacttccctgcagctgggtcagctgcccggagggatgtgcagaatgtggcagccgccccagagctggcgatgggagccctggagctggaaagccggaattcaactctggaccctgggaagcctgagatgatgaagtcccccacaaacaccaccccacatgtgccggctgagggacctgaggcaagtcgacccccgaagctgcaccctggcctcagagctgcaccaggccaggagcctcctgagcacatggcagagcttcagaggaatgagcaggagcagccgcttgggcagtggcacttgagcaagcgagacacaggggctgcattgctggctgagtccagggctgagaagaaccgcctctggggccctttggaggtcaggcgcgtgggccgcagctccaagcagctggtcgacatccctgagggccagctggaggcccgagctggacggggccgaggccagtggctgcaggtgctgggagggggcttctcttacctggacatcagcctctgtgtggggctctattccctgtccttcatgggcctgctggccatgtacacctacttccaggccaagataagggccctgaagggccatgctggccaccctgcagcctgaaccacctggggaggaggcgggagagggagctgccatctctaggcacctcaagccccctgaccccattccctcccctcccaccccttgctccttgtctggcctagaagtgtgggaaattcaggaaaacgagttgctccagtgaagcttcttggggttgctaggacagagagctcctttgacacaaaagacaggagcagggtccaggttcccctgctgtgcagggagggcagccccgggcagtgggcatagggcagctcagtccctggcctcttagcaccacattcctgtttttcagcttatttgaagtcctgcctcattctcactggagcctcagtctctcctgcttggtcttggccctcaactggggcaagtgaagccagaggagggtcccccagctgggtgggctggaatggaactcctcactagctgctggggctccgcccaccctgctcccttccggacaatgaagaagcctttgcaccctgggaggaaggaccaccccgggccctctatgcctggccagcctccagctcctcagacctcctgggtggggtttggcttcagggtggggtttggaagcttctggaagtcgtgctggtctcccaggtgaggcaagccatggttgctgggctgtagggtgagtggcttgcttggtgggacctgacgagttggtggcatgggaaggatgtgggtctctagtgccttgccctggcttagctgcaggagaagatggctgctttcacttccccccattgagctctgctccctctgagcctggtcttttgtccttttttattttggtctccaagatgaatgctcatctttggagggtgccaggtagaagctagggaggggagtgtcttctctctccaggtttcaccttccagtgtgcagaagttagaagggtctggcgggggcagtgccttacacatgcttgattcccacgctaccccctgccttgggaggtgtgtggaataaattatttttgttaaggcaa

SEQ ID NO: 1847 - DNA, 3318 bp, Homo Sapiens
  NM_002827
gtgatgcgtagttccggctgccggttgacatgaagaagcagcagcggctagggcggcggtagctgcaggggtcggggattgcagcgggcctcggggctaagagcgcgacgcggcctagagcggcagacggcgcagtgggccgagaaggaggcgcagcagccgccctggcccgtcatggagatggaaaaggagttcgagcagatcgacaagtccgggagctgggcggccatttaccaggatatccgacatgaagccagtgacttcccatgtagagtggccaagcttcctaagaacaaaaaccgaaataggtacagagacgtcagtccctttgaccatagtcggattaaactacatcaagaagataatgactatatcaacgctagtttgataaaaatggaagaagcccaaaggagttacattcttacccagggccctttgcctaacacatgcggtcacttttgggagatggtgtgggagcagaaaagcaggggtgtcgtcatgctcaacagagtgatggagaaaggttcgttaaaatgcgcacaatactggccacaaaaagaagaaaaagagatgatctttgaagacacaaatttgaaattaacattgatctctgaagatatcaagtcatattatacagtgcgacagctagaattggaaaaccttacaacccaagaaactcgagagatcttacatttccactataccacatggcctgactttggagtccctgaatcaccagcctcattcttgaactttcttttcaaagtccgagagtcagggtcactcagcccggagcacgggcccgttgtggtgcactgcagtgcaggcatcggcaggtctggaaccttctgtctggctgatacctgcctcttgctgatggacaagaggaaagacccttcttccgttgatatcaagaaagtgctgttagaaatgaggaagtttcggatggggctgatccagacagccgaccagctgcgcttctcctacctggctgtgatcgaaggtgccaaattcatcatgggggactcttccgtgcaggatcagtggaaggagctttcccacgaggacctggagcccccacccgagcatatccccccacctccccggccacccaaacgaatcctggagccacacaatgggaaatgcagggagttcttcccaaatcaccagtgggtgaaggaagagacccaggaggataaagactgccccatcaaggaagaaaaaggaagccccttaaatgccgcaccctacggcatcgaaagcatgagtcaagacactgaagttagaagtcgggtcgtggggggaagtcttcgaggtgcccaggctgcctccccagccaaaggggagccgtcactgcccgagaaggacgaggaccatgcactgagttactggaagcccttcctggtcaacatgtgcgtggctacggtcctcacggccggcgcttacctctgctacaggttcctgttcaacagcaacacatagcctgaccctcctccactccacctccacccactgtccgcctctgcccgcagagcccacgcccgactagcaggcatgccgcggtaggtaagggccgccggaccgcgtagagagccgggccccggacggacgttggttctgcactaaaacccatcttccccggatgtgtgtctcacccctcatccttttactttttgccccttccactttgagtaccaaatccacaagccattttttgaggagagtgaaagagagtaccatgctggcggcgcagagggaaggggcctacacccgtcttggggctcgccccacccagggctccctcctggagcatcccaggcgggcggcacgccaacagccccccccttgaatctgcagggagcaactctccactccatatttatttaaacaattttttccccaaaggcatccatagtgcactagcattttcttgaaccaataatgtattaaaattttttgatgtcagccttgcatcaagggctttatcaaaaagtacaataataaatcctcaggtagtactgggaatggaaggctttgccatgggcctgctgcgtcagaccagtactgggaaggaggacggttgtaagcagttgttatttagtgatattgtgggtaacgtgagaagatagaacaatgctataatatataatgaacacgtgggtatttaataagaaacatgatgtgagattactttgtcccgcttattctcctccctgttatctgctagatctagttctcaatcactgctcccccgtgtgtattagaatgcatgtaaggtcttcttgtgtcctgatgaaaaatatgtgcttgaaatgagaaactttgatctctgcttactaatgtgccccatgtccaagtccaacctgcctgtgcatgacctgatcattacatggctgtggttcctaagcctgttgctgaagtcattgtcgctcagcaatagggtgcagttttccaggaataggcatttgcctaattcctggcatgacactctagtgacttcctggtgaggcccagcctgtcctggtacagcagggtcttgctgtaactcagacattccaagggtatgggaagccatattcacacctcacgctctggacatgatttagggaagcagggacaccccccgccccccacctttgggatcagcctccgccattccaagtcaacactcttcttgagcagaccgtgatttggaagagaggcacctgctggaaaccacacttcttgaaacagcctgggtgacggtcctttaggcagcctgccgccgtctctgtcccggttcaccttgccgagagaggcgcgtctgccccaccctcaaaccctgtggggcctgatggtgctcacgactcttcctgcaaagggaactgaagacctccacattaagtggctttttaacatgaaaaacacggcagctgtagctcccgagctactctcttgccagcattttcacattttgcctttctcgtggtagaagccagtacagagaaattctgtggtgggaacattcgaggtgtcaccctgcagagctatggtgaggtgtggataaggcttaggtgccaggctgtaagcattctgagctgggcttgttgtttttaagtcctgtatatgtatgtagtagtttgggtgtgtatatatagtagcatttcaaaatggacgtactggtttaacctcctatccttggagagcagctggctctccaccttgttacacattatgttagagaggtagcgagctgctctgctatatgccttaagccaatatttactcatcaggtcattattttttacaatggccatggaataaaccatttttacaaaa

SEQ ID NO: 1848 - DNA, 2477 bp, Homo Sapiens
  NM_002828
gctcgggcgccgagtctgcgcgctgacgtccgacgctccaggtactttccccacggccgacagggcttggcgtgggggcggggcgcggcgcgcagcgcgcatgcgccgcagcgccagcgctctccccggatcgtgcggggcctgagcctctccgccggcgcaggctctgctcgcgccagctcgctcccgcagccatgcccaccaccatcgagcgggagttcgaagagttggatactcagcgtcgctggcagccgctgtacttggaaattcgaaatgagtcccatgactatcctcatagagtggccaagtttccagaaaacagaaatcgaaacagatacagagatgtaagcccatatgatcacagtcgtgttaaactgcaaaatgctgagaatgattatattaatgccagtttagttgacatagaagaggcacaaaggagttacatcttaacacagggtccacttcctaacacatgctgccatttctggcttatggtttggcagcagaagaccaaagcagttgtcatgctgaaccgcattgtggagaaagaatcggttaaatgtgcacagtactggccaacagatgaccaagagatgctgtttaaagaaacaggattcagtgtgaagctcttgtcagaagatgtgaagtcgtattatacagtacatctactacaattagaaaatatcaatagtggtgaaaccagaacaatatctcactttcattatactacctggccagattttggagtccctgaatcaccagcttcatttctcaatttcttgtttaaagtgagagaatctggctccttgaaccctgaccatgggcctgcggtgatccactgtagtgcaggcattgggcgctctggcaccttctctctggtagacacttgtcttgttttgatggaaaaaggagatgatattaacataaaacaagtgttactgaacatgagaaaataccgaatgggtcttattcagaccccagatcaactgagattctcatacatggctataatagaaggagcaaaatgtataaagggagattctagtatacagaaacgatggaaagaactttctaaggaagacttatctcctgcctttgatcattcaccaaacaaaataatgactgaaaaatacaatgggaacagaataggtctagaagaagaaaaactgacaggtgaccgatgtacaggactttcctctaaaatgcaagatacaatggaggagaacagtgagagtgctctacggaaacgtattcgagaggacagaaaggccaccacagctcagaaggtgcagcagatgaaacagaggctaaatgagaatgaacgaaaaagaaaaaggtggttatattggcaacctattctcactaagatggggtttatgtcagtcattttggttggcgcttttgttggctggagactgttttttcagcaaaatgccctataaacaattaattttgcccagcaagcttctgcactagtaactgacagtgctacattaatcataggggtttgtctgcagcaaacgcctcatatcccaaaaacggtgcagtagaatagacatcaaccagataagtgatatttacagtcacaagcccaacatctcaggactcttgactgcaggttcctctgaaccccaaactgtaaatggctgtctaaaataaagacattcatgtttgttaaaaactggtaaattttgcaactgtattcatacatgtcaaacacagtatttcacctgaccaacattgagatatcctttatcacaggatttgtttttggaggctatctggattttaacctgcacttgatataagcaataaatattgtggttttatctacgttattggaaagaaaatgacatttaaataatgtgtgtaatgtataatgtactattgacatgggcatcaacacttttattcttaagcatttcagggtaaatatattttataagtatctatttaatcttttgtagttaactgtactttttaagagctcaatttgaaaaatctgttactaaaaaaaaaaattgtatgtcgattgaattgtactggatacattttccatttttctaaaaagaagtttgatatgagcagttagaagttggaataagcaatttctactatatattgcatttcttttatgttttacagttttccccattttaaaaagaaaagcaaacaaagaaacaaaagtttttcctaaaaatatctttgaaggaaaattctccttactgggatagtcaggtaaacagttggtcaagactttgtaaagaaattggtttctgtaaatcccattattgatatgtttatttttcatgaaaatttcaatgtagttggggtagattatgatttaggaagcaaaagtaagaagcagcattttatgattcataatttcagtttactagactgaagttttgaagtaaacacttttcagtttctttctacttcaataaatagtatgattatatgcaaaccttaaaaaa

SEQ ID NO: 1849 - DNA, 3963 bp, Homo Sapiens
  NM_002830
cctgcgtgtccctctgcgctccgactggtgcgacttctccctgcgctagcgaggcagggttttggcctcgcctctcgcgagatcgcctcctgttgctgccgccgccgctcctggccactgactggcggcgcctgcgcagccgccatgttcggttgctatgctgcggcctaggagagggggtgtgcttgagggaggaggaagagatagaggaggaggagggggaggaagaggaggtggagaaggaggggggtgactgagctcctcttgcactctcacacacaaacgctgcccaggattacccgccagctcacgccgcgcagtgcgcttttccgctcctcgcgccccaccaccaacattgttctctcaggactcctgggtcccaggggtcggaattgggcctgagcgggagaggaaagagacttggctttggccgcggggtcggaggattggggccaggccccctcccccacgcacttttgggggtgtggattatctcatccctgcagggaggtaggagaggtcgccggctgcccgcctccctgccacctccccagcggcgccggcccgcggctgcccagcagcatgaggtggtgctggcggctccgggtcgtggcgcgaccgctgcggcggcggctgctcggggggcgctgaggtagccccccggagcggcacggaggacgcgcttctcctctgcgcgccggggcctcgaggctttttttctccagccgagaggacgcggctgtgatatacgaagactttgtgtggacagtaatgacctcacgtttccgattgcctgctggcagaacctacaatgtacgagcatcagagttggcccgagacagacagcatactgaagtggtttgcaacatccttcttctggataacactgtacaagctttcaaagtcaataaacatgatcaggggcaagtcttgttggatgtcgtcttcaagcatctagatttgactgagcaggactattttggtttacagttggctgatgattccacagataacccaaggtggctggatccaaacaaaccaataaggaagcagctaaagagaggatctccttacagtttgaactttagagtcaaattttttgtaagtgaccccaacaagttacaagaagaatatacaaggtaccagtattttttgcaaattaaacaagacattcttactggaagattaccctgtccttctaatactgctgcccttttagcttcatttgctgttcagtctgaacttggagactacgatcagtcagagaacttgtcaggctacctctcagattattctttcattcctaatcaacctcaagattttgaaaaagaaattgcaaaattacatcagcaacacataggcttatctcctgcagaagcagaatttaattacctaaacacagcacgtaccttagaactctatggagttgaattccactatgcaagggatcagagtaacaatgaaattatgattggagtgatgtcaggaggaattctgatttataagaacagggtacgaatgaatacctttccatggttgaagattgtaaaaatttcttttaagtgcaaacagttttttattcaacttagaaaagaattgcatgaatctagagaaacattattgggatttaatatggtgaattacagagcatgtaaaaatttgtggaaagcatgtgtagaacatcacacattcttccgtttggacagaccacttccacctcaaaagaatttttttgcacattattttacattaggttcaaaattccggtactgtgggagaactgaagtccaatcagttcagtatggcaaagaaaaggcaaataaagacagggtatttgcaagatccccaagtaagcccttggcacggaaattaatggattgggaagtagtaagcagaaattcaatatctgatgacaggttagaaacacaaagtcttccatcacgatctccaccgggaactcctaatcatcgaaattctacattcacgcaggaaggaacccggttacgaccatcttcagttggtcatttggtagaccatatggttcatacttccccaagcgaagtgtttgtaaatcagagatctccgtcatcaacacaagctaatagcattgttctggaatcatcaccatcacaagagacccctggagatgggaagcctccagctttaccacccaaacagtcaaagaaaaacagttggaaccaaattcattattcacattcgcaacaagatctagaaagtcatattaatgaaacatttgatattccatcttctcctgaaaaacccactcctaatggtggtattccacatgataatcttgtcctaatcagaatgaaacctgatgaaaatgggaggtttggattcaatgtaaagggaggatatgatcagaagatgcctgtgattgtgtctcgagtagcaccaggaacacctgctgacctctgtgtccctagactgaatgaaggggaccaagttgtactgatcaatggtcgggacattgcagaacacactcatgatcaggttgtgctgtttattaaagctagttgtgagagacattctggggaactcatgcttctagttcgacctaatgctgtatatgatgtagtggaagaaaagctagaaaatgagccagatttccagtatattcctgagaaagccccactagatagtgtgcatcaggatgaccattccctgcgggagtcaatgatccagctagctgaggggcttatcactggaacagtcctgacacagtttgatcaactgtatcggaaaaaacctggaatgacaatgtcctgtgccaaattacctcagaatatttccaaaaatagatacagagatatttcgccttatgatgccacacgggtcattttaaaaggtaatgaagactacatcaatgcgaactatataaatatggaaattccttcttccagcattataaatcagtacattgcttgtcaagggccattaccacacacttgtacagatttttggcagatgacttgggaacaaggctcctctatggttgtaatgttgaccacacaagttgaacgtggcagagttaaatgtcaccaatattggccagaacccacaggcagttcatcttatggatgctaccaagttacctgccactctgaagaaggaaacactgcctatatcttcaggaagatgaccctatttaaccaagagaaaaatgaaagtcgtccactcactcagatccagtacatagcctggcctgaccatggagtccctgatgattcgagtgactttctagattttgtttgtcatgtacgaaacaagagggctggcaaggaagaacccgttgttgtccattgcagtgctggaatcggaagaactggggttcttattactatggaaacagccatgtgtctcattgaatgcaatcagccagtttatccactagatattgtaagaacaatgagagatcagcgagccatgatgatccaaacacctagtcaatacagatttgtatgtgaagctattttgaaagtttatgaagaaggctttgttaaacccttaacaacatcaacaaataaataagaaagcaaaaagatctgggatatgtgttggaaaactgctttcccttatgttcactgtgccataatgctgctcgcaggaaatggcattttacaaaaaaaaaatgaagaactcaaaaaaactttgaaaacttcagcactgttgcactttatgttttaaaaaatgtcactctttcaaaatctataactcatgtatttgaagactgtttcatgctttgctccgaacaaatagtaaataactgagtatgttcagggtaatttatgaaattttgtggtggtgccatgcaatccccttttggtagaattgccacaaacaaggctcaaaattctcatcatctctgttatacacctgtatcatgaaagcaaaaagaagtaaacatcaggagtcagctctgaaaaaaaaaaaaaaaaaaaa

SEQ ID NO: 1850 - DNA, 3240 bp, Homo Sapiens
  NM_002835
ggggaacgagctggggaagacggagcgggctctgtgccgggcgggcgggcggcgggggggccagcgaccgcagccggggggacgcgggaggatggagcaagtggagatcctgaggaaattcatccagagggtccaggccatgaagagtcctgaccacaatggggaggacaacttcgcccgggacttcatgcggttaagaagattgtctaccaaatatagaacagaaaagatatatcccacagccactggagaaaaagaagaaaatgttaaaaagaacagatacaaggacatactgccatttgatcacagccgagttaaattgacattaaagactccttcacaagattcagactatatcaatgcaaattttataaagggcgtctatgggccaaaagcatatgtagcaactcaaggacctttagcaaatacagtaatagatttttggaggatgatatgggagtataatgttgtgatcattgtaatggcctgccgagaatttgagatgggaaggaaaaaatgtgagcgctattggcctttgtatggagaagaccccataacgtttgcaccatttaaaatttcttgtgaggatgaacaagcaagaacagactacttcatcaggacactcttacttgaatttcaaaatgaatctcgtaggctgtatcagtttcattatgtgaactggccagaccatgatgttccttcatcatttgattctattctggacatgataagcttaatgaggaaatatcaagaacatgaagatgttcctatttgtattcattgcagtgcaggctgtggaagaacaggtgccatttgtgccatagattatacgtggaatttactaaaagctgggaaaataccagaggaatttaatgtatttaatttaatacaagaaatgagaacacaaaggcattctgcagtacaaacaaaggagcaatatgaacttgttcatagagctattgcccaactgtttgaaaaacagctacaactatatgaaattcatggagctcagaaaattgctgatggagtgaatgaaattaacactgaaaacatggtcagctccatagagcctgaaaaacaagattctcctcctccaaaaccaccaaggacccgcagttgccttgttgaaggggatgctaaagaagaaatactgcagccaccggaacctcatccagtgccacccatcttgacaccttctcccccttcagcttttccaacagtcactactgtgtggcaggacaatgatagataccatccaaagccagtgttgcatatggtttcatcagaacaacattcagcagacctcaacagaaactatagtaaatcaacagaacttccagggaaaaatgaatcaacaattgaacagatagataaaaaattggaacgaaatttaagttttgagattaagaaggtccctctccaagagggaccaaaaagttttgatgggaacacacttttgaataggggacatgcaattaaaattaaatctgcttcaccttgtatagctgataaaatctctaagccacaggaattaagttcagatctaaatgtcggtgatacttcccagaattcttgtgtggactgcagtgtaacacaatcaaacaaagtttcagttactccaccagaagaatcccagaattcagacacacctccaaggccagaccgcttgcctcttgatgagaaaggacatgtaacgtggtcatttcatggacctgaaaatgccatacccatacctgatttatctgaaggcaattcctcagatatcaactatcaaactaggaaaactgtgagtttaacaccaagtcctacaacacaagttgaaacacctgatcttgtggatcatgataacacttcaccactcttcagaacacccctcagttttactaatccacttcactctgatgactcagactcagatgaaagaaactctgatggtgctgtgacccagaataaaactaatatttcaacagcaagtgccacagtttctgctgccactagtactgaaagcatttctactaggaaagtattgccaatgtccattgctagacataatatagcaggaacaacacattcaggtgctgaaaaagatgttgatgttagtgaagattcacctcctcccctacctgaaagaactcctgaatcgtttgtgttagcaagtgaacataatacacctgtaagatcggaatggagtgaacttcaaagtcaggaacgatctgaacaaaaaaagtctgaaggcttgataacctctgaaaatgagaaatgtgatcatccagcgggaggtattcactatgaaatgtgcatagaatgtccacctactttcagtgacaagagagaacaaatatcagaaaatccaacagaagccacagatattggttttggtaatcgatgtggaaaacccaaaggaccaagagatccaccttcagaatggacatgattcagggagctagaagacactttaagttatactggaaaattcaggtgccactgaaagccagatttatagtattccatctttaatatgtgggactaacagcagtgtagattgttaccttaatattttttgctgggaccatctacctgccttatactacacttaggaaaaagtattacatatggtttattttgaaacttcaagtattattgccttaatgtctcttaaccctgttacacgctgcttgtagacatgttaatatagtaatacctttatgatatattgagtttaaggactactctttttctgttttatcatgtatgcattattttgtatatgtacagggcaagtaggtatataatttgataaagttgcaattgaaatattattaacagaagatgtaagaaatttctgcatggtctaaatctttgtgtactttatttgtaaattatttgccctggagttttagaaaatagtttctgaattttaaacttgctggattcatgcagccagctttgcaggttatcagagatcaaagattgtaataataattttgtaaattgtaagcaaaaagttatttttatattatatacagtctaattgttcatcctaattgttcctgttttcatctagtcagagattcagtaagtgccttggaacaatattgaattctcttagcttgtgtgtgtttctttaatatttgaactcaagtgggattagaagactatcaaaatacatgtatgtttcaggatatttgacctgtcattaaaaaaaacaaacagttttacagtgccaaaaaaaaaaaaaaa

SEQ ID NO: 1851 - DNA, 7733 bp, Homo Sapiens
  NM_002840
cgggagcggcgggagcggtggcggcggcagaggcggcggctccagcttcggctccggctcgggctcgggctccggctccggctccggctccggctccagctcgggtggcggtggcgggagcgggaccaggtggaggcggcggcggcagaggagtgggagcagcggccctagcggcttgcggggggacatgcggaccgacggcccctggataggcggaaggagtggaggccctggtgcccggcccttggtgctgagtatccagcaagagtgaccggggtgaagaagcaaagactcggttgattgtcctgggctgtggctggctgtggagctagagccctggatggcccctgagccagccccagggaggacgatggtgccccttgtgcctgcactggtgatgcttggtttggtggcaggcgcccatggtgacagcaaacctgtcttcattaaagtccctgaggaccagactgggctgtcaggaggggtagcctccttcgtgtgccaagctacaggagaacccaagccgcgcatcacatggatgaagaaggggaagaaagtcagctcccagcgcttcgaggtcattgagtttgatgatggggcagggtcagtgcttcggatccagccattgcgggtgcagcgagatgaagccatctatgagtgtacagctactaacagcctgggtgagatcaacactagtgccaagctctcagtgctcgaagaggaacagctgccccctgggttcccttccatcgacatggggcctcagctgaaggtggtggagaaggcacgcacagccaccatgctatgtgccgcaggcggaaatccagaccctgagatttcttggttcaaggacttccttcctgtagaccctgccacgagcaacggccgcatcaagcagctgcgttcaggtgccttgcagatagagagcagtgaggaatccgaccaaggcaagtacgagtgtgtggcgaccaactcggcaggcacacgttactcagcccctgcgaacctgtatgtgcgagtgcgccgcgtggctcctcgtttctccatccctcccagcagccaggaggtgatgccaggcggcagcgtgaacctgacatgcgtggcagtgggtgcacccatgccctacgtgaagtggatgatgggggccgaggagctcaccaaggaggatgagatgccagttggccgcaacgtcctggagctcagcaatgtcgtacgctctgccaactacacctgtgtggccatctcctcgctgggcatgatcgaggccacagcccaggtcacagtgaaagctcttccaaagcctccgattgatcttgtggtgacagagacaactgccaccagtgtcaccctcacctgggactctgggaactcggagcctgtaacctactatggcatccagtaccgcgcagcgggcacggagggcccctttcaggaggtggatggtgtggccaccacccgctacagcattggcggcctcagccctttctcggaatatgccttccgcgtgctggcggtgaacagcatcgggcgagggccgcccagcgaggcagtgcgggcacgcacgggagaacaggcgccctccagcccaccgcgccgcgtgcaggcacgcatgctgagcgccagcaccatgctggtgcagtgggagcctcccgaggagcccaacggcctggtgcggggataccgcgtctactatactccggactcccgccgccccccgaacgcctggcacaagcacaacaccgacgcggggctcctcacgaccgtgggcagcctgctgcctggcatcacctacagcctgcgcgtgcttgccttcaccgccgtgggcgatggccctcccagccccaccatccaggtcaagacgcagcagggagtgcctgcccagcccgcggacttccaggccgaggtggagtcggacaccaggatccagctctcgtggctgctgccccctcaggagcggatcatcatgtatgaactggtgtactgggcggcagaggacgaagaccaacagcacaaggtgaccttcgacccaacctcctcctacacactagaggacctgaagcctgacacactctaccgcttccagctggctgcacgctcggatatgggggtgggcgtcttcacccccaccattgaggcccgcacagcccagtccaccccctccgcccctccccagaaggtgatgtgtgtgagcatgggctccaccacggtccgggtaagttgggtcccgccgcctgccgacagccgcaacggcgttatcacccagtactccgtggcctacgaggcggtggacggcgaggaccgcgggcggcatgtggtggatggcatcagccgtgagcactccagctgggacctggtgggcctggagaagtggacggagtaccgggtgtgggtgcgggcacacacagacgtgggccccggccccgagagcagcccggtgctggtgcgcaccgatgaggacgtgcccagcgggcctccgcggaaggtggaggtggagccactgaactccactgctgtgcatgtctactggaagctgcctgtccccagcaagcagcatggccagatccgcggctaccaggtcacctacgtgcggctggagaatggcgagccccgtggactccccatcatccaagacgtcatgctagccgaggcccagtggcggccagaggagtccgaggactatgaaaccactatcagcggcctgaccccggagaccacctactccgttactgttgctgcctataccaccaagggggatggtgcccgcagcaagcccaaaattgtcactacaacaggtgcagtcccaggccggcccaccatgatgatcagcaccacggccatgaacactgcgctgctccagtggcacccacccaaggaactgcctggcgagctgctgggctaccggctgcagtactgccgggccgacgaggcgcggcccaacaccatagatttcggcaaggatgaccagcacttcacagtcaccggcctgcacaaggggaccacctacatcttccggcttgctgccaagaaccgggctggcttgggtgaggagttcgagaaggagatcaggacccccgaggacctgcccagcggcttcccccaaaacctgcatgtgacaggactgaccacgtctaccacagaactggcctgggacccgccagtgctggcggagaggaacgggcgcatcatcagctacaccgtggtgttccgagacatcaacagccaacaggagctgcagaacatcacgacagacacccgctttacccttactggcctcaagccagacaccacttacgacatcaaggtccgcgcatggaccagcaaaggctctggcccactcagccccagcatccagtcccggaccatgccggtggagcaagtgtttgccaagaacttccgggtggcggctgcaatgaagacgtctgtgctgctcagctgggaggttcccgactcctataagtcagctgtgccctttaagattctgtacaatgggcagagtgtggaggtggacgggcactcgatgcggaagctgatcgcagacctgcagcccaacacagagtactcgtttgtgctgatgaaccgtggcagcagcgcagggggcctgcagcacctggtgtccatccgcacagcccccgacctcctgcctcacaagccgctgcctgcctctgcctacatagaggacggccgcttcgatctctccatgccccatgtgcaagacccctcgcttgtcaggtggttctacattgttgtggtgcccattgaccgtgtgggcgggagcatgctgacgccaaggtggagcacacccgaggaactggagctggacgagcttctagaagccatcgagcaaggcggagaggagcagcggcggcggcggcggcaggcagaacgtctgaagccatatgtggctgctcaactggatgtgctcccggagacctttaccttgggggacaagaagaactaccggggcttctacaaccggcccctgtctccggacttgagctaccagtgctttgtgcttgcctccttgaaggaacccatggaccagaagcgctatgcctccagcccctactcggatgagatcgtggtccaggtgacaccagcccagcagcaggaggagccggagatgctgtgggtgacgggtcccgtgctggcagtcatcctcatcatcctcattgtcatcgccatcctcttgttcaaaaggaaaaggacccactctccgtcctctaaggatgagcagtcgatcggactgaaggactccttgctggcccactcctctgaccctgtggagatgcggaggctcaactaccagaccccaggtatgcgagaccacccacccatccccatcaccgacctggcggacaacatcgagcgcctcaaagccaacgatggcctcaagttctcccaggagtatgagtccatcgaccctggacagcagttcacgtgggagaattcaaacctggaggtgaacaagcccaagaaccgctatgcgaatgtcatcgcctacgaccactctcgagtcatccttacctctatcgatggcgtccccgggagtgactacatcaatgccaactacatcgatggctaccgcaagcagaatgcctacatcgccacgcagggccccctgcccgagaccatgggtgatttctggaggatggtgtgggaacagcgcacggccactgtggtcatgatgacacggctggaggagaagtcccgggtaaaatgtgatcagtactggccagcccgtggcaccgagacctgtggccttattcaggtgaccctgttggacacagtggagctggccacatacactgtgcgcaccttcgcactccacaagagtggctccagtgagaagcgcgagctgcgtcagtttcagttcatggcctggccagaccatggagttcctgagtacccaactcccatcctggccttcctacgacgggtcaaggcctgcaaccccctagacgcagggcccatggtggtgcactgcagcgcgggcgtgggccgcaccggctgcttcatcgtgattgatgccatgttggagcggatgaagcacgagaagacggtggacatctatggccacgtgacctgcatgcgatcacagaggaactacatggtgcagacggaggaccagtacgtgttcatccatgaggcgctgctggaggctgccacgtgcggccacacagaggtgcctgcccgcaacctgtatgcccacatccagaagctgggccaagtgcctccaggggagagtgtgaccgccatggagctcgagttcaagttgctggccagctccaaggcccacacgtcccgcttcatcagcgccaacctgccctgcaacaagttcaagaaccggctggtgaacatcatgccctacgaattgacccgtgtgtgtctgcagcccatccgtggtgtggagggctctgactacatcaatgccagcttcctggatggttatagacagcagaaggcctacatagctacacaggggcctctggcagagagcaccgaggacttctggcgcatgctatgggagcacaattccaccatcatcgtcatgctgaccaagcttcgggagatgggcagggagaaatgccaccagtactggccagcagagcgctctgctcgctaccagtactttgttgttgacccgatggctgagtacaacatgccccagtatatcctgcgtgagttcaaggtcacggatgcccgggatgggcagtcaaggacaatccggcagttccagttcacagactggccagagcagggcgtgcccaagacaggcgagggattcattgacttcatcgggcaggtgcataagaccaaggagcagtttggacaggatgggcctatcacggtgcactgcagtgctggcgtgggccgcaccggggtgttcatcactctgagcatcgtcctggagcgcatgcgctacgagggcgtggtcgacatgtttcagaccgtgaagaccctgcgtacacagcgtcctgccatggtgcagacagaggaccagtatcagctgtgctaccgtgcggccctggagtacctcggcagctttgaccactatgcaacgtaactaccgctcccctctcctccgccacccccgccgtggggctccggaggggacccagctcctctgagccataccgaccatcgtccagccctcctacgcagatgctgtcactggcagagcacagcccacggggatcacagcgtttcaggaacgttgccacaccaatcagagagcctagaacatccctgggcaagtggatggcccagcaggcaggcactgtggcccttctgtccaccagacccacctggagcccgcttcaagctctctgttgcgctcccgcatttctcatgcttcttctcatggggtggggttggggcaaagcctcctttttaatacattaagtggggtagactgagggattttagcctcttccctctgatttttcctttcgcgaatccgtatctgcagaatgggccactgtaggggttggggtttattttgttttgtttttttttttcttgagttcactttggatccttattttgtatgacttctgctgaaggacagaacattgccttcctcgtgcagagctggggctgccagcctgagcggaggctcggccgtgggccgggaggcagtgctgatccggctgctcctccagcccttcagacgagatcctgtttcagctaaatgcagggaaactcaatgtttttttaagttttgttttccctttaaagcctttttttaggccacattgacagtggtgggcggggagaagatagggaacactcatccctggtcgtctatcccagtgtgtgtttaacattcacagcccagaaccacagatgtgtctgggagagcctggcaaggcattcctcatcaccatcgtgtttgcaaaggttaaaacaaaaacaaaaaaccacaaaaataaaaaacaaaaaaaacaaaaaacccaagaaaaaaaaaaagagtcagcccttggcttctgcttcaaaccctcaagaggggaagcaactccgtgtgcctggggttcccgagggagctgctggctgacctgggcccacagagcctggctttggtccccagcattgcagtatggtgtggtgtttgtaggctgtggggtctggctgtgtggccaaggtgaatagcacaggttagggtgtgtgccacaccccatgcacctcagggccaagcgggggcgtggctggcctttcaggtccaggccagtgggcctggtagcacatgtctgtcctcagagcaggggccagatgattttcctccctggtttgcagctgttttcaaagcccccgataatcgctcttttccactccaagatgccctcataaaccaatgtggcaagactactggacttctatcaatggtactctaatcagtccttattatcccagcttgctgaggggcagggagagcgcctcttcctctgggcagcgctatctagataggtaagtgggggcggggaagggtgcatagctgttttagctgagggacgtggtgccgacgtccccaaacctagctaggctaagtcaagatcaacattccagggttggtaatgttggatgatgaaacattcatttttaccttgtggatgctagtgctgtagagttcactgttgtacacagtctgttttctatttgttaagaaaaactacagcatcattgcataattcttgatggtaataaatttgaataatcagatttcttacaaaccagga

SEQ ID NO: 1852 - DNA, 7854 bp, Homo Sapiens
  NM_002843
cagccccagccgcatgacgcgcggaggaggcagcgggagcagccgcgggagccgggaccgggtagccgcgcgctgggggtgggcgccgctcgctccgccccgcgaagcccctgcgcgctcagggacgcggcccccccgcggcagccgcgctaggctccggcgtgtggccgcggccgccgccgccgctgccatgtctccggggaagcccggggcgggcggagcggggacgaggcggaccggctggcggaggaggaggcgaaggagacggcaggaggcggcgacgacggtgcccgggctcgggcgcacggcggggcccgattcgcgcgtccggggcacgttccagggcgcgcggggcatgaagccggcggcgcgggaggcgcggctgcctccgcgctcgcccgggctgcgctgggcgctgccgctgctgctgctgctgctgcgcctgggccagatcctgtgcgcaggtggcacccctagtccaattcctgacccttcagtagcaactgttgccacaggggaaaatggcataacgcagatcagcagtacagcagaatcctttcataaacagaatggaactggaacacctcaggtggaaacaaacaccagtgaggatggtgaaagctctggagccaacgatagtttaagaacacctgaacaaggatctaatgggactgatggggcatctcaaaaaactcccagtagcactgggcccagtcctgtgtttgacattaaagctgtttccatcagtccaaccaatgtgatcttaacttggaaaagtaatgacacagctgcttctgagtacaagtatgtagtaaagcataagatggaaaatgagaagacaattactgttgtgcatcaaccatggtgtaacatcacaggcttacgtccagcgacttcatatgtattctccatcactccaggaataggcaatgagacttggggagatcccagagtcataaaagtcatcacagagccgatcccagtttctgatctccgtgttgccctcacgggtgtgaggaaggctgctctctcctggagcaatggcaatggcactgcctcctgccgggttcttcttgaaagcattggaagccatgaggagttgactcaagactcaagacttcaggtcaatatctcgggcctgaagccaggggttcaatacaacatcaacccgtatcttctacaatcaaataagacaaagggagaccccttgggcacagaaggtggcttggatgccagcaatacagagagaagccgggcagggagccccaccgcccctgtgcatgatgagtccctcgtgggacctgtggacccatcctccggccagcagtcccgagacacggaagtcctgcttgtcgggttagagcctggcacccgatacaatgccaccgtttattcccaagcagcgaatggcacagaaggacagccccaggccatagagttcaggacaaatgctattcaggtttttgacgtcaccgctgtgaacatcagtgccacaagcctgaccctgatctggaaagtcagcgataacgagtcgtcatctaactatacctacaagatacatgtggcgggggagacagattcttccaatctcaacgtcagtgagcctcgcgctgtcatccccggactccgctccagcaccttctacaacatcacagtgtgtcctgtcctaggtgacatcgagggcacgccgggcttcctccaagtgcacaccccccctgttccagtttctgacttccgagtgacagtggtcagcacgacggagatcggcttagcatggagcagccatgatgcagaatcatttcagatgcatatcacacaggagggagctggcaattctcgggtagaaataaccaccaaccaaagtattatcattggtggcttgttccctggaaccaagtattgctttgaaatagttccaaaaggaccaaatgggactgaaggggcatctcggacagtttgcaatagaactgttcccagtgcagtgtttgacatccacgtggtctacgtcaccaccacggagatgtggctggactggaagagccctgacggtgcttccgagtatgtctaccatttagtcatagagtccaagcatggctctaaccacacaagcacgtatgacaaagcgattactctccagggcctgattccgggcaccttatataacatcaccatctctccagaagtggaccacgtctggggggaccccaactccactgcacagtacacacggcccagcaatgtgtccaacattgatgtaagtaccaacaccacagcagcaactttaagttggcagaactttgatgacgcctctcccacgtactcctactgccttcttattgagaaggctggaaattccagcaacgcaacacaagtagtcacggacattggaattactgacgctacagtcactgaattaatacctggctcatcatacacagtggagatctttgcacaagtaggggatgggatcaagtcactggaacctggccggaagtcattctgtacagatcctgcgtccatggcctccttcgactgcgaagtggtccccaaagagccagccctggttctcaaatggacctgccctcctggcgccaatgcaggctttgagctggaggtcagcagtggagcctggaacaatgcgacccacctggagagctgctcctctgagaatggcactgagtatagaacggaagtcacgtatttgaatttttctacctcgtacaacatcagcatcaccactgtgtcctgtggaaagatggcagcccccacccggaacacctgcactactggcatcacagatccccctcctccagatggatcccctaatattacatctgtcagtcacaattcagtaaaggtcaagttcagtggatttgaagccagccacggacccatcaaagcctatgctgtcattctcaccaccggggaagctggtcacccttctgcagatgtcctgaaatacacgtatgaggatttcaaaaagggagcctcagatacttatgtgacatacctcataagaacagaagaaaagggacgttctcagagcttgtctgaagttttgaaatatgaaattgacgttgggaatgagtcaaccacacttggttattacaatgggaagctggaacctctgggctcctaccgggcttgtgtggctggcttcaccaacattaccttccaccctcaaaacaaggggctcattgatggggctgagagctatgtgtccttcagtcgctactcagatgctgtttccttgccccaggatccaggtgtcatctgtggagcggtttttggctgtatctttggtgccctggttattgtgactgtgggaggcttcatcttctggagaaagaagaggaaagatgcaaagaataatgaagtgtccttttctcaaattaaacctaaaaaatctaagttaatcagagtggagaattttgaggcctacttcaagaagcagcaagctgactccaactgtgggttcgcagaggaatacgaagatctgaagcttgttggaattagtcaacctaaatatgcagcagaactggctgagaatagaggaaagaatcgctataataatgttctgccctatgatatttcccgtgtcaaactttcggtccagacccattcaacggatgactacatcaatgccaactacatgcctggctaccactccaagaaagattttattgccacacaaggacctttaccgaacactttgaaagatttttggcgtatggtttgggagaaaaatgtatatgccatcattatgttgactaaatgtgttgaacagggaagaaccaaatgtgaggagtattggccctccaagcaggctcaggactatggagacataactgtggcaatgacatcagaaattgttcttccggaatggaccatcagagatttcacagtgaaaaatatccagacaagtgagagtcaccctctgagacagttccatttcacctcctggccagaccacggtgttcccgacaccactgacctgctcatcaacttccggtacctcgttcgtgactacatgaagcagagtcctcccgaatcgccgattctggtgcattgcagtgctggggtcggaaggacgggcactttcattgccattgatcgtctcatctaccagatagagaatgagaacaccgtggatgtgtatgggattgtgtatgaccttcgaatgcataggcctttaatggtgcagacagaggaccagtatgttttcctcaatcagtgtgttttggatattgtcagatcccagaaagactcaaaagtagatcttatctaccagaacacaactgcaatgacaatctatgaaaaccttgcgcccgtgaccacatttggaaagaccaatggttacatcgcctaattccaaaggaataacctttctggagtgaaccagaccgtcgcacccacagcgaaggcacatgccccgatgtcgacatgtttttatatgtctaatatcttaattctttgttctgttttgtgagaactaattttgagggcatgaagctgcatatgatagatgacaaattggggctgtcgggggctgtggatgggtggggagcaaatcatctgcattcctgatgaccaatgggatgaggtcactttttttttttttcccccttgaggattgtggaaaaccaggaaaagggagctatgatttttttttccaaaacaatttcttttttaaaaaagactattttatatgattcacatgctaaagccaggattgtgttgggttgaatatattttaagtatcagaggtctatttttacctactgtgtcttggaatctagccgatggaaaatacctaattgtggatgatgattgcgcagggaggggtacgtggcacctcttccgaatgggttttctatttgaacatgtgccttttctgaattatgcttccacaggcaaaactcagtagagatctatatttttgtactgaatctcataattggaatatacggaatatttaaacagtagcttagcatcagaggtttgcttcctcagtaacatttctgttctcatttgatcaggggaggcctctttgccccgactccgcttcccctgccccctgtacatttgtgctccattttttcttcccttttccctcccagttttctccaaagactcttctgttggcaacattttcaacccattggttgggtgagaatggcgactcaaatatcaccttgagaatttctgtgggtgggaatgggagaagcagaggaatcctacagtggcagaaatccttttcttgtccctgtattatcctttttctcatgtctgtatttggtatgaaggattatttaaaggtgcaatatgtgaattagtgattcatgatgttctaggtttttagtaacgttttactcaggttggcattttatgtgtctgtgtctgtatgtgtgtgtgtatgttcagaagcgtggcaatctgtgaacacttcagcgtgaattcagtgtcagattaatccctccttccccaaagtccactggctttcgtctctctctgccgtgacacatatcggaatctactgtgtatatatatatatatatatatatatatatatatatatatatatatatacactaagctctcaaaaacagtcattcctatgaattgaggtgtacaaagtttgaatttgtatcaaagatgtaattattatttttaaaaccttttcactatactgctgctgtaattactttgatttttaaaatgtagattaatttttttttttttgcttcaggtgtgtatccaccaagaatttcaaatttatgtggatttattttattggtacataatctgtaaacttcttaaggcattaacatgaaaagattttttctttttattttatattgtggctcaggttatattttgaagatgttttgagtttatcctccaataggcaatgaagttgacaaggttttatgaaggaataaccaagtccctggagtcctgtggctgttgccacagtaatgtgtcctgctgtaaacaggacaggtgtgtcctgttgagaatgtgagcgggctcttccagcctcctggtccctcctgactctgccacgcccctcacctcactggcacttcgataactgactggacgtgttaatgggtcttttagggttctaaagggtgaaccacacttttaaagccccggctgtggttcggagggttagtgctgtatgccttttatttccctttccctttgaggtactgaaaggatgaaaaggtggtgtcatgttttggggagaatcttacttctcaaatggaaattgcactttttgctgaatcctttgcatttttttggtagtaagcagttcattgagtatcaggtcctcaaaggaatgagttggcccggctagggtgggccctcttgacctaacttcagagggggccttggctcagtaggtgtgaatcagggaagccacattgtcctcagggtgctgtatgaagctgggtgtgggcggattcctcccacaccttcacactggcctgcctccaactcatacagatctcggagcggtcggtacttcattcataggtccctgttcaggcagcagttctgtgggctgtggccctctcccctccaatatgtccgaaaccattgtgatgggtggcaaatcccagggagctcctaagccctgctctgcccacatcactgccacagagaagtcagaggaagggacttgttgctaaaaaatcctttaaaaggttaaatactttaaaagattaaagcaacataactgtaaacatattgtataaaaatgaaaaacacaggaaccctcttcccttccgcctggtgtgggcttgggaaatgggcaagcggccccagcaatcatgggaggaactcttgcgggggagcggtctgggattccaaatgggcaggtcacacgaaggtcacgatgcttctctgcatcctgaaaagggctggggacagggccagtgggggtggtaagggtatttatagcacagtgcttgaaaagggaagattaatgtgtaaatataaaggacacacaggctgggggttggtcagaggcaagaggagggtgcctctgagcttcaacccctcccaggaacaatgagctcaaattggaagagtccagtggaatcggggggatggtgtgagcacccctgttcagtctttgacaattgcatacagaaaagcagctggtatgggtttgggtgtcaatgaaagggccaaagactggtggccagctggtttgggggatttgggccattgatagcatctcccaggaacaacgactttttgcctccaaagttggatctagtgatgatcagcaccagcaggaaatgacatttggtgtctgcccactgcagccatactgtgacctccagccagacttccgcctaattgactccactggatttgtgctctgttgagtcagaggctcccgggggttggggatcgaggggcgggggtcagctatgcagcccatcacgtgtgtttttcatctgggatgaaaaagcctggttctcttttgaaatgcttgattgtacttattgagctaaacaagtcttggtgactgttgttgatttgcctcaaaagttttaagtcctgggttttcagactactgtgtagcagctgtgtgtttaacatactgtagctttttctcccttgggggcacatacaaataggatgtgttgatgtggactctaaactgtaattttcctgtaactattttggaatgatgcatatttctaatgtttgttatacttgtacagagtattgctgttggttgctttttttttttttaaggaaaaaatggcctgaaaacatttttttaaagacttacaaataccaaatataaaaaaatgtcaatgcattaaaaaa

SEQ ID NO: 1853 - DNA, 6104 bp, Homo Sapiens
  NM_002844
agaagcgcccggagcccgcggggcgacgtcacccccggctccgcccccgtccctccccgagcaaagtaactcttgactaacaggagcagcctccgccgagcatggagagctgccgccgcggccggccggcgacgctggcgacgctttcgcccctgaggtagtttggcgaccgcgaagaaggaaaaagggcgggcgggcggctgtcctctcaccgtcctcaccccgcgaggcccggcccgctcctccgtcgtggatttcgcggcgatccccccggcagctctttgcaaagctgcttgaaacttctcccaaactcggcatggatacgactgcggcggcggcgctgcctgcttttgtggcgctcttgctcctctctccttggcctctcctgggatcggcccaaggccagttctccgcaggtggctgtacttttgatgatggtccaggggcctgtgattaccaccaggatctgtatgatgactttgaatgggtgcatgttagtgctcaagagcctcattatctaccacccgagatgccccaaggttcctatatgatagtggactcttcagatcacgaccctggagaaaaagccagacttcagctgcctacaatgaaggagaacgacactcactgcattgatttcagttacctattatatagccagaaaggactgaatcctggcactttgaacatattagttagggtgaataaaggacctcttgccaatccaatttggaatgtgactggattcacgggtagagattggcttcgggctgagctagcagtgagcaccttttggcccaatgaatatcaggtaatatttgaagctgaagtctcaggagggagaagtggttatattgccattgatgacatccaagtactgagttatccttgtgataaatctcctcatttcctccgtctaggggatgtagaggtgaatgcagggcaaaacgctacatttcagtgcattgccacagggagagatgctgtgcataacaagttatggctccagagacgaaatggagaagatataccagtagcccagactaagaacatcaatcatagaaggtttgccgcttccttcagattgcaagaagtgacaaaaactgaccaggatttgtatcgctgtgtaactcagtcagaacgaggttccggtgtgtccaattttgctcaacttattgtgagagaaccgccaagacccattgctcctcctcagcttcttggtgttgggcctacatatttgctgatccaactaaatgccaactcgatcattggcgatggtcctatcatcctgaaagaagtagagtaccgaatgacatcaggatcctggacagaaacccatgcagtcaatgctccaacttacaaattatggcatttagatccagataccgaatatgagatccgagttctacttacaagacctggtgaaggtggaacggggctcccaggacctccactaatcaccagaacaaaatgtgcagaacctatgagaaccccaaagacattaaagattgctgaaatacaggcaagacggattgctgtggactgggaatccttgggttacaacattacgcgttgccacacttttaatgtcactatctgctaccattacttccgtggtcacaacgagagcaaggcagactgtttggacatggaccccaaagcccctcagcatgttgtgaaccatctgccaccttatacaaatgtcagcctcaagatgatcctaaccaatccagagggaaggaaggagagtgaagagacaattattcaaactgatgaagatgtgcctggtcccgtaccagtaaaatctcttcaaggaacatcctttgaaaataagatcttcttgaactggaaagaacctttggatccaaatggaatcatcactcaatatgagatcagctatagcagtataagatcatttgatcctgcagttccagtggctggacctccccagactgtatcaaatttatggaacagtacacaccatgtctttatgcatctccaccctggaaccacgtaccagtttttcataagagccagcacggtcaaaggctttggtccagccacagccatcaatgtcaccaccaatatctcagctccaactttacctgactatgaaggagttgatgcctctctcaatgaaactgccaccacaataactgtattgttgagaccagcacaagccaaaggtgctcctatcagtgcttatcagattgttgtggaagaactgcacccacaccgaaccaagagagaagccggagccatggaatgctaccaggttcctgtcacataccaaaatgccatgagtgggggtgcaccgtattactttgctgcagaactccccccgggaaacctacctgagcctgccccgttcactgtgggtgacaatcggacctaccaaggcttttggaaccctcctttggctccgcgcaaaggatacaacatctatttccaggcgatgagcagtgtggagaaggaaactaaaacccagtgcgtacgcattgctacaaaagcagcagcaacagaagaaccagaagtgatcccagatcccgccaagcagacagacagagtggtgaaaatagcaggaattagtgctggaattttggtgttcatcctccttctcctagttgtcatattaattgtaaaaaagagcaaacttgctaaaaaacgcaaagatgccatggggaatacccggcaggagatgactcacatggtgaatgcaatggatcgaagttatgctgatcagagcactctgcatgcagaagatcctctttccatcaccttcatggaccaacataactttagtccaagatatgagaaccacagtgctacagcagagtccagtcgccttctagacgtacctcgctacctctgtgaggggacggaatccccttaccagacaggacagctgcatccagccatcagggtagctgatttactgcagcacattaatctcatgaagacatcagacagctatgggttcaaagaggaatatgagagcttttttgaaggacagtcagcatcttgggatgtagctaaaaaagatcaaaatagagcaaaaaaccgatatggaaacattatagcatatgatcactccagagtgattttgcaacccgtagaggatgatccttcctcagattatattaatgccaactatattgatggctaccagagaccaagtcattacattgcaacccaaggtcccgttcatgaaacagtgtatgatttctggaggatgatttggcaagaacaatctgcttgcattgtgatggttacaaatttagttgaggttggccgggttaaatgctataaatattggcctgatgatactgaagtttatggtgacttcaaagtaacgtgtgtagaaatggaaccacttgctgaatatgtagttaggacattcaccctggaaaggagggggtacaatgaaatccgtgaagttaaacagttccatttcacgggctggcctgaccatggagtgccctaccatgctacagggctgctttcctttatccggcgagtcaagttatcaaaccctcccagtgctggccccatcgttgtacattgcagtgctggtgctggacgaactggctgctacattgtgattgacatcatgctagacatggctgaaagagagggtgttgttgatatttacaattgtgtcaaagccttaagatctcggcgtattaatatggtccagacagaggaacagtacatttttattcatgatgccattttagaagcctgcttatgtggagaaactgccatacctgtctgtgaatttaaagctgcatattttgatatgattagaatagactcccagactaactcttcacatctcaaggatgaatttcagactctgaattcagtcacccctcgactacaagctgaagactgcagtatagcgtgcctgccaaggaaccatgacaagaaccgtttcatggacatgctgccacctgacagatgtctgccttttttaattacaattgatggggagagcagtaactacatcaatgctgctcttatggacagctacaggcaaccagctgctttcatcgtcacacaataccctctgccaaacactgtaaaagacttctggagattagtgtatgattatggctgtacctccattgtgatgttaaacgaagtcgacttgtcccagggctgccctcagtactggccagaggaagggatgctacgatatggccccatccaagtggaatgtatgtcttgttcaatggactgtgatgtgatcaaccggatttttaggatatgcaatctaacaagaccacaggaaggttatctgatggtgcaacagtttcagtacctaggatgggcttctcatcgagaagtgcctggatccaaaaggtcattcttgaaactgatacttcaggtggaaaagtggcaggaggaatgcgaggaaggggaaggccggacgattatccactgcctaaatggtggcgggcgaagtggcatgttctgtgctataggcatcgttgttgaaatggtgaaacggcaaaatgttgtcgatgttttccatgcagtaaagacactgaggaacagcaagccaaacatggtggaagccccggagcaataccgtttctgctatgatgtagctttggagtacctggaatcatcttagttgggtgagactctttaaagtgcatccatgaagaaacctgtccatctattgagccagcagctgttgtacctgttacacttgtgcagaaagattttaatgtggggggtgggagacttttacatttgagaggtaaaagtattttttttatgaagttgtgtatcttaataaaaaggactgaattagtttttattactatattaaagcatcaacatttcatgccacataaattatatttaataagaaccagattgaaatgagaacgtattggtgtttgtacagtgaacatgccaccttttttctcatggtttcagtagagcagctaccacatgttgcatgagttcatactttctacgtggcatttttctccctttctaaaatgaaagctgatgaatcttaaaaggaagaagaaaagaaaagctgtgcaaattcatagtaaagttcgttttttatatgtttccagtgtagcagatctctatataaatatataaatatatataactggcttattttcttttaatgtgcaatgatggctggatcatttaaagttctttttagaaaataacataagccaaagactcaagtgtaaatatgtctatatggagaaagcacattatatttattggttacttacattccttttttgatggctaaaatactaccaccacacaatcatcttttttttcctgaagaaagctttttctttagctaaaatcaattgtaaacgatttttgtagattattttttgtatgttttagtgtaagtagaagataaactttttattcataaaccaggaagcaatgttctttatagtgattctcttgtgtacatgcttgtgaattaaatttgtgtaaaatcccttggcaattgggtcttttaatataggaccaaattaaaacattttgctgaatatgtatagtttttcacaatttcattaggtaaataatggtttggtgatcatacatgagaaatgtacacattaaaaggccttgctgacaacttgcacaatgttgaacatagcctttaagcatcatttaaattttaaaggaatggagtttttcagcctgtggcccagcactggtcaagaaaacaagatggcaacatatatgctttcagggtcaaatttgagcaaactgtaaactgtcagggtgataaaatgtttctcttgatgtttacatgcacaagctttgcgttctgactataaaaagtgtgaacaaatcaatgccagattcctgttttgcgcattgtcatgggattcttaagtgaacctttctaaatgtggtcttgttcacatgctccacgtagctgtaacttcacatcatcagcttgcagtttgtaattgactaaagcattccagtgtcctctttctagattgccagctcatgacatggtgcttataaagatttaattaaagtaagaatgaaataaagtttttataattataacagttaaaaaaaaaaaaaaaaaa

SEQ ID NO: 1854 - DNA, 2166 bp, Homo Sapiens
  NM_002856
agaattctttggcaggggcgaccttagaatcctggggaggagcgagaatggaatcccggggaggaacaggggtggaatccggggggcggggtcagaacgccaggagggggcggggccggagccagggtcggcttgactcgggggagcagcgggtggatcctgtgacgtcagcgggttcgaaccgccggagctgagcgagaggccgggggtgccgagccgggcggggagagctgggccgggagagcagaacagggaggctagagcgcagcgggaaccggcccggagccggagccggagccccacaggcacctactaaaccgcccagccgatcggcccccacagagtggcccgcgggcctccggccgggcccagtcccctcccgggccctccatggcccgggccgctgccctcctgccgtcgagatcgccgccgacgccgctgctgtggccgctgctgctgctgctgctcctggaaaccggagcccaggatgtgcgagttcaagtgctacccgaggtgcgaggccagctcgggggcaccgtggagctgccgtgccacctgctgccacctgttcctggactgtacatctccctggtgacctggcagcgcccagatgcacctgcgaaccaccagaatgtggccgccttccaccctaagatgggtcccagcttccccagcccgaagcctggcagcgagcggctgtccttcgtctctgccaagcagagcactgggcaagacacagaggcagagctccaggacgccacgctggccctccacgggctcacggtggaggacgagggcaactacacttgcgagtttgccaccttccccaaggggtccgtccgagggatgacctggctcagagtcatagccaagcccaagaaccaagctgaggcccagaaggtcacgttcagccaggaccctacgacagtggccctctgcatctccaaagagggccgcccacctgcccggatctcctggctctcatccctggactgggaagccaaagagactcaggtgtcagggaccctggccggaactgtcactgtcaccagccgcttcaccttggtgccctcgggccgagcagatggtgtcacggtcacctgcaaagtggagcatgagagcttcgaggaaccagccctgatacctgtgaccctctctgtacgctaccctcctgaagtgtccatctccggctatgatgacaactggtacctcggccgtactgatgccaccctgagctgtgacgtccgcagcaacccagagcccacgggctatgactggagcacgacctcaggcaccttcccgacctccgcagtggcccagggctcccagctggtcatccacgcagtggacagtctgttcaataccaccttcgtctgcacagtcaccaatgccgtgggcatgggccgcgctgagcaggtcatctttgtccgagaaacccccagggcctcgccccgagatgtgggcccgctggtgtggggggccgtgggggggacactgctggtgctgctgcttctggctggggggtccttggccttcatcctgctgagggtgaggaggaggaggaagagccctggaggagcaggaggaggagccagtggcgacgggggattctacgatccgaaagctcaggtgttgggaaatggggaccccgtcttctggacaccagtagtccctggtcccatggaaccagatggcaaggatgaggaggaggaggaggaggaagagaaggcagagaaaggcctcatgttgcctccacccccagcactcgaggatgacatggagtcccagctggacggctccctcatctcacggcgggcagtttatgtgtgacctggacacagacagagacagagccaggcccggccctcccgcccccgacctgaccacgccggcctagggttccagactggttggacttgttcgtctggacgacactggagtggaacactgcctcccactttcttgggacttggagggaggtggaacagcacactggacttctcccgtctctagggctgcatggggagcccggggagctgagtagtggggatccagagaggacccccgcccccagagacttggttttggctccagccttcccctggccccgtgacactcaggagttaataaatgccttggaggaaaacatcaaaaaaaaaaaaaaaa

SEQ ID NO: 1855 - DNA, 3691 bp, Homo Sapiens
  NM_002859
gcgcgggcgcgcgcggcggcggcgcgttccgttccgggccgaggctcgcggcggaaaagttgcggggcatagacgagcggccccgggacgggcagctagcgcgaccctgagccggcgcccgtggtccggccatggacgacctcgacgccctgctggcggacttggagtctaccacctcccacatctccaaacggcctgtgttcttgtcggaggagaccccctactcatacccaactggaaaccacacataccaggagattgccgtgccaccccccgtccccccacccccgtccagcgaggccctcaatggcacaatccttgaccccttagaccagtggcagcccagcagctcccgattcatccaccagcagcctcagtcctcatcacctgtgtacggctccagtgccaaaacttccagtgtctccaaccctcaggacagtgttggctctccgtgctcccgagtgggtgaggaggagcacgtctacagcttccccaacaagcagaaatcagctgagccttcacccaccgtaatgagcacgtccctgggcagcaacctttctgaactcgaccgcctgctgctggaactgaacgctgtacagcataacccgccaggcttccctgcagatgaggccaactcaagccccccgcttcctggggccctgagccccctctatggtgtcccagagactaacagccccttgggaggcaaagctgggcccctgacgaaagagaagcctaagcggaatgggggccggggcctggaggacgtgcggcccagtgtggagagtctcttggatgaactggagagctccgtgcccagccccgtccctgccatcactgtgaaccagggcgagatgagcagcccgcagcgcgtcacctccacccaacagcagacacgcatctcggcctcctctgccaccagggagctggacgagctgatggcttcgctgtcggatttcaagttcatggcccaggggaagacagggagcagctcaccccctggggggcccccgaagcccgggagccagctggacagcatgctggggagcctgcagtctgacctgaacaagctgggggtcgccacagtcgccaaaggagtctgcggggcctgcaagaagcccatcgccgggcaggttgtgaccgccatggggaagacgtggcaccccgagcacttcgtctgcacccactgccaggaggagatcggatcccggaacttcttcgagcgggatggacagccctactgtgaaaaggactaccacaacctcttctccccgcgctgctactactgcaacggccccatcctggataaagtggtgacagcccttgaccggacgtggcaccctgaacacttcttctgtgcacagtgtggagccttctttggtcccgaagggttccacgagaaggacggcaaggcctactgtcgcaaggactacttcgacatgttcgcacccaagtgtggcggctgcgcccgggccatcctggagaactatatctcagccctcaacacgctgtggcatcctgagtgctttgtgtgccgggaatgcttcacgccattcgtgaacggcagcttcttcgagcacgacgggcagccctactgtgaggtgcactaccacgagcggcgcggctcgctgtgttctggctgccagaagcccatcaccggccgctgcatcaccgccatggccaagaagttccaccccgagcacttcgtctgtgccttctgcctcaagcagctcaacaagggcaccttcaaggagcagaacgacaagccttactgtcagaactgcttcctcaagctcttctgctaggtgccctgcccctgtctctgccccccttccccagccagcatccccaactgcgactgtgacctagagacttcacccgggggtgaaggggtaaacccgactgaaactggaacccttgtcctccgctggtgcgggatggacagagggccgtgaggggtccccctgcttgtcttcacccctgccagagcctctgggccccctcctccctcctgtagctctccctaggctgcccactctccatcctccccaggggtagaggctgggggctccaccccagcccatgtacgtccccacgaactggcctggccagcaccccacactggagccatctcttcctcatatttcagcagtgcagccggggggcagggaagggcaggcagggtctgttggggtctctttttatccttattcctcccccgacctaattgtctttgttctgtgattattgggggacacccggctccctccagacaatgccagcataaatccatccatccaaaggcagagaaccaaaggggccatggaaggttctctgtgctcctcctacccttccagtgccctaggcctggcgactgcccctgccttttagacccgccctccccttttatacctgctcttgttctactgagaaaagcctctccagcaataatgttttctagtcacttcctccgtctccgggacggcgtgcctggacactgtaccgactttgatagatttctacactgaggtttgaattcatatcgcctgagttgcttttacttctctatacaaaatgattttgaagagattttaaagacgttcccttttgtattctcttcctcatccaccgccactgggcctgtcactgatggtggctctggtgtgaagtttgctttgtactgagggttggggtggggaagcaatttgtattttattgtttcttagcacaagcaggtgaactgggagcagctctgtgactccccctctttcacttcatagctcaccaggactgttttataaactgctgtatttggaaaccccttctttacttcccaggccagcaagctcttcactgaaactggttgaagggtgttgcacccttttgggcctagaattctgaactttatctgttctgtttctgtgggaggagaaggggaagtatgttttggggggctgcttcctgtctgagtaagccctcaggagcctctgctcccctgtgaacccactgaaccttctgagcccccactgcttctatggggctctctcttctgccttctcaggaaagctggtgtctgattttggccatcaggactctgacgtctctttggtcttgttgatttcctctgggcatatcccttccccagatctgctcctcccctttcacaggtgggatcggcactcagggggtctggaaagaaggtcataagggagcatgataggatttggggcagagggacaggctcctctggggaaaccccccagagctctttaccaaggatgaaagaggagccaggccttgggctcctgatgaggagaaaggggccccaccggggtctaatggtgacagtccaaaccactccactggcctcctggcagaagccgagtgtgctggggtctccgaagagggtccctcctttttgggggaaggtcagcccagcccctccaaaggtctgatgtctccactttcacccgcaggccttaccgctctgtttatagtgacccaccctagatcttccccaagagggactggggtttctggggtccattctctgagtcagtggttatttgaaaatttgattttgattttattttttctctgtaaacttccaagctggcttttcccatttcaattcctgtgatttatgccaataaagtttgcccatgattttcaaaaaaaaaaaaaaaaaaaa

SEQ ID NO: 1856 - DNA, 3470 bp, Homo Sapiens
  NM_002860
cgccattgccgcgccgcagctccaggacaggccctcgccccacgtcaacagcgtagggccggctgcccaggtttactcttacgccactgacgtaacgtcatcgtgcgggacgtggacggaagaaaaaagagagtgagcgagcgccggaatcagcccggcgtggagtgcggacccgcggtagtgccagggggcgaaggcggcggtggtgaggaagatactttggttagtgaccacatcgcagcatgttgagtcaagtttaccgctgtgggttccagcccttcaaccaacatcttctgccctgggtcaagtgtacaaccgtcttcagatctcattgtatccagccttcagtcatcagacatgttcgttcttggagcaacatcccgtttatcactgtacccctcagtcgtacacatggcaagtccttcgcccaccgcagtgagctgaagcatgccaagagaatcgtggtgaagctcggcagtgccgtggtgacccgaggggatgaatgtggcctggccctggggcgcttggcatctattgttgagcaggtatcagtgctgcagaatcagggcagagagatgatgctggtgaccagtggagccgtagcctttggcaaacaacgcttgcgccatgagatccttctgtctcagagcgtgcggcaggccctccactcggggcagaaccagctgaaagaaatggcaattccagtcttagaggcacgagcctgtgcagctgccggacagagtgggctgatggccttgtatgaggctatgtttacccagtacagcatctgtgctgcccagattttggtgaccaatttggatttccatgatgagcagaagcgccggaacctcaatggaacacttcatgaactccttagaatgaacattgtccccattgtcaacacaaatgatgctgttgtccccccagctgagcccaacagtgacctgcagggggtaaatgttattagtgttaaagataatgatagcctggctgcccgactggctgtggaaatgaaaactgatctcttgattgttctttcagatgtagaaggcctttttgacagccccccaggttcagatgatgcaaagcttattgatatattttatcccggagatcagcagtctgtgacatttggaaccaagtctagagtgggaatgggtggcatggaagccaaggtgaaagcagccctctgggctttgcaaggtggcacttctgttgttattgccaatggaacccacccaaaggtgtctgggcacgtcatcacagacattgtggaggggaagaaagttggtaccttcttttcagaagtaaagcctgcaggccctactgttgagcagcagggagaaatggcgcgatctggaggaaggatgttggccaccttggaacctgagcagagagcagaaattatccatcatctggctgatctgttgacggaccagcgtgatgagatcctgttagccaacaaaaaagacttggaggaggcagaggggagacttgcagctcctctgctgaaacgtttaagcctctccacatccaaattgaacagcctggccatcggtctgcgacagatcgcagcctcctcccaggacagcgtgggacgtgttttgcgccgcacccgaatcgccaaaaacttggaactggaacaagtgactgtcccaattggagttctgctggtgatctttgaatctcgtcctgactgtctaccccaggtggcagctttggctatcgcaagtggcaatggcttgttactcaaaggagggaaggaggctgcacacagcaaccggattctccacctcctgacccaggaggctctctcaatccatggagtcaaggaggccgtgcaactggtgaataccagagaagaagttgaagatctttgccgcctagacaaaatgatagatctgatcattccacgtggctcttcccagctggtcagagacatccagaaagctgctaaggggattccagtgatggggcacagcgaagggatctgtcacatgtatgtggattccgaggccagtgttgataaggtcaccaggctagtcagagactctaaatgtgaatatccagctgcctgtaatgctttggagactttgttaatccaccgggatctgctcaggacaccattatttgaccagatcattgatatgctgagagtggaacaggtaaaaattcatgcaggccccaaatttgcctcctatctgaccttcagcccctccgaagtgaagtcactccgaactgagtatggggacctggaattatgcattgaagtagtggacaacgttcaggatgccattgaccacatccacaagtatggcagctcccacacggatgtcatcgtcacagaggacgaaaacacagcggagttcttcctgcagcacgtagacagtgcctgtgtgttctggaatgccagcactcgcttttctgatggttaccgctttggactgggagctgaagtgggaatcagtacatcgagaatccacgcccggggaccagtaggacttgagggactgcttactactaagtggctgctgcgagggaaggaccacgtggtctcagatttctcagagcatggaagtttaaaatatcttcatgagaacctccctattcctcagagaaacaccaactgaaaagagccaggaaaacccgggaattttccaaaaggtcttcacgttaaacttgtcttatctcaggagagagcccgctcttgtctcccagttcctggtagggtctgcctgttggaaagtgtacctggatgcttctgggctccgtttggcaatagcagtcttggctgatgtgcacagtctggctcccagctcaccctttttttttaaagtaagaaaatagttgctaccgatagggactttgccaagtccaattatcttctaggattgaaaggtgcattttccccataaaaaaggcgaggaaaacccatggctgctttgtgtcacctcagtgacttacagtcccccttggcatttagttggtactagagccagtcatccttaacaaatcttttcacattttatttctttcacatgtagtcatcttcaaaaaggaaagatttggaattttagaaaaggggcaactcttctttttagcattctcatcagaaagtcacaaaaatcgatggaatcatttccactgggaagattgaccttttgtatttatttgtggggtaaattaataagcattccagatgcttgcagcttcctgcatccaggagatgctgtgttccccgtgatgcagctggaacccaagctgcagcaggagatgcaagtttcaggatgttccccactgagctggaggaatatctacagcagtgatgcttgaaatttttgtatgaattattttgtcgtcctacccttttcctccaaaacaaaaattagaggattattttaatactttggattcttcccccttttttgagaaataaagttttttatgaaaagcctgtgcgtgaaaaaaaa

SEQ ID NO: 1857 - DNA, 3211 bp, Homo Sapiens
  NM_002861
agcgggtgaggcccgcgtgacggccgctgagcgtgcgcctggcggggcgggcggcggcgctcggagtcgccgggagctgccaggctgtccgcgccgccgctgcggggccatgatccggaacgggcgcggggctgcaggcggcgcagagcagccgggcccggggggcaggcgcgccgtgagggtgtggtgcgatggctgctatgacatggtgcattacggccactccaaccagctgcgccaggcacgggccatgggtgactacctcatcgtaggcgtgcacaccgatgaggagatcgccaagcacaaggggcccccggtgttcactcaggaggagagatacaagatggtgcaggccatcaaatgggtggacgaggtggtgccagcggctccctacgtcactacactagagaccctggacaaatacaactgtgacttctgtgttcacggcaatgacatcaccctgactgtagatggccgggacacctatgaggaagtaaagcaggctgggaggtacagagaatgcaagcgcacgcaaggggtgtccaccacagacctcgtgggccgcatgctgctggtaaccaaagcccatcacagcagccaggagatgtcctctgagtaccgggagtatgcagacagttttggcaagtgccctggtgggcggaacccctggaccggggtatcccagttcctgcagacatctcagaagatcatccagtttgcttctgggaaggagccccagccaggggagacagtcatctatgtggctggtgccttcgacctgttccacatcgggcatgtggacttcctggagaaggtgcacaggctggcagagaggccctacatcatcgcgggcttacactttgaccaggaggtcaatcactacaaggggaagaactaccccatcatgaatctgcatgaacggactctgagcgtgctggcctgccggtacgtgtcagaagtggtgattggagccccgtacgcggtcacagcagagctcctaagtcacttcaaggtggacctggtgtgtcacggcaagacagaaattatccctgacagggatggctccgacccataccaggagcccaagagaaggggcatcttccgtcagattgacagtggcagcaacctcaccacagacctcatcgtccagcggatcatcaccaacaggttggagtatgaggcgcgaaaccagaagaaggaagccaaggagctggccttcctggaggctgccaggcagcaggcggcacagcccctgggggagcgcgatggtgacttctaacctggcagaggccctggccggccctccccctgctctgcttctgcgccttctgcgtttggacataggactctgcagggccgccctctctaactggcctggctctggaagggctggtgaggactctgcctccttgcctgcctacaaggtgcctggtttgcagcaggctctccgctctttccagcaaagctgctcagagagggtgtccagcacagtggagaggccggaagtgagacgggcagacggcacctgcagcctgaaacgcaccgctcctgcgtgcgcccccacctggtccccggatgcccccaccacctggacagaggccacactgactgcccacccagctgtggcgggaggtgcagagcagagggctttagggagcagtgactgcggtcacccctttagttctctgggtgtagaccacaccacctcccactgggcaccccccaacacggtgtcctgccacccagcgcctggctccaggaaaacacgcttgccttccttcccggcagcttcgccactctccttatggactctgttctgtttgtacatggctgacggaaatctctttggtacaaccgaataaagcctggtggcagtgctgcgcggggctcccagccctgctgggaaggaccagggaaccactcagcaaggagaccctcttggccctgcccccaccatgcacccagcagccgggagtgcagcgggcagcctggcagtgagtgaaacccaggcctccagccctccaaagcctggggccaccccctgtagcaggcgatgctagaataaggaggagagccagagctgaggctccttgccccttggcccctccaggggccatgggatctctgtctcccacacccctgtcacggcccgcctggagcagcccagaggccgaagaggttcttactgcagcctccgggaggtgtctagggaggccatagattgcctggtctcgccgcattcaaaatgaggcttatgatcagtacttttttcagccccacattcctctccagaatggcctctgccctacagcacctggcccatgtggcaccccatgggcctgtcctctgctgttgtgaggtcgacctcacgacccagcacaggagctggaggcgaggtgcacgcgaggctctccacagcccaggaaggcagcctgtcaccctgctctccgagccaggggccaaggtgtggggggcacaggccatcctcatcctgccaggcccccgctttcaggagtggggtggtgccaatgctcccactcagaaccctggactgcggggtcccctgagcagagggaccagccagttccccatagacagattggtgctggacaggggctgcctgggccccaggcttggggagggtagaaaggccctgcagtgctgctgcctgggcccggaggtgggcctggccccgtagcagcattggaggccagagcccaagccagttccggagtcacacccaacggcggagggagaacctacccatctcccaccttcagctctggggaggcatgctctgggcctctggagccagggctcaggcccccaactctcctccttgcccctgcaccctcggacttggcctggccagaagggatgggggcaagaggaaggcagccaggggctccagcccatgccctcacagatttggctctcgagttggggagcgaagggctgggggaggacactgggaaccgggccagccgtggccctgcacttcccccagggagcaccaaggctaggcgcggcttcaccgcggggctgggtcgtggccagcttcgcccctgggtctgaagacctctgggcggcccaggccaaccttgccctgccgccgcacactcggctgccttctcatacccaggcttggggatttccaggtcccgttcccctcgtggcctggctgccagtcctccagcacccctcactccga

SEQ ID NO: 1858 - DNA, 4131 bp, Homo Sapiens
  NM_002862
gcagtgccgggcgccagagcagcggcgccagagcagctgcaccatcccggcgttcgcgtgtgccgccgctttcctcctccatctcttttcctccgcctccgccggcgcgatggcgaagccgctgacggacagcgagaagcggaagcagatcagcgtgcgcggcctggcggggctaggcgacgtggccgaggtgcggaagagcttcaaccggcacttgcacttcacgctggtcaaggaccgcaatgtggccacgccccgcgactacttcttcgcgctggcgcacacggtgcgcgaccacctcgtgggccgctggatccgcacgcagcagcactactacgagcgcgaccccaagcgcatttattatctttccctggaattctacatgggtcgcacgctgcagaacacgatggtgaacctgggccttcagaatgcctgcgatgaagccatctatcagttggggttagacttggaggaactcgaggagatagaagaagatgctggccttgggaatggaggcctggggaggctggcagcgtgtttccttgactcaatggctaccttgggcctggcagcatacggctatggaatccgctatgaatttgggatttttaaccagaagattgtcaatggctggcaggtagaggaggccgatgactggctgcgctacggcaacccctgggagaaagcgcggcctgagtatatgcttcccgtgcacttctacggacgcgtggagcacacccccgacggcgtgaagtggctggacacacaggtggtgctggccatgccctacgacaccccagtgcccggctacaagaacaacaccgtcaacaccatgcggctgtggtccgccaaggctcccaacgacttcaagctgcaggacttcaacgtgggagactacatcgaggcggtcctggaccggaacttggctgagaacatctccagggtcctgtatccaaatgataacttctttgaggggaaggagctgcggctgaagcaggagtacttcgtggtggccgccacgctccaggacatcatccgccgcttcaagtcgtccaagttcggctgccgggaccctgtgagaacctgtttcgagacgttcccagacaaggtggccatccagctgaacgacacccaccccgccctctccatccctgagctcatgcggatcctggtggacgtggagaaggtggactgggacaaggcctgggaaatcacgaagaagacctgtgcatacaccaaccacactgtgctgcctgaggccttggagcgctggcccgtgtccatgtttgagaagctgctgccgcggcacctggagataatctatgccatcaaccagcggcacctggaccacgtggccgcgctgtttcccggcgatgtggaccgcctgcgcaggatgtctgtgatcgaggagggggactgcaagcggatcaacatggcccacctgtgtgtgattgggtcccatgctgtcaatggtgtggcgaggatccactcggagatcgtgaaacagtcggtctttaaggatttttatgaactggagccagagaagttccagaataagaccaatggcatcaccccccgccggtggctgctgctgtgcaacccggggctggccgataccatcgtggagaaaattggggaggagttcctgactgacctgagccagctgaagaagctgctgccgctggtcagtgacgaggtgttcatcagggacgtggccaaggtcaaacaggagaacaagctcaagttctcggccttcctggagaaggagtacaaggtgaagatcaacccctcctccatgttcgatgtgcatgtgaagaggatccacgagtacaagcggcagctgctcaactgcctgcacgtcgtcaccctgtacaatcgaatcaagagagacccggccaaggcttttgtgcccaggactgttatgattgggggcaaggcagcgcccggttaccacatggccaagctgatcatcaagttggtcacctccatcggcgacgtcgtcaatcatgacccagttgtgggtgacaggttgaaagtgatcttcctggagaactaccgtgtgtccttggctgagaaagtgatcccggccgctgatctgtcgcagcagatctccactgcaggcaccgaggcctcaggcacaggcaacatgaagttcatgctcaacggggccctcaccatcggcaccatggacggcgccaacgtggagatggccgaggaggccggggccgagaacctcttcatcttcggcctgcgggtggaggatgtcgaggccttggaccggaaagggtacaatgccagggagtactacgaccacctgcccgagctgaagcaggccgtggaccagatcagcagtggctttttttctcccaaggagccagactgcttcaaggacatcgtgaacatgctgatgcaccatgacaggttcaaggtgtttgcagactatgaagcctacatgcagtgccaggcacaggtggaccagctgtaccggaaccccaaggagtggaccaagaaggtcatcaggaacatcgcctgctcgggcaagttctccagtgaccggaccatcacggagtatgcacgggagatctggggtgtggagccctccgacctgcagatcccgccccccaacatcccccgggactaggcacaccctgccttggcgggaccagcgggcatttgttttcttgctgactttgcacctccttttttccccaaacactttgccagccactggtggtccctgcttttctgagtaccatgtttccaggaggggccatgggggtcagggtggttttgagagagcagggtaaggaaggaatgtgctagaagtgctcctagtttcttgtaaaggaagccagagttgacagtacaaagggtcgtggccagccctgcagcttcagcacctgccccacccagagtgggagtcaggtggagccacctgctgggctcccccagaactttgcacacatcttgctatgtattagccgatgtctttagtgttgagcctctggattctggggtctgggccagtggccatagtgaagcctgggaatgagtgttactgcagcatctgggctgccagccacagggaagggccaagccccatgtagccccagtcatcctgcccagccctgcctcctggccatgccgggaggggtcggatcctctaggcatcgccttcacagccccctgccccctgccctctgtcctggctctgcacctggtatatgggtcatggacccagatggggctttccctttgtagccatccaatgggcattgtgtgggtgcttggaacccgggatgactgagggggacactggagtgggtgcttgtgtctgctgtctcagaggccttggtcaggatgaagttggctgacacagcttagcttggttttgcttattcaaaagagaaaataactacacatggaaatgaaactagctgaagccttttcttgttttagcaactgaaaattgtacttggtcacttttgtgcttgaggaggcccattttctgcctggcagggggcaggtctgtgccctcccgctgactcctgctgtgtcctgaggtgcatttcctgttgtacacacaagggccaggctccattctccctccctttccaccagtgccacagcctcgtctggaaaaaggaccaggggtcccggaggaacccatttgtgctctgcttggacagcaggcctggcactgggaggtgggggtgagcccctcacagccttgcccctccccaaggctggcaacctgcctcccattgcccaagagagagggcagggaacaggctactgtccttccctgtggaattgccgagaaatctagcaccttgcatgctggatctgggctgcggggaggctctttttctccctggcctccagtgcccaccaggaggatctgcgcacggtgcacagcccaccagagcactacagccttttattgagtggggcaagtgctgggctgtggtcgtgccctgacagcatcttccccaggcagcggctctgtggaggaggccatactcccctagttggccactggggccaccaccctgaccaccactgtgcccctcattgttactgccttgtgagataaaaactgattaaacctttgtggctgtggttggctga

SEQ ID NO: 1859 - DNA, 2859 bp, Homo Sapiens
  NM_002863
aaactttcgtgcgcgttgaaagctgctggcgcggcggggcggactccacccctgcccggcagcccagcgcctccggccgcacttccagctctctgcgcagcccgccgcgcagcccgccgccccagccatggcgaagcccctgacggaccaggagaagcggcggcagatcagcatccgcggcatcgtgggcgtggagaacgtggcagagctgaagaagagtttcaaccggcacctgcacttcacgctggtcaaggaccgcaacgtggccaccacccgcgactactacttcgcgctggcgcacacggtgcgcgaccacctggtggggcgctggatccgcacgcagcagcactactacgacaagtgccccaagagggtatattacctctctctggaattttacatgggccgaacattacagaacaccatgatcaacctcggtctgcaaaatgcctgtgatgaggccatttaccagcttggattggatatagaagagttagaagaaattgaagaagatgctggacttggcaatggtggtcttgggagacttgctgcctgcttcttggattccatggcaaccctgggacttgcagcctatggatacggcattcggtatgaatatgggattttcaatcagaagatccgagatggatggcaggtagaagaagcagatgattggctcagatatggaaacccttgggagaagtcccgcccagaattcatgctgcctgtgcacttctatggaaaagtagaacacaccaacaccgggaccaagtggattgacactcaagtggtcctggctctgccatatgacacccccgtgcccggctacatgaataacactgtcaacaccatgcgcctctggtctgctcgggcaccaaatgactttaacctcagagactttaatgttggagactacattcaggctgtgctggaccgaaacctggccgagaacatctcccgggtcctctatcccaatgacaatttttttgaagggaaggagctaagattgaagcaggaatactttgtggtggctgcaaccttgcaagatatcatccgccgtttcaaagcctccaagtttggctccacccgtggtgcaggaactgtgtttgatgccttcccggatcaggtggccatccagctgaatgacactcaccctgcactcgcgatccctgagctgatgaggatttttgtggatattgaaaaactgccctggtccaaggcatgggagctcacccagaagaccttcgcctacaccaaccacacagtgctcccggaagccctggagcgctggcccgtggacctggtggagaagctgctccctcgacatttggaaatcatttatgagataaatcagaagcatttagatagaattgtggccttgtttcctaaagatgtggaccgtctgagaaggatgtctctgatagaagaggaaggaagcaaaaggatcaacatggcccatctctgcattgtcggttcccatgctgtgaatggcgtggctaaaatccactcagacatcgtgaagactaaagtattcaaggacttcagtgagctagaacctgacaagtttcagaataaaaccaatgggatcactccaaggcgctggctcctactctgcaacccaggacttgcagagctcatagcagagaaaattggagaagactatgtgaaagacctgagccagctgacgaagctccacagcttcctgggtgatgatgtcttcctccgggaactcgccaaggtgaagcaggagaataagctgaagttttctcagttcctggagacggagtacaaagtgaagatcaacccatcctccatgtttgatgtccaggtgaagaggatacatgagtacaagcgacagctcttgaactgtctgcatgtgatcacgatgtacaaccgcattaagaaagaccctaagaagttattcgtgccaaggacagttatcattggtggtaaagctgccccaggatatcacatggccaaaatgatcataaagctgatcacttcagtggcagatgtggtgaacaatgaccctatggttggaagcaagttgaaagtcatcttcttggagaactacagagtatctcttgctgaaaaagtcattccagccacagatctgtcagagcagatttccactgcaggcaccgaagcctcggggacaggcaatatgaagttcatgctaaatggggccctaactatcgggaccatggatggggccaatgtggaaatggcagaagaagctggggaagagaacctgttcatctttggcatgaggatagatgatgtggctgctttggacaagaaagggtacgaggcaaaagaatactatgaggcacttccagagctgaagctggtcattgatcaaattgacaatggctttttttctcccaagcagcctgacctcttcaaagatatcatcaacatgctattttatcatgacaggtttaaagtctttgcagactacgaagcctatgtcaagtgtcaagataaagtgagtcagctgtacatgaatccaaaggcctggaacacaatggtactcaaaaacatagctgcctcggggaaattctccagtgaccgaacaattaaagaatatgcccaaaacatctggaacgtggaaccttcagatctaaagatttctctatccaatgaatctaacaaagtcaatggaaattgaactctagaattgtctctagaaaacatagcttcttactgaacttgaacatttttacaacattcactggtttttgttttgttagctaataatctataatagttgagtatctctgggaatggggagggaaattatatgtaatagagcttaaaaataaagtgtcaatttccaagggctaaaaaaaaaaaaaa

SEQ ID NO: 1860 - DNA, 1148 bp, Homo Sapiens
  NM_002865
gctcggtcgggcgctgtctccctcggctctgcgggtgtcagttcgtccggcttcctcacagcccctcactcccggcggctgacagcagcagcggcggcggcgggcggcgcctggcgtttcgaggctgagcggcaccggggttggggcgcggaggaggagcagcagcgggaggaggagccgtgtgccctggcactgagcggccgcggccatggcgtacgcctatctcttcaagtacatcataatcggcgacacaggtgttggtaaatcatgcttattgctacagtttacagacaagaggtttcagccagtgcatgaccttactattggtgtagagttcggtgctcgaatgataactattgatgggaaacagataaaacttcagatatgggatacggcagggcaagaatcctttcgttccatcacaaggtcgtattacagaggtgcagcaggagctttactagtttacgatattacacggagagatacattcaaccacttgacaacctggttagaagatgcccgccagcattccaattccaacatggtcattatgcttattggaaataaaagtgatttagaatctagaagagaagtaaaaaaagaagaaggtgaagcttttgcacgagaacatggactcatcttcatggaaacgtctgctaagactgcttccaatgtagaagaggcatttattaatacagcaaaagaaatttatgaaaaaattcaagaaggagtctttgacattaataatgaggcaaatggcattaaaattggccctcagcatgctgctaccaatgcaacacatgcaggcaatcagggaggacagcaggctgggggcggctgctgttgagtctgtttttactgtctagctgcccaacggggcctactcacttattctttcaccccctctcctcctgctcagctgagacatgaaactatttgaaatggctttatgtcacagaagactttaatccgtcaaattcttgtataactttgaataaatggttaatgttcacttaaaagacagattttggagattgtattcatatctatttgcatttgatttctaggtcaattgatgtgattatttttgttaaatgttgtcttgtgcccttaactacgaactgaattgtattaaacactacaaagtc

SEQ ID NO: 1861 - DNA, 3419 bp, Homo Sapiens
  NM_002869
gcacgcacgcacgcacgccagcggccggcggggccgcaggctcgcgcccgggctcgccccgcgccgctccagaggctcgcgcactcagcaggttgggctgcggcggcggcggcagctgtggaagctcaggcgctgcgcgtgagaggtcccagatacgtctgcggttccggctccgccaccctcagcttctcttccccaggtctgggagccgagtgcggaaggagggaacggccctagctttgggaagccagaggacacccctggctcctgccgacaccgccctccttcccttcccagccgcgggcctcgctcggtgctaggctactctgccgggaggcggcggcggctgccagtctgtggagagtcctgctgccctccagccgggctcctccaccgggccttgcaggggccgagagagctcggtgcccgcccttccgctcgcctttttcgtcagctggctggagcagcatcggtccgggaggtctctaggctgaggcggcggccgctcctctagttccacaatgtccacgggcggagacttcgggaatccgctgaggaaattcaagctggtgttcctgggggagcaaagcgttggaaagacatctttgatcaccagattcatgtatgacagttttgacaacacctatcaggcaacaattggcattgactttttatcaaaaactatgtacttggaggatcgaacaatcaggcttcagctgtgggatactgcgggtcaggaacgtttccgtagcctcattcccagttacatccgtgattctgctgcagctgtagtagtttacgatatcacaaatgttaactcattccagcaaactacaaagtggattgatgatgtcagaacagaaagaggaagtgatgttatcatcatgctagtaggaaataaaacagatcttgctgacaagaggcaagtgtcaattgaggagggagagaggaaagccaaagagctgaatgttatgtttattgaaactagtgcaaaagctggatacaatgtaaagcagctctttcgacgtgtagcagcagctttgccgggaatggaaagcacacaggacagaagcagagaagatatgattgacataaaactggaaaagcctcaggagcaaccagtcagtgaaggaggctgttcctgctaatctcccatgtcatcttcaaccttcttcagaagctcactgctttggcccccttactctttcattgactgcagtgtgaatattggcttgaaccttttcccttcagtaataacgtattgcaattcatcattgctgcctgtctcgtggagatgatctattagcttcacaagcacaacaaaagtcagtgtcttcattatttatattttacaaaaagccaaaatatttcagcatattccagtgataactttaaaaattagatacattttcttaacatttttttcttttttaatgttatgataatgtacttcaaaatgatggaaatctcaacagtatgagtatggcttggttaacgagcggtatgttcacagcctactttatctctccttgcttttctcacctctcacttacccccattccctattaccctattcttacctagcctcccccgacttcctcaaaacaaacaagagatggcaaagcagcagttctaccaagcccattggaattatcctttaattttacagataccacttgctgtaggctacggaccaagatgtccaaaattattcttgagcactgatataaattacggtcttctttgaggtcaaaattcagccatcatggtaggcagtgcttgaatgagaaaaggctcctggtgcatcttcaaaatgagtcctaaagaacatactgagtacttagaagtagaagaacataagatgtatttctgactaaaacaaatggctctttcacatgtgctttattagactctgggagagaaaattaaccaagtgcttcagaacaggtttttagtatttaattcttcacggtaagaaaatgaagttctaatgaactgtttctcccaaggttttaaaattgtcaagagttattctgtttgtttaaaaaataagaaacctctttaagcaatagattttgcttgggttttcttttttaaaaacataatactgtgcaggcaaggcactgtaaaagttttaattccttccagaagaaccagtggaagaatttaaatttggcgctacgatcaaaactactgaattagtagaaataatgatgtctaaagcttaccaacaaaagaaccctcagcagaataacaaaaactttgctcaggacatttgaggtcaaattgaagacggaaaccggaaaccgttttcttgtaagcccctagaggcagatcaggtaaagcatacatagtagagggaaaggagagaatggaaataaaactcaatattatgcagatttatgccttattttttagcattttttaaggttgggtctttcaggctggttttggtttgtattagatctgtatagtttaattaactggtgatttagttttatatttaagctacaattaatcttttttctttggtgatatttatttctttgccttttttttttttaacaactttcaatcttcagatgtttcgttgaatctatttagagcttcaccatggcaatatgtatttcccttaaaacactgcaaacaaatatactaggagtgtgcccttttaatctttactagttattgtgagattgctgtgtaagctaataaacacatttgtaaatacattgtttgcaggacgaaaacttctgagttacagctcaggaaaagcctgctgaatttatgttgtaagcattacttaacacagtataaagatgaaaagacaacaaaaatatcttcatacttcctcatcccctcattggaacaaaaccttaaactgggagaaccttagtcccctctctttcctcttcctcctccacttcccacttattgtcaccttgtaatattcagagagcacttggattatggatctgaatagagaaatgcttacagataatcattagcccacataccagtaacttatacttaaagatgggatggagttgtaaagtgcttttataatacaatataattgttaaaggcaagggttgactctttgttttattttgacatggcatgtcctgaaataaatattgattcaatatggcagatgggtcatattctttatttggaagaagttgtgacttctgacatgggtgtgattgtcttcctacactgttgcatttgattctttttatgtatttttaagaaagtaaccagttatactgcttttaatattgattggtctttttatttggcttggagttcttcaaagcattgaagtgtgttcatagtccaggttttttttttaataaacacaattttgctgccaaaaatatataaataaaacacgaaagaaaacaaaaaaaaaaaaa

SEQ ID NO: 1862 - DNA, 1211 bp, Homo Sapiens
  NM_002870
ctgggctccgtgccgctctgtttgccaaccgtccagtcccgcctaccagtgccgggcgctccccacccctcccccggctcccccggtgtccgccatggccaaagcctacgaccacctcttcaagttgctgctgatcggggactcgggggtgggcaagacttgtctgatcattcgctttgcagaggacaacttcaacaacacttacatctccaccatcggaattgatttcaagatccgcactgtggatatagaggggaagaagatcaaactacaagtctgggacacggctggccaagagcggttcaagacaataactactgcctactaccgtggagccatgggcattatcctagtatacgacatcacggatgagaaatctttcgagaatattcagaactggatgaaaagcatcaaggagaatgcctcggctggggtggagcgcctcttgctggggaacaaatgtgacatggaggccaagaggaaggtgcagaaggagcaggccgataagttggctcgagagcatggaatccgatttttcgaaactagtgctaaatccagtatgaatgtggatgaggcttttagttccctggcccgggacatcttgctcaagtcaggaggccggagatcaggaaacggcaacaagcctcccagtactgacctgaaaacttgtgacaagaagaacaccaacaagtgctccctgggctgaggaccctttcttgcctccccaccccggaagctgaacctgagggagacaacggcagagggagtgagcaggggagaaatagcagaggggcttggagggtcacataggtagatggtaaagagaatgaggagaaaaaggagaaaagggaaaagcagaaaggaaaaaaaggaagagagaggaagggagaagggagaggaatgaattgaggaagtgaaagaaggcaaggaggtaggaagagagggaggaggaaaggaaggagagatgcctcaggcttcagaccttacctgggttttcagggcaaacataaatgtaaatacactgatttattctgttactagatcaggttttagggtcctgcaaaaggctagctcggcactacactagggaatttgctcctgttctgtcacttgtcatggtctttcttggtattaaaggccaccatttgcacaaaaaaaaaaaaaaaaaaaaaaaaaaaaaaaaaaaaaaaaaaaaaaaaaaaaaaaaaaaa

SEQ ID NO: 1863 - DNA, 1516 bp, Homo Sapiens
  NM_002872
tgccccaccaccgctgctcctcagcaggcgcctcaccagcctccacaccccttgcgcccgcagaaacgcgcctggccctgagctgtcaccaccgacactctccaggctccggacacgatgcaggccatcaagtgtgtggtggtgggagatggggccgtgggcaagacctgccttctcatcagctacaccaccaacgcctttcccggagagtacatccccaccgtgtttgacaactattcagccaatgtgatggtggacagcaagccagtgaacctggggctgtgggacactgctgggcaggaggactacgaccgtctccggccgctctcctatccacagacggacgtcttcctcatctgcttctccctcgtcagcccagcctcttatgagaacgtccgcgccaagtggttcccagaagtgcggcaccactgccccagcacacccatcatcctggtgggcaccaagctggacctgcgggacgacaaggacaccatcgagaaactgaaggagaagaagctggctcccatcacctacccgcagggcctggcactggccaaggagattgactcggtgaaatacctggagtgctcagctctcacccagagaggcctgaaaaccgtgttcgacgaggccatccgggccgtgctgtgccctcagcccacgcggcagcagaagcgcgcctgcagcctcctctaggggttgcaccccagcgctcccacctagatgggtctgatcctccaggatccccacccaaagcctgatggcaccccggctggccatgctgtcccctccctgtggcgtttcttagcagatggctgcagagcttcgttgatggtcttttctgtactggaggcctcctgaggccaggaacgtgcaaatttgcaggtgctgcatcccaagcccctcatgctcctgccttcctgagggccagaggggagccccaggacccattaagccacccccgtgttcctgccgtcagtgccaactgccgcatgtggaagcatctacccgttcactccagtcccaccccacgcctgactcccctctggaaactgcaggccagatggttgctgccacaacttgtgtaccttcagggatggggctcttactccctcctgaggccagctgctctaatatcgatggtcctgcttgccagagagttcctctacccagcaaaaatgagtgtctcagaagtgtgctcctctggcctcagttctcctcttttggaacaacataaaacaaatttaattttctacgcctctggggatatctgctcagccaatggaaaatctgggttcaaccagcccctgccatttcttaagactttctgctgcactcacaggatcctgagctgcacttacctgtgagagtcttcaaacttttaaaccttgccagtcaggacttttgctattgcaaatagaaaacccaactcaacctgcttaagcagaaaataaatttattgattcaaaaaaaaaaaaaaaaaaaaaaaaaaaaaaaaaaaaaaaaaaaaaaaaaa

SEQ ID NO: 1864 - DNA, 607 bp, Homo Sapiens
  NM_002876
gtgcggagtttggctgctccggggttagcaggtgagcctgcgatgcgcgggaagacgttccgctttgaaatgcagcgggatttggtgagtttcccgctgtctccagcggtgcgggtgaagctggtgtctgcggggttccagactgctgaggaactcctagaggtgaaaccctccgagcttagcaaagaagttgggatatctaaagcagaagccttagaaactctgcaaattatcagaagagaatgtctcacaaataaaccaagatatgctggtacatctgagtcacacaagaagtgtacagcactggaacttcttgagcaggagcatacccagggcttcataatcaccttctgttcagcactagatgatattcttgggggtggagtgcccttaatgaaaacaacagaaatttgtggtgcaccaggtgttggaaaaacacaattatggtaaaataaagtgttctccttttaagggtgggtttaataacatattatgaaagtagtattttgtactatcgtcaggaaaccaaataagatatatatgtgctcttaattttaagtgtgtatgtgcattaaacaaaaattagcttacaaaaaaaaaaaaaaaa

SEQ ID NO: 1865 - DNA, 2275 bp, Homo Sapiens
  NM_002881
cgctcggggggtgggaaagcgagcccggcagctcaatgacaaatcggtggaggacggctggggtccggccccgggagggggcggggcgcgtttaagagctgcgggccgggtgcggacggcggaggcggcgggactggtccctgctcttcagtgggtcatctgtgtgtcacagcctcagaagaccagcgagatggctgccaacaagagtaagggccagagctccttggccctccacaaggtgatcatggttggcagcggaggcgttggcaagtcagccctgacgcttcagttcatgtatgacgagtttgtagaagactatgaacctaccaaagctgacagttatagaaagaaagtggttcttgatggggaagaagttcagatagatattctggacaccgctgggcaagaggactacgcagccattcgagataactactttcggagtggggaagggtttcttcttgtgttctcaatcacagaacatgaatcctttacagcaactgccgaattcagggaacagattctccgtgtgaaggctgaagaagataaaattccactgctcgtcgtgggaaacaagtctgacctagaggagcggaggcaggtgcctgtggaggaggccaggagtaaagccgaagagtggggcgtgcagtacgtggagacgtcagcgaagacccgggccaacgtggacaaggtgttctttgacctaatgagagaaatcagaacaaagaagatgtcagaaaacaaagacaagaatggcaagaaaagcagcaagaacaagaaaagttttaaagaaagatgttgcttactatgagtgtcaaggtgacggatgaagccagctgctcctaaggacacagggctgggttggtaaagagaaggctatggttgacttcttgcttgtgcttcccactctccccgacttcattcactcaaacttctttaaatggggaaaaatatttgtgactctgtggctggcagaagaaataagcccatgcaagtggaagggctgctttgtcaggaggttgtggaatttctttcttctccccttcttccctcccaaaagcttagctatgtataaagtgccacagataggaaacagctgttaattacaaagagaaagaattgtcatagcatcttattttgttcctagttttataacattaccatccttcgttttgaactacagatgttgtagtgggttttggaggagggagtggagtaagatgccctcccacttttatcagtttagtagtagtactgagaaaaatcccttcagctctaagaacactgaaaaatccaccgattttttgggtaagcttcttggcaataccctgtggatctgaaacagctaaaaaaatgaatttgaattgcgccagataggtcaataccaagcttctgattcctcctcacatatgaaaagtgaaagttgtgagttgttttcctcttatttaaacattggcctattataatctgtgttggttatttttctcctgtaagcatcctgatttttctgtaggaacttttctttggcagaccaagtgaagactcaggaatggtgtgcattataaatgacacacattgccacttgtgtagatatttttaagttctttggctaagtcctctcctaactgcctgtcctctggttaggcccctccctctccactagtggtgaatgcatgtgtctgtctgatcagcatcactgcacacggaggtctagtgagcctcttgctaagtgtcacacacactcttcccaaagacgtgatgagttaaagttgtattctgaaatcatgaagccagagcctgtgccagaccttctgctacctctcatagaattgctctgtaattctaaatttaaaattagaagtagagagagataagccatcgcccctttgcctctgagaattggctgctgtttctaatataattattttctaagatagccagatagttagaaaaagattttcattgatgacatatctttaaactttcttgcatcagtattctaaattgagcaaactgaaagattttcatcaggaaaggagcactgtgggaagagcccagtattcacattttttccccatttttcagaagcgacatttcatatataggtgccaaaagtgaatcggggtgcggagagtgggaaccttttgaatttatgattgtcacagagatggtagaaattatgatctgactggaaaacaatcctgtatcccctcccaaagaatcatgggctttttttttgaataaaaaagcagacaaatagaaaaaaaaaaaaaaa

SEQ ID NO: 1866 - DNA, 884 bp, Homo Sapiens
  NM_002882
cgaggttcgggtcgtggggcggagggaagagcgggcgggcgggaggcgccggcgccagacgcggagggaaggagctacgagtagccgccgagaggccgcggagccagcgacgaccgacccagccgagccgccgccgccgccgcgcccccatggcggccgccaaggacactcatgaggaccatgatacttccactgagaatacagacgagtccaaccatgaccctcagtttgagccaatagtttctcttcctgagcaagaaattaaaacactggaagaagatgaagaggaactttttaaaatgcgggcaaaactgttccgatttgcctctgagaacgatctcccagaatggaaggagcgaggcactggtgacgtcaagctcctgaagcacaaggagaaaggggccatccgcctcctcatgcggagggacaagaccctgaagatctgtgccaaccactacatcacgccgatgatggagctgaagcccaacgcaggtagcgaccgtgcctgggtctggaacacccacgctgacttcgccgacgagtgccccaagccagagctgctggccatccgcttcctgaatgctgagaatgcacagaaattcaaaacaaagtttgaagaatgcaggaaagagatcgaagagagagaaaagaaagcaggatcaggcaaaaatgatcatgccgaaaaagtggcggaaaagctagaagctctctcggtgaaggaggagaccaaggaggatgctgaggagaagcaataaatcgtcttattttattttcttttcctctctttcctttcctttttttaaaaaattttaccctgcccctctttttcggtttgtttttattctttcatttttacaagggacgttatataaagaactgaactc

SEQ ID NO: 1867 - DNA, 3040 bp, Homo Sapiens
  NM_002883
aaatcctcctcctccgccatcatccgccgcggtgcggagagcaggtggtgctggaagcgcgtgaggccgggagctcgagagagctaacagactagccggctggacatctggaccgctggatccggaggtggcgaccccggcctgacccggaccctaaatccgtccccgccccagagggcggaggcgcgcgctcgattccccccacgcggcggcgccgcctgtttacgtctgcagatctccaggggagcccaccagcctagtcaacatggcctcggaagacattgccaagctggcagagacacttgccaagactcaggtggccgggggacagctgagtttcaaaggcaagagcctcaaactcaacactgcagaagatgctaaagatgtgattaaagagattgaagactttgacagcttggaggctctgcgtctggaaggcaacacagtgggcgtggaagcagccagggtcatcgccaaggccttagagaagaagtcggagttgaagcgctgccactggagtgacatgttcacgggaaggctgcggaccgagatcccaccagccctgatctcactaggggaaggactcatcacagctggggctcagctggtggagctggacttaagcgacaacgcattcgggcccgacggtgtgcaaggcttcgaggccctgctcaagagctcagcctgcttcaccctgcaggaactcaagctcaacaactgtggcatgggcattggcggcggcaagatcctggctgcagctctgaccgaatgtcaccggaaatccagtgcccaaggcaagcctctggccctgaaggtctttgtggctggcagaaaccgtctggagaatgatggcgccactgccttggcagaagcttttagggtcatcgggaccctggaggaggtccacatgccacagaatgggatcaaccaccctggcatcactgccctggcccaggctttcgctgtcaaccccctgctgcgggtcatcaacctgaatgacaacaccttcactgagaagggcgccgtggccatggccgagaccttgaagaccttgcggcaggtggaggtgattaattttggggactgcctggtgcgctccaagggtgcagttgccattgcagatgccatccgcggcggcctgcccaagctaaaggagctgaacttgtcattctgtgaaatcaagagggatgctgccctggctgttgctgaggccatggcagacaaagctgagctggagaagctggacctgaatggcaacaccctgggagaagaaggctgtgaacagcttcaggaggtgctggagggcttcaacatggccaaggtgctggcgtccctcagtgatgacgaggacgaggaggaggaggaggaaggagaagaggaagaagaggaagcagaagaagaggaggaggaagatgaggaagaggaggaagaagaggaggaggaggaggaagaagagcctcagcagcgagggcagggagagaagtcagccacgccctcacggaagattctggaccctaacactggggagccagctcccgtgctgtcctccccacctcctgcagacgtctccaccttcctggcttttccctctccagagaagctgctgcgcctagggcccaagagctccgtgctgatagcccagcagactgacacgtctgaccccgagaaggtggtctctgccttcctaaaggtgtcatctgtgttcaaggacgaagctactgtgaggatggcagtgcaggatgcagtagatgccctgatgcagaaggctttcaactcctcgtccttcaactccaacaccttcctcaccaggctgctcgtgcacatgggtctgctcaagagtgaagacaaggtcaaggccattgccaacctgtacggccccctgatggcgctgaaccacatggtgcagcaggactatttccccaaggcccttgcacccctgctgctggcgttcgtgaccaagcccaacagcgccctggaatcctgctccttcgcccgccacagtctgctgcagacgctgtacaaggtctagactcaaagcctctcccatcccttggcctggaccagtgagctggggagggactcggatgaactgaggcgcagcctacgccattgccttggacaggactctggccacaggcagggcgggtctgtgtcccatgtgtcctgtcagtcccctgagtatgtgtgtgggtgtggcgcatgtgcaggtctgtgcctcctgtcgggatttgggttttaacgtcttctgctggcccagccctgctctgttgtggggagttggcccccaggggaaagggctgtgagctgctccgccattaaactcacctccacctgagggcgctctgctgatctccgcctgggccctgatggccgtccccacccacctgccttccggcccggctccctggcggagccagaacccagggagttgcccgcgtgctgtccttcccctctgtgttgtgattgggttgtttcctgccctgcctggggctgcttctcgtcaccaagccctggtcctgcggcagctgtcacccctaccatccataccactgtgctgaccgctcagcctgaagagcagagaatgccatgggtgggactgtgggggtcggatcgtggggttgttggcagagggcaaccctgggccccacaccgtgtggacaggcagacaccagattgtccaggagcaggagctgctgggactgcgctggccccggacctagtgggccttctcctggctgctgagatgtcgtctgtgactggcctggctggagggggagtgttgacaacccaaagctgttctccagtctggggagggagaggcagggtccccaatgtccgagctgcatctggacgctgctcttaaaggacctcctggggcaggggagcggtagggtctggactgggcagatgctgtatgacctccctgagcacccgtgactgccccatgctttcccctttgtgctctgtgtgtgtctgggctgtgcccgggggcttcacaaataaagtcgtgtggcagcttcaaaaaaaaaaaaaaaaaaaa

SEQ ID NO: 1868 - DNA, 3334 bp, Homo Sapiens
  NM_002885
ctccccgaactgcggcggcggcgagcgccggccgcatctgagcagagctgcagcggcggccgcgggcaccagagtgccgagcccaggacgcccccggcccaggcccttggggtggacaagtccttcacttctcgccggagtgtgtggaggagcgatgggcagaaccagcacttccctcaggcactagacctgtcacgagtgaacttagttccctcctatactccttcactctaccctaagaacacagatctatttgagatgattgagaagatgcagggaagcaggatggatgaacaacgctgctccttcccgccgcccctcaaaacagaggaggactacattccatacccgagcgtgcacgaggtcttggggcgagaaggacccttccccctcatcctgctgccccagtttgggggctactggattgagggcaccaaccacgaaatcaccagcatccccgagacagagccactgcagtcgcccacaaccaaggtgaagctcgagtgcaaccccacagcccgcatctaccggaagcactttctcggcaaggagcatttcaattactactcactggacgctgccctcggccaccttgtcttctcactcaagtacgatgtcatcggggaccaagagcacctgcggctgctgctcaggaccaagtgccggacataccatgatgtcatccccatctcctgcctcaccgagttccctaatgttgtccagatggcaaagttggtgtgtgaagacgtcaatgtggatcggttctatcctgtgctctaccccaaggcttcccggctcatcgtcacctttgacgagcatgtcatcagcaataacttcaagtttggcgtcatttatcagaagcttgggcagacctccgaggaagaactcttcagcaccaatgaggaaagtcccgctttcgtggagttccttgaatttcttggccagaaggtcaaactgcaggactttaaggggttccgaggaggcctggacgtgacccacgggcagacggggaccgaatctgtgtactgcaacttccgcaacaaggagatcatgtttcacgtgtccaccaagctgccatacacggaaggggacgcccagcagttgcagcggaagcggcacatcgggaacgacatcgtggctgtggtcttccaggatgagaacactcctttcgtgcccgacatgatcgcgtccaacttcctgcatgcctacgtcgtggtgcaggctgagggcgggggccctgatggccccctctacaaggtctctgtcactgcaagagatgatgtgcccttctttggaccccccctcccggaccccgctgtgttcaggaaggggcctgagttccaggaatttttgctgacaaagctgatcaatgctgaatatgcctgctacaaggcagagaagtttgccaaactggaggagcggacgcgggccgccctcctggagacgctctatgaggaactacacatccacagccagtccatgatgggcttgggcggcgacgaggacaagatggagaatggcagtgggggcggcggcttctttgagtctttcaagcgggtcatccggagccgcagccagtccatggatgccatggggctgagcaacaagaagcccaacaccgtgtccaccagccacagcgggagcttcgcgcccaacaaccccgacctggccaaggcggctggaatatcactgattgtccctgggaagagccccacgaggaagaagtcgggcccgttcggctcccgccgcagcagcgccattggcatcgagaacatacaggaggtgcaggagaagagggagagccctccggctggtcagaagaccccagacagcgggcacgtctcacaggagcccaagtcggagaactcatccactcagagctccccagagatgcccacgaccaagaacagagcggagaccgcagcgcagagagcagaggcgctcaaggacttctcccgctcctcgtccagtgccagcagcttcgccagcgtggtggaggagacggagggtgtggacggagaggacacaggcctggagagcgtgtcatcctcaggaacaccccacaagcgggactccttcatctatagcacgtggctggaggacagtgtcagcaccactagtgggggcagctccccaggcccctctcgatcaccccacccagacgccggcaagttgggggaccctgcgtgtcccgagatcaagatccagctggaagcatctgagcagcacatgccccagctgggctgttagccgggccaccccctctgaaggtgaaactgagcagatgaggccacagaagcacaaggggaaggtgccgtgtcaagcccaggcagacgagacctctgccctgaagaccaacaccagcccgtgggctgccccctgcctccccaccctccccatggcccacccatctgggctgtctctgcagggcagagccgtccagacctgggatcagggaagctgctggcatcgtccccacccccagcctgggggtctgggctggggcagggattgctcagtggaagcaggactgggggtctggcttgccccctccctgggcctccatcacccctgagcatccctctggactcagagggaacaaggtgggagagagagtttgagacagctccgtgtggagagcttagcccctggaggcagcacaaggaggatgtgatatgtgggggagtgagcactgggttgggagccgggtcctggtttccaatttgggttctgctgtgtgactctgggcaagtcactctccctctctgggcatgtctgctacaaatggacaagattatttcagaggtcactgaagactgtgattacatgcacctgccttagaaggtaggattttcttcccagggacctcctatcaccctaccctgcttcttgaggtccctggagccccaggtgggctgaggggcagggagccggctgtgcccagtatgcctcctggaccctccagttctgccacaggtctgccgatgccctgtccactgcctacacatgacagacaagtaaccccctcatgggggatggggacctacctggctcctcagccagcacccagcttaacccctgccatcccatgctgggccctccaggccaagagtctcagctggccgagagtccaggccttgcctcccccgaccgccatggagggggcagcccggcacagctgctgggagcccttgtgtgtctggtcacactttttaggcgtcacgccaaaggccagcctcctggccccaatacccattttggaagcccctgtggccgtgtggatgtcggtaacagttgtataaaataaattctatttatcgctattgtacccaga

SEQ ID NO: 1869 - DNA, 2021 bp, Homo Sapiens
  NM_002893
ctcggcgccggagccgttggctcccagacccgcctctccgcctcctctcacttttcccagggcggatgcgcctgcgctcagctgcctgggcgggctgggaggcgcgggttgaaaagtctcgttccaagtttggagagagagagaagagcgcctcagacctcggtacccgcgagcggggaggaggcaggaaagaaggacgcggcgtctggggagcacccaggcagcaagacggggcccgggctttcgacagtggggagtgtgacgcgcttgggaaaggcaggagcgccagcggtcgggctgctcttggctaacgagaggagtccgaggcggcggcgaggggcgaacgacccgacgcaagatggcgagtaaagagatgtttgaagatactgtggaggagcgtgtcatcaatgaagaatataaaatctggaagaagaatacaccgtttctatatgacctggttatgacccatgctcttcagtggcccagtcttaccgttcagtggcttcctgaagtgactaaacctgaaggaaaagattatgcccttcattggctagtgctggggactcatacgtctgatgagcagaatcatctggtggttgctcgagtacatattcccaatgatgatgcacagtttgatgcttcccattgtgacagtgacaagggtgaatttggtggctttggttctgtaacaggaaaaattgaatgtgaaattaaaatcaatcacgaaggagaagtaaaccgtgctcgttacatgccgcagaatcctcacatcattgctacaaaaacaccatcttctgatgtgttggtttttgactatacaaaacaccctgctaaaccagacccaagtggagaatgtaatcctgatctcagattaagaggtcaccagaaggaaggctatggtctctcctggaattcaaatttgagtggacatctcctaagtgcatctgatgaccatactgtttgtctgtgggatataaacgcaggaccaaaagaaggcaaaattgtggatgctaaagccatctttactggccactcagctgttgtagaggatgtggcctggcacctgctgcacgagtcattgtttggatctgttgctgatgatcagaaacttatgatatgggacaccaggtccaataccacctccaagccgagtcacttggtggatgcgcacactgccgaagtcaactgcctctcattcaatccctacagcgaatttattctagccaccggctctgcggataagaccgtagctttatgggatctgcgtaacttaaaattaaaactccataccttcgaatctcataaagatgaaattttccaggtccactggtctccacataatgaaactattctggcttcaagtggtactgaccgccgcctgaatgtgtgggatttaagtaaaattggggaagaacaatcagcagaagatgcagaagatgggcctccagaactcctgtttattcatggaggacacactgctaagatttcagattttagctggaaccccaatgagccttgggtcatttgctcagtgtctgaggataacatcatgcagatatggcaaatggctgaaaatatttacaatgatgaagagtcagatgtcacgacatccgaactggagggacaaggatcttaaacccaaagtacgagaaatgtttctgttgaatgtaatgctacatgaatgcttgatttatcaagcgccaaaaaggcattgtatagtaggaaatgtaagtggggtggcttatggcttctttatcctctgattctagcactttcaagtgagctgttgcgtactgtatcatattgtagctattagggaagagaagaatgttgcttaagaaagaacatcaccattgattttaaatacaagtagcagggtattgcctttgattcaactgttttaagtcctcattttctcaaactaagtgcttgctgttcccaaatatgcaagaataacttttacactttttccttccaacacttcttgattggctttgcagaaataaagttttaaaataaaa

SEQ ID NO: 1870 - DNA, 4270 bp, Homo Sapiens
  NM_002895
gcaggtggttgtgggtagcgcgcctgggagggagaaagaagtcgggggccgtggcgcgcagcccgcggggcctgaagggatgttcgaggacaagccccacgctgagggggcggcggtggtcgccgcagccggggaggcgctacaggccctgtgccaggagctgaacctggacgaggggagcgcggccgaagccctggacgactttactgccatccgaggcaactacagcctagagggagaagttacacactggttggcatgttcattatatgttgcatgccgcaaaagcattattcccacggttggaaagggtatcatggaaggcaactgtgtttcacttaccagaatactacgttcagctaaattaagtttaatacaattttttagtaaaatgaagaaatggatggacatgtcaaatctaccacaagaatttcgtgaacgtatagaaaggctagagagaaattttgaggtgtctactgtaatattcaaaaaatatgagccaatttttttagatatatttcaaaatccatatgaagaaccaccaaagttaccacgaagccggaagcagaggaggattccttgcagtgttaaggatctgtttaatttctgttggacactttttgtttatactaagggtaattttcggatgattggggatgacttagtaaactcttatcatttacttctatgctgcttggatctgatttttgccaatgcgattatgtgcccaaatagacaagacttgctaaatccatcatttaaaggtttaccatctgattttcatactgctgactttacggcttctgaagagccaccctgcatcattgctgtactgtgtgaactgcatgatggacttctcgtagaagcaaaaggaataaaggagcactactttaagccatatatttcaaaactctttgacaggaagatattaaaaggagaatgcctcctggacctttcaagttttactgataatagcaaagcagtgaataaggagtatgaagagtatgttctaactgttggtgattttgatgagaggatctttttgggagcagacgcagaagaggaaattggaacacctcgaaagttcactcgtgacaccccattagggaaactgacagcacaggctaatgtggagtataaccttcaacagcactttgaaaaaaaaaggtcatttgcaccttctaccccactgaccggacggagatatttacgagaaaaagaagcagtcattactcctgttgcatcagccacccaaagtgtgagccggttacagagtattgtggctggtctgaaaaatgcaccaagtgaccaacttataaatatttttgaatcttgtgtgcgtaatcctgtggaaaacattatgaaaatactaaaaggaataggagagactttctgtcaacactatactcaatcaacagatgaacagccaggatctcacatagactttgctgtaaacagactaaagctggcagaaattttgtattataaaatactagagactgtaatggttcaggaaacacgaagacttcatggaatggacatgtcagttcttttagagcaagatatatttcatcgttccttgatggcttgttgtttggaaattgtgctctttgcctatagctcacctcgtacttttccttggattattgaagttctcaacttgcaaccattttacttttataaggttattgaggtggtgatccgctcagaagaggggctctcaagggacatggtgaaacacctaaacagcattgaagaacagattttggagagtttagcatggagtcacgattctgcactgtgggaggctctccaggtttctgcaaacaaagttcctacctgtgaagaagttatattcccaaataactttgaaacaggaaatggaggaaatgtgcagggacatcttcccctgatgccaatgtctcctctaatgcacccaagagtcaaggaagttcgaactgacagtgggagtcttcgaagagatatgcaaccattgtctccaatttctgtccatgaacgctacagttctcctaccgcagggagtgctaagagaagactctttggagaggaccccccaaaggaaatgcttatggacaagatcataacagaaggaacaaaattgaaaatcgctccttcttcaagcattactgctgaaaatgtatcaattttacctggtcaaactcttctaacaatggccacagccccagtaacaggaacaacaggacataaagttacaattccattacatggtgtcgcaaatgatgctggagagatcacactgatacctctttccatgaatacaaatcaggagtccaaagtcaagagtcctgtatcacttactgctcattcattaattggtgcttctccaaaacagaccaatctgactaaagcacaagaggtacattcaactggaataaacaggccaaagagaactgggtccttagcactattttacagaaaggtctatcatttggcaagtgtacgcttacgtgatctatgtctaaaactggatgtttcaaatgagttacgaaggaagatatggacgtgttttgaattcactttagttcactgtcctgatctaatgaaagacaggcatttggatcagctcctcctttgtgccttttatatcatggcaaaggtaacaaaagaagaaagaacttttcaagaaattatgaaaagttataggaatcagccccaagctaatagtcacgtatatagaagtgttctgctgaaaagtattccaagagaagttgtggcatataataaaaatataaatgatgactttgaaatgatagattgtgacttagaagatgctacaaaaacacctgactgttccagtggaccagtgaaagaggaaagaggtgatcttataaaattttacaatacaatatatgtaggaagagtgaagtcatttgcactgaaatacgacttggcgaatcaggaccatatgatggatgctccaccactctctccttttccacatattaaacaacagccaggctcaccacgccgcatttcccagcagcactccatttatatttccccgcacaagaatgggtcaggccttacaccaagaagcgctctgctgtacaagttcaatggcagcccttctaagagtttgaaagatatcaacaacatgataaggcaaggtgagcagagaaccaagaagcgagtaatagccatcgatagtgatgcagaatcccctgccaaacgcgtctgtcaagaaaatgatgacgttttactgaaacgactacaggatgttgtcagtgaaagagcaaatcattaatgttgttcttgtttctatgataaaagcactttcagattgttctgcagaaagttggagctctgtccttcaaaccttttagccctatagatgataaatatcactgggttataagaaaaaattgcacaaaaattatgtgctttttaaaatatttatccaaaatgtagttgacagagatgtattttgagttggattggaaaggaatattttaagtgccttttaaaaatactaatagtccggccaggcgctgtggctcacgcctgtaatcccaggactttgggaggccaaggcgggcagatcaccggaggtcaggagttcgagaccagcctgaccaacatggagaaaccccatctctactaaaaatacaaaattagccgggtgtggtggcgcatgcctgtaatcccagctacttgggaggctgaggcagaattgcttgaacccaggaagcggaggttgtggtgagccaaggttgcgccactgcactccagcctgggcaacaagagtaaaactccatctcaaaaaatatatatatatatataaatagggaattttttttaatgtttgctccttgagttttcaagatgaaataaggagaaaccccataactttttagctctcttttaaaaataaatgtctccttctgtgttctgtaatatgaggataaataatctacttttgatagcatgctttgagatatttgtattcttaatttaatattgaaggaaggggttggttcccatagtacctggccagagggttatataccatcctgtctctggcccactgtggtaattccacatccaggtaccaccgccattcagagttgtctcaccccttctcgtgccttttctctccttgagctttataaacagatttgtacctgagccccagtgctacactcatccttgctttccagccctaagccatctcagcctgatgtcacaacccaataaatggggcactttcttcttttgtaaactattatca

SEQ ID NO: 1871 - DNA, 1714 bp, Homo Sapiens
  NM_002896
actttcttgagtggccaatccggttgtaggctcacctcccccttctactcagagcactgctgcggccgccgccattttagcgttttgtcagaagcgtccgcgccgcgaggaggaggccctgctggtttctgtgcgggctcttgtcaggatggtgaagctgttcatcggaaacctgccccgggaggctacagagcaggagattcgctcactcttcgagcagtatgggaaggtgctggaatgtgacatcattaagaattacggctttgtgcacatagaagacaagacggcagctgaggatgccatacgcaacctgcaccattacaagcttcatggggtgaacatcaacgtggaagccagcaagaataagagcaaaacctcaacaaagttgcatgtgggcaacatcagtcccacctgcaccaataaggagcttcgagccaagtttgaggagtatggtccggtcatcgaatgtgacatcgtgaaagattatgccttcgtacacatggagcgggcagaggatgcagtggaggccatcaggggccttgataacacagagtttcaaggcaaacgaatgcacgtgcagttgtccaccagccggcttaggactgcgcccgggatgggagaccagagcggctgctatcggtgcgggaaagaggggcactggtccaaagagtgtccgatagatcgttcaggccgcgtggcagacttgaccgagcaatataatgagcaatacggagcagtgcgtacgccttacaccatgagctatggggattcattgtattacaacaacgcgtacggagcgctcgatgcctactacaagcgctgccgtgctgcccggtcctatgaggcagtggcagctgcagctgcctccgtgtataattacgcagagcagaccctgtcccagctgccacaagtccagaatacagccatggccagtcacctcacctccacctctctcgatccctacgatagacacctgttgccgacctcaggagctgctgccacagctgctgctgcagcagcagccgctgctgctgttactgcagcttccacttcatattacgggcgggatcggagccccctgcgtcgcgctacagccccagtccccactgttggagagggctacggttacgggcatgagagtgagttgtcccaagcttcagcagccgcgcggaattctctgtacgacatggcccggtatgagcgggagcagtatgccgatcgggcgcggtactcagccttttaaagcttgaggtgggatgtgtgtgggctgaaattccgagctgcggttgtgcatgagaatacacccttcgtggtaccccatctccgggacgttctcggctctgtgcgttcagtccctcaggaaccgtggaccttaatttaccttgctaagttcagaccttctcttcctttcctttcctttcctctcctgcccattttcctgttcttctgtccttcaatacttctgtagcttcccattcatgttctcttctcccagcaggcctcattgtgtgcagaaactgtggtgggggctgtgctgtctcctccctgcctcctgcctcctgcggctgttggatttgggaatgaccttggtgagagtctcactgctccagggtctctttttggtccaaaggctagacctatagagttggatcactttttttctttccggtgaaataaatggtttttcaacttagggtaaaaaaaaaaaaaaaaa

SEQ ID NO: 1872 - DNA, 4296 bp, Homo Sapiens
  NM_002897
agatgccgcctggcaccaagcgcagccgccgctgccgcactttccacttgtattgatcacctctcagccccgcgcagccggctcgcccgagcggaccgcggccagcgcgccagcccttggcagccccggagcagtcgggctccgggaggaaactccttgggagcgccctgtccggggtgccctctgcgctctgcagtgtctttctttctgcctgggaggaggaggaggaggaggaagaggaggaggaggaggaggaggaggaggaagaggaggaggaggaggaggacgtctggtcccggctgggaggtggagcagcggcagcagcagcagccgccgccgccgccgccgctgccgccgccgccggaaagggagaggcaggagagcccgagacttggaaaccccaaagtgtccgcgaccctgcacggcaggctcccttccagcttcatgggcaaagtgtggaaacagcagatgtaccctcagtacgccacctactattacccccagtatctgcaagccaagcagtctctggtcccagcccaccccatggcccctcccagtcccagcaccaccagcagtaataacaacagtagcagcagtagcaactcaggatgggatcagctcagcaaaacgaacctctatatccgaggactgcctccccacaccaccgaccaggacctggtgaagctctgtcaaccatatgggaaaatagtctccacaaaggcaattttggataagacaacgaacaaatgcaaaggttatggttttgtcgactttgacagccctgcagcagctcaaaaagctgtgtctgccctgaaggccagtggggttcaagctcaaatggcaaagcaacaggaacaagatcctaccaacctctacatttctaatttgccactctccatggatgagcaagaactagaaaatatgctcaaaccatttggacaagttatttctacaaggatactacgtgattccagtggtacaagtcgtggtgttggctttgctaggatggaatcaacagaaaaatgtgaagctgttattggtcattttaatggaaaatttattaagacaccaccaggagtttctgcccccacagaacctttattgtgtaagtttgctgatggaggacagaaaaagagacagaacccaaacaaatacatccctaatggaagaccatggcatagagaaggagaggctggaatgacacttacttacgacccaactacagctgctatacagaacggattttatccttcaccatacagtattgctacaaaccgaatgatcactcaaacttctattacaccctatattgcatctcctgtatctgcctaccaggtgcaaagtccttcgtggatgcaacctcaaccatatattctacagcaccctggtgccgtgttaactccctcaatggagcacaccatgtcactacagcccgcatcaatgatcagccctctggcccagcagatgagtcatctgtcactaggcagcaccggaacatacatgcctgcaacgtcagctatgcaaggagcctacttgccacagtatgcacatatgcagacgacagcggttcctgttgaggaggcaagtggtcaacagcaggtggctgtcgagacgtctaatgaccattctccatatacctttcaacctaataagtaactgtgagatgtacagaaaggtgttcttacatgaagaagggtgtgaaggctgaacaatcatggatttttctgatcaattgtgctttaggaaattattgacagttttgcacaggttcttgaaaacgttatttataatgaaatcaactaaaactatttttgctataagttctataaggtgcataaaacccttaaattcatctagtagctgttcccccgaacaggtttattttagtaaaaaaaaaaaaacaaaaaacaaaaacaaaagatttttatcaaatgttatgatgcaaaaaaagaaaaagaaaaaaaaaaagaaaagaaaacttcaattttctgggtatgcacaaagaccatgaagacttatccaagtgcatgaccggatttttgtggttttgttcattttgtgtttaatttgtgttttttttttccagctgtatgaaatgggctttctgaagtttaaatagtccgacttcacccatggtgttctgtgcttgcagtgcgagtgttgctgtaattcagtgttgccgtcagtgtctcttttcttagctttctgtctttctttcaacgtagtgtgaagtgtcttatccttttctatgaattccaatttgccttaactcttttgatgctgtagctgtttcagtaaaagttagttcaaactaatgatgtagaatgctttgaccaaatgagctggtctattatgccttgtaaaacagcagcatagggcttttaaaaggtagtcaataaaagttgctgaaattttggcttttttaaatatgtagtaggtgtttttaatgatttttcacataatgtgtaaggtagtgaaatgcaagaagggaaaaatgttttgtgtgaaacacattttctgactggggaacttttattagggtaaattgtttgtaaggctgtacgccaacagtttcctctgatagtttgactgatttaggatatctgctgtatgatgcaatgtaaagtcttttttgccttttttcaggaaaaaaaaaaagctaacttgatgtactagatttagtgtaggtagtgttggggttggggatgggggtgggggaggggagtcactgaatgttttgtccttcctttatactaatgatagtgctttagaatgagaattatgcctgaaatctggcaaaccgaaaaatgttgctattgcaacaaagtggcaaaagctaaaagtaaggatttatcttcaaacataagctgagataacgaatagaagcaaaacgattggctactagctctctctctctctctctattaggtaaatttgaaaaataaaaatgacttggcacttttaaaggtaacttcaccaaagaccgaagagccagtaaccagtagctccaacttgtctcagcatcacatcttctgtgctctttatttttgccggaccagtttgcggttaggagaatgtgccttttttgtacctttgcatttaggttttataattttaattgatgtatggacacacacaaacaaaaaagcatgaaggaagatttggatccaagcagtgccacactttacatcatcactacaagtgttcaagtgtaaagaaaaccaattttgaaactatgaaattcctgattcataaatacacagttatttctactttagtacatataagataattcactgttattaaagctcttttattaaggcaattgcatatgttttaaaagcaatggtaaattaagttgtcttccaaaactgtgtacttgtctggtcagctgtgtatgatcagttatctacctcagagtctattttcttttgtgctgggacaggttgctggccctccctgtttccacagaccaaatcctcctagctcaggagctagggctaagcagttatttctttcaagtattttttagttcttaaattttatgcttgtatttgatgatagatgtcagtgacatttcatagtttcaaaagtccttgctgctctgagaagtgtagattctagtgaaaattacatagtcataagagaaatgtgtttttgtttttgtttttgtttcatttttttaaagttgtggtattattggttctatgctccctggaatattactgctttgtgaaagtccagactgaacgcagcaccctctgtgtacctagtacagttataaacctgggtctctcactacttgatatttttgcattagttaagacagaaatttgatagctcggttagaggggaggggaaatctgctgctagaaatgtctgaactaagtgccatactcgtctgggtaagatttgggaaacataacctctgtacataaaaaaaaaaaaatcagttaaacatcacatagtagacagccattaaattataaaaaaattaatttatgaagaaagaccttttgtacagattgaaaaaaaaagattttcatagagatatctatatgatcaagagagttaattttttatttttgttttactagtgccacagacttgccagtggtaacttatttgtccggttcaagataactctgtagttttctttcctaggacttgttgttaaacgccaaaagacatttttgaactgtacatttgatcagattgttagcttttctgttttatttcttttgagaacctttgaataaaaaacatctgaaattttaaaaaaaaaaaaaaaaaaaa

SEQ ID NO: 1873 - DNA, 8504 bp, Homo Sapiens
  NM_002898
gagctcattctctgcccgcagccccccttcatctctctcctcctgctccttttctcctcctttctcctccccctcccttttttcctccctccctctccccctttccctcgctcccctcctccctccctccccgtctttcttaccccctccctttctctctctctctctctctcgctcgttccctaacattaaagagaaaatgctgctatccgtgacttccaggcccgggatttcgacttttggctacaatagaaacaacaagaagccatatgtgtcattggctcagcagatggcaccacctagcccaagcaacagtacacctaacagcagtagtggaagcaatggaaatgaccagctgagcaaaaccaacctatacatccgaggattgcaaccaggcactactgaccaagatcttgtcaagctgtgtcagccatatggcaagattgtttccactaaggccatactggacaagaccacaaacaaatgtaaaggctatggctttgtagattttgacagcccttcagcagcacagaaagctgtaacagcactgaaggccagcggtgtacaggcacagatggcaaagcaacaggaacaggaccccacaaatttatacatctcaaacctcccactgtcaatggatgagcaggaactggaggggatgctgaagccctttggccaggttatctccacccgtatccttcgagataccagtgggaccagcagaggtgttggctttgcaaggatggagtccacagagaagtgtgaagccatcatcacccactttaatggaaaatatattaagacaccccctggagtaccagccccatccgatcccttgctttgcaaatttgctgatggcgggccaaagaaacgacagaaccaaggaaaatttgtgcaaaatggacgggcttggccaaggaatgcagacatgggcgtcatggccttgacctatgaccccaccacagctcttcagaatgggttttacccagccccctataacatcacccccaacaggatgcttgctcagtctgcactctccccatacctttcctctcctgtgtcttcgtatcagagagtgactcagacatctcctctacaagtacctaacccatcctggatgcaccaccattcatacctcatgcagccttcaggttcagttctgacaccagggatggaccatcccatttctctccagcctgcctccatgatgggaccccttacccagcaactgggccatctctccctcagcagcacaggcacgtatatgccgacggctgcagctatgcaaggagcttacatctcccagtacacccctgtgccttcttccagtgtttcagtcgaggagagcagcggccaacagaaccaagtggcagtggacgcaccctcagagcatggggtctattctttccagttcaacaagtaacagtgggattcccctccccatctttactgaatagaaatgaattcttggagatactcatgctcccagattccagagggttaaccaggaatggagaccatccgtcggccctgctaaggactaacacttagccatcgtttttcacaggcctgggcctggaaaaagaaatctctacgttcctgccctttactattgctgatggagcctgggggaaccatcactttttttgtgtgctacattcaaggagatcaaaaaaacttttcttcttttgcaaagaaagctttttgtttttaactgcaacgtacttttcccctaccttgaagagacatggtggtcgcagcttctcatctatatgaaaaagttttcgatgtattggaattatttgggaatgcttttaaaacaatttgtaattatttctttacaaaccaaaacagaacagaaaggtgtggtgctggaacatcgatgaaggagccctacttactgagcttagttatggacttttttgatgcatgtgtgtatgtgttttaaaaagtatgcaggctctaaaaatgttattttgtaaagctctcagctcatgcaccccatctcctcttcacccatattatgccttctttctcttgtccagattcttctttttctcttttctaaacagctgagcctgcctactttgcccttttacagcttttaattttatggatttttaaaaatgaaatttcatgtggaatttggggttggggggcaggctgggcaaggaacaaggcagaacactaagtaggccatggaagtggctgttctttcccccaccctgccacaccctgggagaaaaaactagactttggcttcagaaagcacagatgtgacccaggcttactaaagagacaactccacagccctgggaacacacccttgagccaaacttggttgaagactaggtcttccctggcaagttccggaagaatggacttactgacttttatcaactcttctcactgccaaggccaacagcatctgaggtatagctttttgggagtacctgctttcttgcctcctggaggatattttctgtcctgggcttcatggcccctctcttccctgttacacattgctgtgctcagagcctttgcagctgcgacctagttgaatccacataggctccttccacacggtggaagatctgctgcttcactcacagaccaggagttctcaatcagaggtggttttgtccctcaggcctttggcaacatctagagacagttttgattgccacgcctggaggtgggatgtgtgtgctactggcatctagtggctgctaaacatcctacactgcataggatagtccccactacccccagccaagaattatctgactccaggggtcaatattgccaagactgggaaacactgatatagacagtgttgtccctgcctcctgggttagggtaaattttcaccccaaccctggacaaacagtgccttttgacactcatgcaactgttggggaaggactggactgggatccttgaattctccccagactttgacttttgataactctgcatatagcaagagtgattcttgaaagagctgtggctccatgctgaatgcacacatgtactcagagggattcaggtgggcattgttctggtgtgtgctgtgcaatggtgggaaaggacaaagctctctaaactgtccagagcaacctgccctgccccggtgtgcttggaccctttgcccagggaaccaggacatcagaaataatgttccttctgtggaaggacaacggggagctagggtagcaaagagcaataaattccaactctttatgaggtcaggagtcctttaaaaaagcctatgtcttggtctttaactgtccccttctgcaagatgtgactctatacacatggagacagattgaagaaagacttcacccatcttctaggaaataaaatcctgctcttgtcttctcccagtcactcccttatgcactgaaaggagaatttgactcccttgcacttcaaggccaggtgcctctccactagacagtcagacaaaggcaaataatggaggatagagagacaggtgttcattaggctggccatagggagaggaagggggtgacagcaggggaaaagaaactgtagtatcagttgtcacaagtagagctcggcccagctttccctcccttcccagccaccctagaattgagagtcccagtgcccctagtgtcgactttctatgtacatcctaggggtgagggagtgcggggcaatgggtaggatataaagcgtaaaggacaaattgccgcagtcttctaattgatgcttccaaactcaggaagggcttatccagtgtaaaatagccccaagcccagcaaccttctagagggctctggctgggcagatagcttttgtttttgagtctccagccctcagtcaaggaaaatataccatagctgctttcttgtcagtggcctttgagagaaagagaaaacaaatctagaattctgttcatctgatagaccgggggagctttgctatggtaggaggtttaggaagggcctttcacgcatagaaaccattgttgatattgccactcccctctcctctgcctcacagaactcctgattctgtcttctttctctctctatatatatattttaaaatgtttaaatggctctaattttttgttttgaattttgaatttaccttttggagttcttctcatgtgaatctacttgttagattgtattaatgagtgtttctggtttgggcatgggaagtgatgggggcctgaagttattttgcagtggctaatggcactgaggaatttcttttttggtgcatttggtttacactcatttcctctcctaattgttagttcatttgtaacagtgggtgagtgtttggaggaaaggagggagaagaaaggagggatactgtttctcccatgaaatagtctaattggttgggttgatggcagaaggaaacataggggagccttccagctcacagccaagggttgggctcttaaacactatgcctagtgttttctgaatgctgtcttcatggagcccagctcttactctctttgtactttacatctcacccccactcattacagatgctcataacattcttaaaatattttagtacttggcatttttctgttttcagtcagctagaacacactagagtcctttcctcagatggcataatcctttataggctctgagcctgcctagccatctcctatcggtgttattactcctcatctcaggctctgagatgatactcagaccctaaactgattggactttttggaggagggtgccagtagagaggtcaggaagatgtggagatgatgatggagagagatgtttttattttattttattttttcagacagagtcttgctctgtcgcccaggctggagtgcaatggcacgatctcggctcactgcaacctccgcctcccaggttcaagcaattctcctgcctcagcctcccatgtagctgggattacaggcacccaccaccatgcccggctaatttttttatttttagtagagatggggtttcaccatgttggccaggctggtctcgaactcctgacctcaggtgatctgcccgccttagcctcccaaagtgctgggattacaggcgtgagccaccgcgcccggcctttattttattttttagagatggtcttgctgtgtcacccaggctggagtgcagtgatgcagtcgtagtctactacagtcttgaattcctgggcccaagggttcttcccacctaagcctcccaagtagctggaagtacaggcacatactaccaagcccagttcgttattttaagtttttgtagagacaggggtcttactatgttgcccagactggtcttgaactcctgtcaagtgagcctcccacctcagcctcccaaagtgctatgattacaggtgtgagcctccatgcttggatgagatgttgtttttaatgtttttggttttttggttttgttgttttgtttttttgagacagggtctcactctgtggcccaggctggagtgcagtggcaccataatggctcactgcagcctcgacctcccaaggctcaggtgatcctcttgcctcagccaccccttccccggccaccaagtagctgggactatgggcttgtgccaccatgcctggctaatttttttatttttagtagagatggggttttaccacgttggccaggctagtgtccaactcctgacctccaaacagctaatttttgtatttttaatagagacaggttttcgccatgttgcccagcctcgtctcgaactcctgggctcaaatgatccacccacctcggcctcccaaagtgctgggattataggcatgagccaccacacctggccttttcagtttttttatttttattttttctttgagacggagtctcgctctgtcgcccaggctggagtgcagtggcgtgatcttggctcactgaaacctccatctcctgggttcaagcagttctcctgcctcagcctcctgagtagctgggattacaggtgcctgccaccatgcctggctaatttttgtatttttagtagagacagggttttgccacattgcccaggctggtgttgaactcctgggctcaaatgatccacctgccttggcctcccaaagtgctgggattacaggcgtgagccactgcacccggccctttgtagtgtttttaactaaagaatttgtagagttgcccaggccaggaagcctggtggctctaaagggtaatagaccttgtcagtaacagataaggagtggtaagaggacattactcatattgaagatgaagaccagactttgctgcttcacaggccatgcgctgggttgggccacttcagctccactccattcgttttcctttcctaacttgacaatcagctcactcaccctcccttagtgcctccagtgcctactcctgtcactccaatgtcaacccattgggagttgaggcctgtcactccaatgtcaacccgtgggctgttactttgcgtcatatgatgctgtgagaggccttgctggaatgtcctaggaatccctagtagcagtggctattagtcttctagaaaagaactattgctgctgccttgtgcacatgccccaccttctgggcaagtggcagcattgcgctcatgaggggctttgcattcttagccaagggcaataaactgggtgggtgatctggcccaaacttgcccctaggctctgctagccctgaatcagcaggcttcagagacgagggtgggtgttataaaagccagtctgtaaagggtaaattccaaatcttgtgccttgttataccaatccttcctgattcccgtttaaaccaactactctatttctgtgctgcctacattttcaatcctcccacgcattagcaaattcctgaaatttcctcatttggtaggccttccataggagtcagctatggacttccataggagttggcagctaaaaccagactgtgagcttctgtctccgttctgatttttgctgcacctcccaggggacagtccccacatgattacaaaagccaggtgccctcatcacccgttacccctgacctgtccacttgttttgaataaaccttcattctccaagcagatccccaaacttccttgtccttgttacacgtctacctcacaacctcacaattcaacaacaggtaaatacctggattcactgatttctttactgtccttctctgagggttgggaaggtgggggctagaaaaggctcataatttttaaactcttgggaattaaacttgggaatttctattcctacagtgttttctctgggatttttagctcactgatcgccctagaatagtgtgaactctccagataggtcctgctgtgataggccaggggagtaggctgtgcagtgacggcttagggtaataagtaatggttggaggacaccagcataggagcagagtttagaacttaagaggacaagaaagctgctcagtggctggcgtatagctgtgaaggtaaccaaacaccaaagagggagtctgtcatttttataaggctggaagcgaatgttccttttctaccttaacatacagtttagggggttgcaccaagacaaagtttccaggctggagggtaatacatatccagcgcgagtgaagtccccactccaacatataccctttttgggtgggtaaacacctctttgcatgtggacagaaaatgtttatacttaaacagacatattttgcatatttttatctggagacttcttctagttttatactcttcccacatctatgccaatgccaccattctaaaacttacactccttttctacccctggtcttttccttgtccttccctacaacttggtagaggtccattttgtcttacttcacacttttttttttttaaataaaacacaaaagtctacgtcttggtgtcttatccgtgagtgggaagtggtaagctggtgatggtcccatatttgctatgacaggaacacagaggtggcagcttaggaagctggggccacatctcacaaggcaggacctggatgcactgaatccccctttgctccagcaactcagccagacatttaggcaggagcactaatgaccctttccatccacacagagggtatggaacaggagcccctgttgttcccttgcctgtggtctcttaagccagtcatacctatcccaacgccgtctccccctcaggtgtgtagaagggaagatgaatacacagagtcttttgaatctctatcaaatgtggttttttttattcaacaactgacaagcacttttctacagctgcacttgtggaacatcacatggcaaaaacaggagttttttcgctagactttttttttctttttaaccttattaaaaatgagattggtcctaaaaatatagaaagaaataaatttaaattcacaaaaaactgtacattatcaaaaagtcactaaaacaccacatttggttatataaaaagtcccttttgctgtaaaaggaacacagaaacttaaaaaaaaaaaaaaaaaa

SEQ ID NO: 1874 - DNA, 2529 bp, Homo Sapiens
  NM_002901
gacgtggctccgcggccccggcttcccccggcagctcagcgaccaatgggcgcgcgagcggggccgcccgcagcttcccagcccgaggcccaggcgcgcccctctgctccggctcggggcgggcactggcggagggactggccagtcccctcctccgcgccggccccaaccctgtcgctgccgccgcgctccgagtccccattcccgagctgccgctgttgtcgctcgctcagcgtctccctctcggccgccctctcctcgggacgatggcgcgcggtggccgcggccgccgcctggggttagccctggggctgctgctggcgctggtgctggcgccgcgggttctgcgggccaagcccacggtgcgcaaagagcgcgtggtgcggcccgactcggagctgggcgagcggccccctgaggacaaccagagcttccagtacgaccacgaggccttcctgggcaaggaggactccaagaccttcgaccagctcaccccggacgagagcaaggagaggctagggaagattgttgatcgaatcgacaatgatggggatggctttgtcactactgaggagctgaaaacctggatcaaacgggtgcagaaaagatacatctttgataatgtcgccaaagtctggaaggattatgatagggacaaggatgataaaatttcctgggaagaatacaaacaagccacctatggttactacctaggaaaccccgcagagtttcatgattcttcagatcatcacacctttaaaaagatgctgccacgtgatgagagaagattcaaagctgcagacctcaatggtgacctgacagctactcgggaggagttcactgcctttctgcatcctgaagagtttgaacatatgaaggaaattgtggttttggaaaccctggaggacatcgacaagaacggggatgggtttgtggatcaggatgagtatattgcggatatgttttcccatgaggagaatggccctgagccagactgggttttatcagaacgggagcagtttaacgaattccgggatctgaacaaggacgggaagttagacaaagatgagattcgccactggatcctccctcaagattatgatcatgcacaggctgaggccaggcatctggtatatgaatcagacaaaaacaaggatgagaagctaactaaagaggaaatattggagaactggaacatgtttgtcggaagccaagctaccaattacggggaagatctcacaaaaaatcatgatgagctttgatagacactcaccagaatatggcagactgtcataggcattctgttattgtcttggattgttgctacaattgtctaatttacagcagttgtgatcccacaaaaagcaagtttatacctcagattggggtataaaaattgtttttcgctcagtatttactggaaaatggacatcactagtctttcagtaagatttctctcaaaacacgtgaaaaccttggtaaattgcaattctttctggggatatattggtacaacatgacttaaaacttttttttttctattaaaacttaaaggggaacaaaacttgaaaaagccctgttcttcagaaggtgagtgggttgagggaggcagtaatatgaagtgactgctgtgtattttaactaccagattttttatatttgccactgttaaatagttggaaaggggaaattctgattaagcgaaagtggtatcatcctaggtaagcttatttcagaacaagtctaatatttcagattctttcttttcgactttatactctgagttattacttactgtaagtggtgtatatgaaacctccatgcattttccagtatggatctgctaatatgcacagtaaatccatgtctttgtttgtttttctattaaaaagcaatcaagaaagataatgtgaaaaagaaaggaatttagaggtagggaaaagatgaatgtcagacatttgaagaactatagtaaaatgataaacactaaatatacttgagaaaactttcttaatatgccaatgaggtaggcctgatctttgaaatagtgaataggaatacaatgcatttcctcagtgatcactgattagaatgagttggtgggatccttgggaagccaaacggagcggagttctggatcatgtcccatccagtccagtgaatccacgacccgcagacctgtccccccgcaacagcttataccatggaatgaggacaaggtgatactctgagctgtggactgaactggcagacacaacctgtacagattgaaatttcaccttgtaaggaggaagtgaatgaaataaaggatccccctaaggattttctactgtgtcctgtggtgtttgacttcacagatgctatttgtgacattattcatatagcataaaacagtggggttggatcccatgaataacattataaaggttctggggttttttttcatccaattactagaatgttcagaatagactcatatttactaatttaataaatgtatgtacttaatgcctttaaaaaaaaaaaaaa

SEQ ID NO: 1875 - DNA, 2213 bp, Homo Sapiens
  NM_002902
ataggcctcctcctggcgcgcctccgcaccgcattggtggaccggcccccagcccgtccatgggcgttgtggccgccaccgcaggttccgcctcccgttccctccgccctcaacgtacgtcgcaccgcctctctgtagccgcccgcggagcatcgcagccggcccgggcccccgccagcctccctcctcgcgtccctcggtgtcctccgcgggccggcgcgatgcggctgggcccgaggaccgcggcgttggggctgctgctgctgtgcgccgccgcggccggcgccggcaaggccgaggagctgcactacccgctgggcgagcgccgcagcgactacgaccgcgaggcgctgctgggcgtccaggaagatgtggatgaatatgttaaactcggccacgaagagcagcaaaaaagactgcaggcgatcataaagaaaatcgacttggactcagatggctttctcactgaaagtgaactcagttcatggattcagatgtcttttaagcattatgctatgcaagaagcaaaacaacagtttgttgaatatgataaaaacagtgatgatactgtgacttgggatgaatataacattcagatgtatgatcgtgtgattgactttgatgagaacactgctctggatgatgcagaagaggagtcctttaggaagcttcacttaaaggacaagaagcgatttgaaaaagctaaccaggattcaggtcccggtttgagtcttgaagaatttattgcttttgagcatcctgaagaagttgattatatgacggaatttgtcattcaagaagctttagaagaacatgacaaaaatggtgatggatttgttagtttggaagaatttcttggtgattacaggtgggatccaactgcaaatgaagatccagaatggatacttgttgagaaagacagattcgtgaatgattatgacaaagataacgatggcaggcttgatccccaagagctgttaccttgggtagtacctaataatcagggcattgcacaagaggaggcgcttcatctaattgatgaaatggatttgaatggtgacaaaaagctctctgaagaagagattctggaaaacccggacttgtttctcaccagtgaagccacagattatggcagacagctccatgatgactatttctatcatgatgagctttaatctctgagcctgtctcagtagagtactggctccttttataatttgttaccagctttacttttgtgataaaatattgatgttgtattttacactcttaagtcttaaccacagtcagaattatcttaatgtagattataattttggtcttttaggaaaaaaaaacaaaaatctgatatttatttcaaaatgtattgaagcaacaaaatattaatattgtgccatatgacaacaaagtctttcctaaatactccatctgtttagtactgtattgtggaatatttgagttctatttccatacttgaaaacatggaggattttagagatgcctgaacaatattatttaagtagtatgtgaccgagctataaatttttgtttttgttctaagtagatttaatttgggaactgacaggacaatgtttttaggtttagcattttgtttaaaaacctttaaagaaacctttagaaggacttagacctcacatattaatgttgagaagttctgcttaattttaaaatggtttctataaagggttttattgtatgaaatagaactttatatttttgcatatgtatagatagtaattatatttaatgtataactatagcattatggtgagtggaatttgacattgtccaaacctttttcatttttgagtgattaaaaatgaaatgtcctttgtatatgtttgtttgcttttctttaactttcagataaatattgaatttagcataggttttgtggtattgtacattatcttgcctcatccattcctttatgtggatagttcccaaaactgtcaaattattcttgctgcattttcttattttttttttaaataagagaatcatgttataatataattgaatgtgcacctgacacattttaataattggtgttgtagcaaatgtggttttgctctttggggctataaataatcttgagtaacgcaggttggaattaccaatagagctggtcagttatcaacagtagagctcagtatcaattttactgaaattaaaatcatacttgataagca

SEQ ID NO: 1876 - DNA, 1217 bp, Homo Sapiens
  NM_002903
gccctccacaaagctcctgggcccctcctcccttcaaggattgcgaagaactggtcgcaaatcctcctaagccaccagcatctcggtcttcagctcacaccagccttgagcccagcctgcggccaggggaccacgcacgtcccacccacccagcgactccccagccgctgcccactcttcctcactcatggggaacagcaaaagtggggccctgtccaaggagatcctggaggagctgcagctgaacaccaagttctcggaggaggagctgtgctcctggtaccagtccttcctgaaggactgtcccaccggccgcatcacccagcagcagttccagagcatctacgccaagttcttccccgacaccgaccccaaggcctacgcccagcatgtgttccgcagcttcgattccaacctcgacggcaccctggacttcaaggagtacgtcatcgccctgcacatgaccaccgcgggcaagaccaaccagaagctggagtgggccttctccctctacgacgtggacggtaacgggaccatcagcaagaatgaagtgctggagatcgtcatggctattttcaaaatgatcactcccgaggacgtgaagctccttccagacgatgaaaacacgccggaaaagcgagccgagaagatctggaagtactttggaaagaatgatgatgataaacttacagagaaagaattcattgaggggacactggccaataaggaaattctgcgactgatccagtttgagcctcaaaaagtgaaggaaaagatgaagaacgcctgatgccaactgttcagctgtcctccctccacctaccactcacatgacacccgtgagcgcctgtgcacacacacacacatgcacacacacgcgcgcgcacacacacacacacacatccaccccagggccaagagaaaggcctgcacacaagcccacagcacagctccctgccaaactgaagcatctgtagtgacccactggttccttcttcctgggtcttcagcattccctcccatcatgcccggtcccacccctccctctgtccaccagcccatggccctgtgctaatcccaggattaggccataggagtcctaagtgtcaccccgctgtaagctcctttgtggagtgctgggtaagcagtttccaataaacgcaagctgagctgggaaaaaaaaaaaaaaaaaaaaaaaaaaaaaaaaaaaaaaaaaa

SEQ ID NO: 1877 - DNA, 1354 bp, Homo Sapiens
  NM_002905
aatacgcctggcatccaagtccacccactccggactttggccttagcagtagttagtgtgggaggctgggaagactgggagcagtctcttaaacaaaagcaaaagaataagcttcgggcgctgtagtacctgccagctttcgccacaggaggctgccacctgtaggtcacttgggctccagctatgtggctgcctcttctgctgggtgccttactctgggcagtgctgtggttgctcagggaccggcagagcctgcccgccagcaatgcctttgtcttcatcaccggctgtgactcaggctttgggcgccttctggcactgcagctggaccagagaggcttccgagtcctggccagctgcctgaccccctccggggccgaggacctgcagcgggtggcctcctcccgcctccacaccaccctgttggatatcactgatccccagagcgtccagcaggcagccaagtgggtggagatgcacgttaaggaagcagggctttttggtctggtgaataatgctggtgtggctggtatcatcggacccacaccatggctgacccgggacgatttccagcgggtgctgaatgtgaacacaatgggtcccatcggggtcacccttgccctgctgcctctgctgcagcaagcccggggccgggtgatcaacatcaccagcgtcctgggtcgcctggcagccaatggtgggggctactgtgtctccaaatttggcctggaggccttctctgacagcctgaggcgggatgtagctcattttgggatacgagtctccatcgtggagcctggcttcttccgaacccctgtgaccaacctggagagtctggagaaaaccctgcaggcctgctgggcacggctgcctcctgccacacaggcccactatgggggggccttcctcaccaagtacctgaaaatgcaacagcgcatcatgaacctgatctgtgacccggacctaaccaaggtgagccgatgcctggagcatgccctgactgctcgacacccccgaacccgctacagcccaggttgggatgccaagctgctctggctgcctgcctcctacctgccagccagcctggtggatgctgtgctcacctgggtccttcccaagcctgcccaagcagtctactgaatccagccttccagcaagagattgtttttcaaggacaaggactttgatttatttctgcccccaccctggtactgcctggtgcctgccacaaaataagcactaacaaaagtgtattgtttaaaaaataaaaagaaggtgggcagaaatgtgcccagtggaaggctgaccccatttaagtgccaactactccaaaccgaaaaaaaaaaaaaaaaaa

SEQ ID NO: 1878 - DNA, 4925 bp, Homo Sapiens
  NM_002913
accgcgcgccactgtcttcgccttcttgcacttcgcgggagaagttgttggcgcgaatggatcctgagcctcgataacagattcctcaaccggcccacccgccagccagccagcgccttcatcctggggctgcgatggacattcggaaattctttggagtaataccaagtggaaagaaacttgtaagtgaaacagtaaagaagaatgagaaaacaaagtctgatgaagaaactttaaaagcaaagaaaggaataaaggaaatcaaggtaaatagctcccgtaaagaggatgacttcaaacaaaagcaaccaagcaagaaaaagaggatcatctatgattcagattcagagtcagaggagacgttgcaggtaaaaaatgccaaaaagccaccagaaaaactgccagtatcttctaaacctggtaaaatttcacggcaggatcctgttacatacatttcagaaacagatgaagaagatgactttatgtgtaagaaggcggcctctaaatcaaaagagaatggaagatctacaaatagtcatcttggaacatcaaacatgaaaaagaatgaagaaaacactaagaccaagaataagcctttatcaccaataaaacttacacccacatcagtacttgattattttggaactggaagtgtccaaagatctaataagaagatggtggcaagcaaaagaaaagagctttcacaaaatacagatgagtctggattaaatgatgaagccatcgccaagcaattacagcttgatgaagatgcggagctggagaggcagttgcatgaagatgaagagtttgccagaacattagccatgttggatgaagaacccaagaccaaaaaggctcgaaaggacacagaagcgggagaaacgttttcatctgtccaagccaatttaagtaaagcagaaaaacataaatatcctcataaagtaaaaacagcacaagtttcagatgaaagaaagagctacagtcctaggaagcaaagtaaatatgaaagttcaaaagaatctcagcaacattccaagtcatcagctgacaaaataggagaagtctcttctcccaaggccagttctaagctggcaattatgaaaagaaaagaagagagctcttataaagaaatagagcctgtggcctcaaaaagaaaagaaaatgccattaaattgaaaggagagacaaaaactcctaagaaaaccaaaagttctccagctaaaaaagagtctgtaagtcctgaagattctgaaaagaaacgcactaattatcaagcttatcgaagctacttaaatcgagaaggtcccaaggctctgggctccaaagaaataccaaagggagctgaaaattgcttggaaggccttatatttgtaatcacaggcgtgctggagtctattgaacgagatgaggccaagtctctaattgaacgttatgggggaaaagtaacaggaaatgtcagcaagaaaacaaattatcttgtcatgggtcgtgatagtggacagtccaagagtgataaggccgcagccttggggacaaaaattattgatgaagatggcctgttgaatctgattcggactatgccaggcaagaaatccaagtatgaaatagcagttgaaactgagatgaagaaagagtccaaactggagagaacaccccaaaaaaatgtccaaggaaaaagaaaaattagtccatctaaaaaggaatcagaatctaaaaagagcaggccgacttccaaaagggacagtttggcaaagacaataaaaaaggaaacagatgtgttttggaaaagcctggatttcaaggagcaggtggctgaggagacaagtggtgacagcaaggctaggaatttggctgatgacagcagtgaaaacaaagtggaaaatttgctctgggtggataaatataagccaacctcgctcaagaccataattggacagcaaggtgaccagagctgtgccaacaaactcctacgctggctccgaaactggcaaaagagttcttccgaagataaaaaacacgcaaagtttggtaaattttccggcaaagatgatggctctagttttaaagcagcgttgctgtcaggccctcctggtgttggcaaaaccaccacagcttccctggtgtgtcaggagttgggatacagctacgtggaactgaatgcaagtgacacccggagtaagagcagtttgaaggcgattgttgctgagtcactgaacaataccagcatcaaaggcttttattcaaatggagcagcctcttcagtaagcacgaaacatgctctcatcatggatgaagtagatggcatggcaggcaatgaggataggggaggaattcaggaattaattggcctgataaaacatactaaaattcccattatttgtatgtgcaatgatagaaatcatcccaagattcgctctctggttcattattgttttgatcttcgttttcaaagacctcgggttgaacagattaagggtgctatgatgtctattgcatttaaagaaggtttaaagattccccctccagctatgaatgaaataattttgggagccaatcaagatatcagacaggttttacataatctgagtatgtggtgtgcacgaagtaaagcattaacctatgaccaggccaaagctgattctcacagagccaaaaaggatatcaaaatgggcccatttgatgttgcccggaaagtgtttgcagctggagaggagactgctcacatgtcacttgtggacaagtcagatctcttttttcatgattattcaatagcacccctcttcgtccaggaaaattacatacacgtgaagcctgtagcagcagggggtgacatgaaaaagcacctgatgcttttaagcagagcagcagacagcatatgcgatggtgacctagtggacagccagatccggagtaagcaaaactggagtcttctgcctgcgcaggccatttatgccagtgttcttcctggagagttgatgagggggtacatgacccagtttcccaccttcccaagctggctggggaagcactcgtctacaggcaaacatgatcgtattgttcaggacctggccttgcatatgagtctcagaacttactccagcaaaaggactgtaaacatggattatctgtcgcttctaagggatgcacttgtacagcccttgacctcacaaggagtagacggagtacaggatgttgttgcacttatggacacatattatttgatgaaagaagactttgagaatatcatggaaatcagcagctggggtggcaaacctagtcccttttcaaagctggatcccaaggtgaaagcagccttcacaagagcttacaataaggaagcccaccttactccatactcacttcaagctataaaggcatctagacacagcacaagcccatccctggattcggaatacaatgaagaattaaatgaagatgactctcaatctgatgagaaagaccaagatgctatagaaactgatgccatgatcaagaaaaagacaaaatcttcaaagccttcaaaaccagaaaaagataaggagcccagaaaaggaaaaggaaaaagttcgaagaaatgaaaccatttttcactagcgacagccactttttactctccctcctgaccagtccagctggtctagagaaagccttgttttttcccagagcaaccatgttttagcataatgggatgacctggtgtcccattataaataaagggtggtatggctagaagggtatgagcagtaggcttatgtacacctcttatagaggttgataggactgcttgggtcctccactgtcctctgtcaatctagttagacgtgcttctgaatgactgtagaattggaactagaaactacacctgggctttggagtcagattttagttaacaataatgagcctgggagcagtagtactaaggcgtcttttgtaggcttaagaatttatcctaatggcctttataggaccaatgctgattttttttaaaggcagttcctattatgtggtgaaattttgtaaataaatgattatacaaaacagtcaccacctagaactgggtattctttgtacattgtcagatatctttcaaagtataaattaggaataaaaatgttccacatgatatgtgtacaaattctttttaagattgtcatcttgtacagcaaaatattatgttggtatattacttccttattaatttgcaaatgattggattaaaaaagctcactgtattccttactaacctgttgtgtgaaacataacattggcagtcgaggagtcagaactcggattcccagcctcactccctctgtgtgtgttgaccacgtctctgctgtgaataggatttcatgcagtggtctgttatggggctttgcagcgtggggggctgcagaagattctcagacattcttatccttctggagtctcaacccatcaggttcagaccagtaggaaccaggctgggtcaggctcttaatttcactatggtgggggacaaaatgaacactggcttttgttcactttgcccctgagagatctagtcctgtcctgtgatggcttccacaaaccctgttggaagtttgggttattcctataactgtatgtgttgagtggccgtgaggctatggacctagcctggaatttagatgtctagctattttttaatcttgttggtaaatgctcagaggtctgtgctacctctgtgaggtatatactaaaatgaatgtaaaataaggatcgtattccctgctttaaggaactggtagtcttgtttgggtgatgagacaaagttcttgagacatttaaactgtatttaccagtgtgaaaaatgtcatttatggagattaattcattatggaaataaaacattgcctaagcccttgaaaaaaaaaaaaaaaaaaaaaaaaaaaaaaaaaaaaaaaaaa

SEQ ID NO: 1879 - DNA, 4392 bp, Homo Sapiens
  NM_002918
acagttgccccggtgagggaaacggaggcgccatagccacggtagtcgtggcgaccaagcaacccggcaacgcgagtcaacaacaacaaccgcccggccgacccccacccccaccccccaggcccggcccggggaccccagcacgtcccgtccccttcccaacatcgactccgagacctccgaaaagcgtttccgcagacagaagtggggagaagcggaggaattaaaaaaaaaaaaaagccttatttattatcattttccccaccgttggcatggcaacacaggcgtatactgagctacaggcagccccgccaccatcccagccgccacaggccccgccacaagcccagccccagccgccaccgccaccacccccagcggcaccccagcccccgcagccacccaccgctgctgccacccctcagccccaatatgtcaccgagctgcagagcccccagccccaggcacagccaccgggtggccagaagcagtacgtgacggagctcccggctgtacccgcaccctcgcagccaaccggtgcacccaccccttcgcctgcaccccagcagtacatcgtggtcactgtctctgaaggtgccatgcgggccagcgagacagtgtcggaggccagccccggctccaccgccagccagaccggcgttcctactcaggtggttcagcaggtgcagggcacccagcagcggctgctggtccagacgagcgtgcaggccaagccaggccacgtgtcgcccctccagctgaccaacatccaagtgccccagcaggctcttcccacgcagcgtctggtggtgcagagcgcagccccaggcagcaaaggtggccaggtctccctgacggtccatggtacccagcaggtgcactcgcccccagagcagtcgccggtgcaggccaacagctcttccagcaagacagccggggcccccacgggcacagtgccacagcagctgcaggtccacggcgtccagcagagtgtccccgtcacccaagagagatctgtggtccaggccactccacaagcgcccaaacccggcccggtgcagccgctgaccgtgcagggcctccagccagtccacgtggctcaagaggtgcagcagctccagcaggtgcccgtcccacacgtgtactccagccaggtgcagtatgtggagggcggcgatgccagctacacggccagtgccatccgttccagcacctactcctatcccgagacgccgctgtacacgcagacggcaagcaccagctactacgaggccgcaggcacggccacccaggtcagcacccccgccacctcccaggcggtggccagcagtggctccatgcccatgtacgtgtccggcagccaggtcgtcgccagctccaccagcactggggctggggccagcaacagcagcggaggtggtggcagtggtggtggcggcggcggcgggggaggcggtggcgggggtggcagtggcagcaccggaggcggcggcagcggagcaggcacctacgtgatccaaggcggctacatgctgggcagtgccagccagtcttactctcacaccacccgtgcctcgccagccacggtccagtggctcctggacaactatgagacggctgagggcgtgagtctgccacggagcaccctctactgccactacttactgcactgccaggagcagaagctggagcccgtcaacgccgcctccttcggcaagctcatccgctccgtcttcatgggcctgcgaacccgccgtctgggcaccaggggcaactccaagtaccactactatggcctgcgcatcaaggccagctcacccctgctgcggctgatggaggaccagcagcacatggccatgcggggccagcccttctcgcagaagcagaggctcaagcccatccagaagatggaaggcatgaccaacggcgtggcggtggggcagcagccgagcacggggctgtcggacatcagcgcccaggtgcagcagtaccagcaatttttggatgcctctcggagcctccctgacttcacagagctcgacctccagggcaaggtgctgcctgagggcgtcgggcccggggacatcaaagccttccaggtcctgtaccgggaacactgtgaggccattgtcgacgtcatggtgaacctgcagttcaccctggtggagacgctgtggaagaccttctggaggtacaacctcagccagcccagtgaggcgccaccgctggctgtacatgacgaggccgagaagcgactgcccaaagccatcctggtgctcctctccaagttcgagcccgtgctccaatggaccaagcactgtgacaacgtgctgtaccagggcctggtggaaatcctcattcccgacgtgctgcggcccatccccagtgccttgacccaagcgatccggaactttgccaagagcctggagagctggctcacccacgccatggtcaacatccccgaggagatgctgcgggtgaaggtggccgcggctggcgccttcgcgcagacactgcggcgctacacgtcgctcaaccacctggcgcaggcggcgcgcgctgtgctgcagaacaccgcacagatcaaccagatgctgagcgacctcaaccgcgtggacttcgccaacgtgcaggagcaggcctcgtgggtgtgccgctgcgaggaccgcgtggtgcagcggctggagcaggacttcaaggtgacgctgcagcagcagaactcgctggagcagtgggcggcctggctggacggcgtggtgagccaggtgctcaagccctaccagggcagcgccggcttccccaaggccgccaagctcttcctcctcaagtggtccttctacagctccatggtgatccgggacctgaccctgcgcagcgccgccagcttcggttccttccacctcatccggctgctctacgacgagtacatgtactacctgatcgagcaccgcgtagcccaggccaagggcgagacccccatcgccgtcatgggcgagttcgccaatctggccacctccctgaaccccctggaccccgacaaagacgaggaggaagaagaggaggaggagagcgaggacgagctgccgcaggacatctcactggcggctggcggcgagtcacccgcgctgggcccggagaccctggagccgccggccaagctggcgcggactgacgcgcgcggcctcttcgtgcaggcgctgccctccagctaagcccttggcctccccgccccacccgcccccgccacccctccacgccagggtccctcaaagcttctgtggcttcgtggtcactgctccagcctcagccagggcagggagggggactccgagacagggaagaccggggccctcctcccttatggggccggcacaatcagtgggctgggcggagccgcagctgcaaactctgacacaaaagacgtgccttaaggaacccgccgcgtgcccaggtgccccgcggggcatccagctcggccccttggccgcccccctcccaggccccagcgtcttctccccagccccgtcctcccaccaccccagggggcaggcaggcaggccccctcccgtgcgaaactgttaacttattcagctcgctggctttgcacagcctgtcctgggcccagccctgagccccgggccggcgcaggtgggcgtcacctggggactccccactgtcagcagcagccccgggacaccctacccccagcaaccccactgcttccccttcttggtattaagtgcaattaaagccgtgggtgtcgcatcttctccagcgctgggccctcccttgcccccaagctcaagaagggggcactgcccggcccggctgtgaggagggcggcagggggcacggcctccagcttccaaagagcagcgagccgcggagccggggagtgcccacagaccccagcccccgcgcccccgccctccgccgctggtttgtaatggaaccttttctgtgcccctatcttcccggagaccacgcttctcctccgtgccgtgcgacccccaccccatgactattgtgcgattcgtgagcgccgcccgagcggagttggtaacttgttgggtttttttccaaccatcatggccttatctgttccagttttctcagtgttttcagcctgtgagatagatgtttatggcaagaaaaaggaaaaaaaaatggaaatctgacctattgtataaaaatcactattttgtgtgctccgcgtgctatagcttttggggcggccctgcccagtccccgtgcccacggggctccctctcccggtggtgaaagtgtccacacgtgtggtagtctagtgtgccgagctgttttctacctttttgtagtctttcttaaaacaataaattccgctgtgatatttgcctaaaaaaaaaaaaaaaa

SEQ ID NO: 1880 - DNA, 6240 bp, Homo Sapiens
  NM_002926
atttatattcattttttactcttttccatcaaaacataattttactaagtacgcatgttctgtgtccgtgttttgtcatcactgaagccacttttggagtcacctagtaatagcctttccactctatctagttctgtagcttttatgtgtgtaaattacttcaaatctgtttatgatcctattgctggaaactttatcccaagacacaaaaatcttttctattagaagttattaactttaaaacaattatttattttattttattttattttttgagacagagtctcgctttgtcacccaggctggagtgcagtggcacgatctcggctcactgcaagctccacctcccgagttcatgccattctcctgcctcagcctcccgagtagctgggactacgggcgtccgccaccatgcccagctaattttttttgtatttttggtagagacaaggtttcaccgtgttagccaggatggtcttgatctcctgacctcgtggtccacctgcctcggcctcccaaagcgctgggattataggcgtgagccaccgcacctggcctaaaacaattatttctttaaaaaaacataccctctattctattttgtgtcttcacaacacaatcacttactgtattgctttttaaagtgatctttaaagagtcttgcagaagagactacacagcaggcccgagaccatcctgagaggcctgtgtgcaaggctggccccccgctggtgtcaggacggtgcccaccaccctcaatgaagaggggctccctgtgcttagctgcttgtgtggggaacaagggcactgtttgaagaagcaaacatggtagcatcaagcattccttgaaatatggctccaagggaacaatgagacgtgctcttggtcttggaagctcatcagaatgtttagagctggggaggcctccaaacgcccattgcctgggccgtcgcccccaagggtgcggagtgtggaggttgcccgggggagggccggctacggattcacgctttcgggacaggcaccctgtgtgctcagctgcgtcatgagagggagccctgcggatttcgtgggcctccgagctggagaccagatacttgctgtcaatgaaatcaacgtgaaaaaagcatctcatgaagatgtagtgaaattaattgggaagtgctctggtgtccttcacatggtgattgctgaaggcgtcggccgcttcgaatcctgttccagtgatgaagaagggggactctatgaaggaaaaggctggctgaagcccaagctggattctaaagcactaggtataaacagagcagagcgagtcgtggaggaaatgcagtctggtggaattttcaatatgatttttgaaaacccgagcctttgtgcgagcaattcagagcccttgaaattgaaacaaagatccctttcagagtcggccgcaactcgatttgatgttggacatgaaagtataaataatccaaatcccaacatgctttctaaggaggaaatatcaaaagttattcatgatgattcggttttcagcattggactagaaagtcatgacgattttgcattggatgcaagtattttaaacgtggcgatgatcgtgggctacttaggctccattgagcttccttccacgagctccaacctggagtccgacagcttgcaagccatccgcggctgcatgcggcgcctgcgggcagagcagaaaatccactcgctggtgaccatgaagatcatgcacgactgtgtgcagctgagcactgacaaggctggagtcgtggccgagtacccggccgagaagctggccttcagcgccgtgtgcccggacgaccggcgatttttcgggttggttaccatgcagacgaatgacgacgggagcctggcccaggaggaggagggcgccctgcggacttcctgccacgtgttcatggtggacccagacttgtttaatcacaagatccaccaaggcattgctcggcggtttgggtttgagtgcacggccgacccagacaccaatggctgtctggaattcccggcgtcctccctccccgtcctgcagttcatctctgtcctgtaccgagacatgggtgagctgattgagggcatgcgggcccgcgcctttctggacggggacgccgatgcccaccagaacaacagcaccagcagcaacagtgacagcggcattgggaacttccaccaggaggagaagagcaaccgggtccttgtggtggacctgggtgggagctcgagcagacacggccccggaggcagcgcgtgggacggtgtgggtgggaggggtgcccagccctggggtgctccctggactgggcccttctgtccggaccccgaagggagccccccatttgaggccgctcatcagactgacaggttctgggacctaaacaagcacctagggccagcctctcctgtggaggtgcccccagcttccttgaggagctcagtccccccttccaagaggggcaccgtgggtgctggctgtggtttcaaccagcgctggctcccggtccacgtgctccgggagtggcagtgcggacacaccagcgaccaggactcttacacagattccaccgatggctggtccagcatcaactgcggcacactgccccctcctatgagcaagatccccgcagaccgctacagggtggagggcagcttcgcgcagcccccgctgaatgccccgaagagggagtggtccaggaaggcctttggaatgcaaagcatttttggtccccatcgaaatgttcgaaagactaaggaagataaaaagggctcaaaatttgggcggggaactggactcactcagccttctcaacgcacgtctgctcggagatcatttgggagatccaagagattcagtatcactcgctcccttgatgatcttgagtctgcaactgtgtctgatggcgagttgacgggcgccgacctgaaggactgcgtcagcaacaacagcctgagcagcaatgccagcctccccagcgtgcagagctgccggcgcctgcgtgagaggagggtcgccagctgggccgtgtcctttgagcgcctgctgcaggaccccgtcggtgtccgctacttctctgattttctaaggaaagaattcagtgaagaaaacattttattctggcaggcctgtgaatattttaatcatgttcctgcacatgacaaaaaggagctttcctacagggcccgggagattttcagtaagtttctctgcagcaaagccaccaccccggtcaacatcgacagccaggcccagctagcagacgacgtcctccgcgcacctcacccagacatgttcaaggagcagcagctgcagatcttcaatctcatgaagtttgatagctacactcgctttctgaagtccccgctgtaccaggaatgcatcctggcggaagtggagggccgtgcactcccggactcgcagcaggtccccagcagcccggcttccaagcacagcctcggttcagaccactccagtgtgtccacgccaaaaaagttaagtggaaaatcaaaatccggccgatccctgaatgaagagctgggggatgaggacagcgagaagaagcggaaaggcgcgtttttctcgtggtcgcggaccaggagcaccgggaggtcccagaaaaagagggagcacggggaccacgcagacgacgccctgcatgccaatggaggcctgtgtcgccgagagtcgcagggctctgtgtcctctgcggggagcctggacctgtcggaggcctgcaggactttggcacccgagaaggacaaggccaccaagcactgctgcattcatctcccggatgggacatcctgcgtggtggctgtcaaggcgggcttctccatcaaagacatcctgtccggactctgtgagcggcatggcatcaacggggcggccgcggacctcttcctggtgggcggggacaagcctctggtgctgcaccaagacagtagcatcttggagtcaagggacctgcgcctagaaaagcgcaccttgtttcggctggatcttgttccgattaaccggtcagtgggactcaaggccaagcccaccaagcccgtcacggaggtgctgcggcccgtggtggccagatacggcctggacctcagtggcctgctggtgaggctgagtggagagaaggagcccctggaccttggcgcccctatatcgagtctggacggacagcgggttgtcttggaggagaaggatccttccagaggaaaggcatccgcagataaacagaaaggtgtgccagtgaaacagaacacagctgtaaattccagctccagaaaccactcggctacgggagaggaaagaacactaggcaagtctaattctattaaaataaaaggagaaaatggaaaaaatgctagggatccccggctttcaaagagagaagaatctattgcaaagattgggaaaaaaaaatatcagaaaattaatttggacgaagcagaggagttttttgagcttatttccaaagctcagagcaacagagcagatgaccaacgtgggctgctaaggaaggaagacctggtgttgccagagttcctccgtttacctcctggttccacagaactcaccctccccactccagctgctgtggccaagggctttagcaagagaagcgccacaggcaacggccgggagagcgcctcccagcctggcgagcagtgggagccagtccaggagagcagcgacagcccgtccaccagcccgggctcagcctccagcccccctggacctcctgggacgaccccccccgggcagaagtctcccagcgggcccttctgcactccccagtcccccgtctccctcgcgcaggagggcaccgcccagatctggaagaggcagtctcaggaagtggaggccgggggcatccagacggtggaggatgagcacgtggccgagctgaccctgatgggggagggggacatcagcagccccaacagcaccttgctgccgccgccctccaccccccaggaagtgccaggaccttccagaccaggtacctccaggttctgatccctccaccttggccccgtaagcgtggtctgctcagcttccagtcagaaaggacagtgggcccccggctgccactgtttgctggtggtctccgtgaccccctcctcacctgctggttgggggcttccttggccctcttggaaaggaggggctcgtgtggccccaggccagtgtctgtcaggatggtccccccgaggcgctctgggcaggcatcctggtgtcctgagaggctcttgcaggaatgatacgtggcagtgcctgcagcgaggtctgggaacaccctgggtgaggcctgggggtttccgaaaatggaggcattcctttccaaatctggacagcgatcgtttttagtgtttctgtctcaagactggaaaacaatagcatttgtcttgagtgaggaagtgaagcccgctgtgttcatagcaggagagggctcccagacacaggcccgtcctcggaagagccttgagagtgcagctcggacccaccggcggcccccgtagcaggtggtgtgggtgctcgggagtggaggtgacgtcagcagcgctctctgaccgcgggtgtcacgggcatttctcaaaggaagcaggggattcagtgagtgtgaaggtgaacaggatggcctggcagcagggatgtttccgtgagccacaaataccagaaactgaggcgaggctcccagcagccggtagggaaaggtgtttccaggggtccgagggccgtggcctgcgtggccatcccctggagagaggagccgctcagggtgcgcgtcatggagtgtgctcaggggtgcgtggacacctctgctgtggtttgctgctgggggcgatgggagcgcctctccgtcctgtgccctggtccaggatgctgacagcagtgagaggcctgccgtgaggtttggtcttgtcagacctgtagcctggacctcgccgggggaccagggagtgcacgtctgtagatctgtacatatctgggcctttggaggccacgtgtggcatgggaggggctacctggtccctttcacagccaggacacgcctggatgagaaagcctgaggtgcctggcatgcccaccggtgccactctgcagcctccacccctggcctgagtccccctccatccgtcttggtggacacctgtgtggctctcacctgcgttttgagtctgttcttccaggagtaataaattctggacatcatcactgga

SEQ ID NO: 1881 - DNA, 1744 bp, Homo Sapiens
  NM_002931
cagcgcccgggccatggcggcggcggtggcgggagctgctgtctgagcagcggttgcggaccgagcgaacttggcccaggagcccgggcctagggagaggcgcggcggcggcgggagcgcgaacggctggagctggccttcttcgccttctcctcggctgtggagccctggtggggggtctgcgcccggtcaccatgacgacgccggcgaatgcccagaatgccagcaaaacgtgggaactgagtctgtatgagctgcaccggaccccgcaggaagccataatggatggcacagagattgctgtttcccctcggtcactgcattcagaactcatgtgccctatctgcctggacatgctgaagaatacgatgaccaccaaggagtgcctccacagattctgctctgactgcattgtcacagccctacggagcgggaacaaggagtgtcctacctgccgaaagaagctggtgtccaagcgatccctacggccagaccccaactttgatgccctgatctctaagatctatcctagccgggaggaatacgaggcccatcaagaccgagtgcttatccgcctgagccgcctgcacaaccagcaggcattgagctccagcattgaggaggggctacgcatgcaggccatgcacagggcccagcgtgtgaggcggccgataccagggtcagatcagaccacaacgatgagtgggggggaaggagagcccggggagggagaaggggatggagaagatgtgagctcagactccgcccctgactctgccccaggccctgctcccaagcgaccccgtggagggggcgcaggggggagcagtgtagggacagggggaggcggcactggtggggtgggtgggggtgccggttcggaagactctggtgaccggggagggactctgggagggggaacgctgggccccccaagccctcctggggcccccagccccccagagccaggtggagaaattgagctcgtgttccggccccaccccctgctcgtggagaagggagaatactgccagacgaggtatgtgaagacaactgggaatgccacagtggaccacctctccaagtacttggccctgcgcattgccctcgagcggaggcaacagcaggaagcaggggagccaggagggcctggagggggcgcctctgacaccggaggacctgatgggtgtggcggggagggtgggggtgccggaggaggtgacggtcctgaggagcctgctttgcccagcctggagggcgtcagtgaaaagcagtacaccatctacatcgcacctggaggcggggcgttcacgacgttgaatggctcgctgaccctggagctggtgaatgagaaattctggaaggtgtcccggccactggagctgtgctatgctcccaccaaggatccaaagtgaccccaccaggggacagccagaggaaggggaccatggggtatccctgtgtcctggtctatcaccccagcttctttgtcccccagtacccccagcccagccagccaataagaggacacaaatgaggacacgtggcttttatacaaagtatctatatgagattcttctatattgtacagagtggggcaaaacacgcccccatctgctgccttttctattgccctgcaacgtcccatctatacgaggtgttggagaaggtgaagaaccctcccattcacgcccgcctaccaacaacaaacgtgcttttttcctctttgaaacctgcaaaaaaa

SEQ ID NO: 1882 - DNA, 735 bp, Homo Sapiens
  NM_002934
gctgcccctgaaccccagaacaaccagctggatcagttctcacaggagctacagcgcggagactgggaaacatggttccaaaactgttcacttcccaaatttgtctgcttcttctgttggggcttctggctgtggagggctcactccatgtcaaacctccacagtttacctgggctcaatggtttgaaacccagcacatcaatatgacctcccagcaatgcaccaatgcaatgcaggtcattaacaattatcaacggcgatgcaaaaaccaaaatactttccttcttacaacttttgctaacgtagttaatgtttgtggtaacccaaatatgacctgtcctagtaacaaaactcgcaaaaattgtcaccacagtggaagccaggtgcctttaatccactgtaacctcacaactccaagtccacagaatatttcaaactgcaggtatgcgcagacaccagcaaacatgttctatatagttgcatgtgacaacagagatcaacgacgagaccctccacagtatccggtggttccagttcacctggatagaatcatctaagctcctgtatcagcactcctcatcatcactcatctgccaagctcctcaatcatagccaagatcccatctctccatatactttgggtatcagcatctgtcctcatcagtctccataccccttcagctttcctgagctgaagtgccttgtgaaccctgcaataaactgctttgcaaattc

SEQ ID NO: 1883 - DNA, 716 bp, Homo Sapiens
  NM_002935
gaacaaccagctggatcagttctcacaggagccacagctcagagactgggaaacatggttccaaaactgttcacttcccaaatttgtctgcttcttctgttggggcttatgggtgtggagggctcactccatgccagacccccacagtttacgagggctcagtggtttgccatccagcacatcagtctgaacccccctcgatgcaccattgcaatgcgggcaattaacaattatcgatggcgttgcaaaaaccaaaatacttttcttcgtacaacttttgctaatgtagttaatgtttgtggtaaccaaagtatacgctgccctcataacagaactctcaacaattgtcatcggagtagattccgggtgcctttactccactgtgacctcataaatccaggtgcacagaatatttcaaactgcacgtatgcagacagaccaggaaggaggttctatgtagttgcatgtgacaacagagatccacgggattctccacggtatcctgtggttccagttcacctggataccaccatctaagctcctgtatcagcagtcctcatcatcactcatctgccaagctcctcaatcatagccaagatcccatccctccatgtactctgggtatcagcaactgtcctcatcagtctccataccccttcagctttcctgagctgaagtcccttgtgaaccctgcaataaactgctttgcaaattca

SEQ ID NO: 1884 - DNA, 1648 bp, Homo Sapiens
  NM_002936
gccggtgacggaagtgcggtgttgagcgccggcggctcgcgcccacgctgggccgggagtcgaaatgcttcccggtgccgggagtgagcgatgagctggcttctgttcctggcccacagagtcgccttggccgccttgccctgccgccgcggctctcgcgggttcgggatgttctatgccgtgaggaggggccgcaagaccggggtctttctgacctggaatgagtgcagagcacaggtggaccggtttcctgctgccagatttaagaagtttgccacagaggatgaggcctgggcctttgtcaggaaatctgcaagcccggaagtttcagaagggcatgaaaatcaacatggacaagaatcggaggcgaaagccagcaagcgactccgtgagccactggatggagatggacatgaaagcgcagagccgtatgcaaagcacatgaagccgagcgtggagccggcgcctccagttagcagagacacgttttcctacatgggagacttcgtcgtcgtctacactgatggctgctgctccagtaatgggcgtagaaggccgcgagcaggaatcggcgtttactgggggccaggccatcctttaaatgtaggcattagacttcctgggcggcagacaaaccaaagagcggaaattcatgcagcctgcaaagccattgaacaagcaaagactcaaaacatcaataaactggttctgtatacagacagtatgtttacgataaatggtataactaactgggttcaaggttggaagaaaaatgggtggaagacaagtgcagggaaagaggtgatcaacaaagaggactttgtggcactggagaggcttacccaggggatggacattcagtggatgcatgttcctggtcattcgggatttataggcaatgaagaagctgacagattagccagagaaggagctaaacaatcggaagactgagccatgtgactttagtccttgggagaacttgagccagcggctgtcttgctgcctgtacttactggtgtggaaaatagcctgcaggtaggaccattgcagtgatgggcagatgcgtctttcacacggaatcaggcacagtggccttctgtgacatgtgtttataaaaaatggttaagtatataataaattgaacatctttgagattggagaattatgtgagatttccacattatgtttactgggttcaatactgtccttgcttgttttattgcaggcaagcaaggcaaatggcctaaaatgctgtggcttatattttgataagaaatcaaaaaaccattggttaaaagatgcaactcagaagtctggaagtattctgaaagcatccatttaccgtccagttgacaggtttgagtctcctgcttgtataggtgacttgtgcccatgggtacattaaaggaacatgctgcccagggcctgggcggacagctcagtgggcaggatgtgtgctgggtctcagccccatgtgcctgcttgctgggcagttagtatagggcaaagcctgcctgcggcgaccctggctgctaggccattctctaggaacagctgcgactcataaagaccaagaagcataaataaactttcaaaaatttatttggctctttcgttaaaaactgtgcaaattaaaaaaaaaaaaaaa

SEQ ID NO: 1885 - DNA, 2971 bp, Homo Sapiens
  NM_002938
aatggggacatgatggggggcggagccgaggcctccgaagcggaagtgggttgctgttgaggcggcggcatctttctcgaggagctctcctgggcggctgaagaaggagcttcttctccggagtgcgccggcggtggcgcctgcggacctaactagctccaggttaggccgagctttgcgggaaagcagcggacttgaaaatactggaaatctgtccggatccaaattattttgcaagccagatgagtaaccagagggcatgaaaggttgagaacatttgacttccctgcaaaccttggtatagatcacttccttttctgtaggaaaggaaaggcaccaaagagcacaatgagtacaagaaagcgtcgtggtggagcaataaattctagacaagctcagaagcgaactcgggaagcaacctccacccccgagatctccttggaagcagaacccatagaactcgtggaaactgctggagatgaaattgtggacctcacttgtgaatctttagagcctgtggtggttgatctgactcacaatgactctgttgtgattgttgacgaaagaagaagaccaaggaggaatgctaggaggctgccccaggaccatgctgacagctgtgtggtgagcagtgacgatgaggagttgtccagggacagagacgtatatgtgactacccatactcccagaaacgccagggatgagggcgctacaggcctcaggccctcaggtactgtcagttgtcccatctgcatggacggatactcagagatcgtgcagaatggacgtctcatcgtttccacagaatgcggccatgtcttctgtagccagtgcctccgtgattccctgaagaatgctaatacttgcccaacttgtaggaaaaagatcaaccacaaacggtaccaccccatttatatatgaagtattcagagccccccaggagagacggatggacagacagacagccaggttctccagtggtatctgcctccattttcctgagatcaaaaagactgtttcgaaaccaacatctgatatgtaaactgctcttttgtttccaaccccttccttttgttatctccagtttgatgctatggcgctggacccagggccctcccaggccatctctgttcctctggggtggtccagttctagagtgggagaaagggagtcaggcgcattgggaatcgtggttccagtctggttgcagaatctgcacatttgccaagaaattttccctgtttggaaagtttgccccagctttcccgggcacaccaccttttgtcccaagtgtctgccggtcgaccaatctgcctgccacacattgaccaagccagacccggttcacccagctcgaggatcccaggttgaagagtggccccttgaggccctggaaagaccaatcactggacttcttcccttgagagtcagaggtcacccgtgattctgcctgcaccttatcattgatctgcagtgatttctgcaaatcaagagaaactctgcagggcactcccctgtttcctaagaacgaaaaagtgcaataaaggccattcgttacctacttttcagcagcccacaagatgtagcactattagtgtccccctcagaggcttaatgttgcctgtggagcagtgcccatcccagcccgtttctgcccaccagttgttctcaggaaccttacccatgctccagcgtccttcacctggcacaggacatgcaagataaatagggcaggcacgtgtttgggtgtcctctcttttctgataaaatccatcccgtgtttgccacacgccctccagtcctcagttcccactgcctaacgtctgcccccgtgtagatactgagaggtggtggcagtaattgtggccttatcagccgctcagttccaggcttttgcccaggtcactgttgccccatgttcggagaacctggcccacctgtcttggctttctcatccttcccaacccagtgccgtttatttcagaagcttcctggccactgggcttggatgcttcgggcttctgactgctccataggttttgactggtgaaacaggggcccagatgacaacctctccttcgctccacaggtacgcgggagcctcaggttctctcaggggcagcaaagtggcccaagctgcccctgacagcacagggcctggggggtggctaacgagagaggccttacagtgccggcatgcctcctcttccactgtcgtccttcctcagagggcctcacgccaaacaaacggccttttcgtgtgaaacatcttcagggcgggaaaggggccacttctggctttgttagcaataactgaccttcagtttacccttctgaaggagcagggactcagcacagaattcactttagacggggctgaaggagtgtccctcctctatgtgaaaagaaaattgttttattcttcattctgactttttaactgtttggctcacttccagttagtttgaatgaaaataataattttctacttggagttgaagagggcagaatccgcagctctcatcattgtgatgtgtagcatgtctgccctctgactggacatcattgccattaactttcttctgggcatcacggcaatgtcacgatgcccagacttggagcaaggcaaccttggagtcagtccactcataaaatatggtaacacccattttaaaatttaagttttgtccttaaagacaacttcagtggttaattataaaagttgtgttacttcgtcctaaattaaattgatagaaagatttaaaaatgtgttttgtttctactattcagaaactgcgaactagggaaaggttggtatgaagaaatgtctttccttttttcaatgtacatagttcaactctttctttgttacatttaaactatatccatggatatcagtctgctttggactcctctgctagtgttacagatggaaataaaaccattaatttgaaccaaataaaaaaaaaaa

SEQ ID NO: 1886 - DNA, 6895 bp, Homo Sapiens
  NM_002941
cccgacttcactctctccctatttccccactcttaggtttaaaagtctgtcacctttcgcttggtttaaactcggaaaggtctcagtgcacagcaaagttgcagggctgcgtctgcactacggagcctctagattgctgaaaacagtcttatggaaggataacacattgtctgtcactggctggttgtaatgcaaggaagggacaaagatgaaatggaaacatgttccttttttggtcatgatatcactcctcagcttatccccaaatcacctgtttctggcccagcttattccagaccctgaagatgtagagagggggaacgaccacgggacgccaatccccacctctgataacgatgacaattcgctgggctatacaggctcccgtcttcgtcaggaagattttccacctcgcattgttgaacacccttcagacctgattgtctcaaaaggagaacctgcaactttgaactgcaaagctgaaggccgccccacacccactattgaatggtacaaagggggagagagagtggagacagacaaagatgaccctcgctcacaccgaatgttgctgccgagtggatctttatttttcttacgtatagtacatggacggaaaagtagacctgatgaaggagtctatgtctgtgtagcaaggaattaccttggagaggctgtgagccacaatgcatcgctggaagtagccatacttcgggatgacttcagacaaaacccttcggatgtcatggttgcagtaggagagcctgcagtaatggaatgccaacctccacgaggccatcctgagcccaccatttcatggaagaaagatggctctccactggatgataaagatgaaagaataactatacgaggaggaaagctcatgatcacttacacccgtaaaagtgacgctggcaaatatgtttgtgttggtaccaatatggttggggaacgtgagagtgaagtagccgagctgactgtcttagagagaccatcatttgtgaagagacccagtaacttggcagtaactgtggatgacagtgcagaatttaaatgtgaggcccgaggtgaccctgtacctacagtacgatggaggaaagatgatggagagctgcccaaatccagatatgaaatccgagatgatcataccttgaaaattaggaaggtgacagctggtgacatgggttcatacacttgtgttgcagaaaatatggtgggcaaagctgaagcatctgctactctgactgttcaagaacctccacattttgttgtgaaaccccgtgaccaggttgttgctttgggacggactgtaacttttcagtgtgaagcaaccggaaatcctcaaccagctattttctggaggagagaagggagtcagaatctacttttctcatatcaaccaccacagtcatccagccgattttcagtctcccagactggcgacctcacaattactaatgtccagcgatctgatgttggttattacatctgccagactttaaatgttgctggaagcatcatcacaaaggcatatttggaagttacagatgtgattgcagatcggcctcccccagttattcgacaaggtcctgtgaatcagactgtagccgtggatggcactttcgtcctcagctgtgtggccacaggcagtccagtgcccaccattctgtggagaaaggatggagtcctcgtttcaacccaagactctcgaatcaaacagttggagaatggagtactgcagatccgatatgctaagctgggtgatactggtcggtacacctgcattgcatcaacccccagtggtgaagcaacatggagtgcttacattgaagttcaagaatttggagttccagttcagcctccaagacctactgacccaaatttaatccctagtgccccatcaaaacctgaagtgacagatgtcagcagaaatacagtcacattatcgtggcaaccaaatttgaattcaggagcaactccaacatcttatattatagaagccttcagccatgcatctggtagcagctggcagaccgtagcagagaatgtgaaaacagaaacatctgccattaaaggactcaaacctaatgcaatttaccttttccttgtgagggcagctaatgcatatggaattagtgatccaagccaaatatcagatccagtgaaaacacaagatgtcctaccaacaagtcagggggtggaccacaagcaggtccagagagagctgggaaatgctgttctgcacctccacaaccccaccgtcctttcttcctcttccatcgaagtgcactggacagtagatcaacagtctcagtatatacaaggatataaaattctctatcggccatctggagccaaccacggagaatcagactggttagtttttgaagtgaggacgccagccaaaaacagtgtggtaatccctgatctcagaaagggagtcaactatgaaattaaggctcgccctttttttaatgaatttcaaggagcagatagtgaaatcaagtttgccaaaaccctggaagaagcacccagtgccccaccccaaggtgtaactgtatccaagaatgatggaaacggaactgcaattctagttagttggcagccacctccagaagacactcaaaatggaatggtccaagagtataaggtttggtgtctgggcaatgaaactcgataccacatcaacaaaacagtggatggttccaccttttccgtggtcattccctttcttgttcctggaatccgatacagtgtggaagtggcagccagcactggggctgggtctggggtaaagagtgagcctcagttcatccagctggatgcccatggaaaccctgtgtcacctgaggaccaagtcagcctcgctcagcagatttcagatgtggtgaagcagccggccttcatagcaggtattggagcagcctgttggatcatcctcatggtcttcagcatctggctttatcgacaccgcaagaagagaaacggacttactagtacctacgcgggtatcagaaaagtcccgtcttttaccttcacaccaacagtaacttaccagagaggaggcgaagctgtcagcagtggagggaggcctggacttctcaacatcagtgaacctgccgcgcagccatggctggcagacacgtggcctaatactggcaacaaccacaatgactgctccatcagctgctgcacggcaggcaatggaaacagcgacagcaacctcactacctacagtcgcccagctgattgtatagcaaattataacaaccaactggataacaaacaaacaaatctgatgctccctgagtcaactgtttatggtgatgtggaccttagtaacaaaatcaatgagatgaaaaccttcaatagcccaaatctgaaggatgggcgttttgtcaatccatcagggcagcctactccttacgccaccactcagctcatccagtcaaacctcagcaacaacatgaacaatggcagcggggactctggcgagaagcactggaaaccactgggacagcagaaacaagaagtggcaccagttcagtacaacatcgtggagcaaaacaagctgaacaaagattatcgagcaaatgacacagttcctccaactatcccatacaaccaatcatacgaccagaacacaggaggatcctacaacagctcagaccggggcagtagtacatctgggagtcaggggcacaagaaaggggcaagaacacccaaggtaccaaaacagggtggcatgaactgggcagacctgcttcctcctcccccagcacatcctcctccacacagcaatagcgaagagtacaacatttctgtagatgaaagctatgaccaagaaatgccatgtcccgtgccaccagcaaggatgtatttgcaacaagatgaattagaagaggaggaagatgaacgaggccccactccccctgttcggggagcagcttcttctccagctgccgtgtcctatagccatcagtccactgccactctgactccctccccacaggaagaactccagcccatgttacaggattgtccagaggagactggccacatgcagcaccagcccgacaggagacggcagcctgtgagtcctcctccaccaccacggccgatctcccctccacatacctatggctacatttcaggacccctggtctcagatatggatacggatgcgccagaagaggaagaagacgaagccgacatggaggtagccaagatgcaaaccagaaggcttttgttacgtgggcttgagcagacacctgcctccagtgttggggacctggagagctctgtcacggggtccatgatcaacggctggggctcagcctcagaggaggacaacatttccagcggacgctccagtgttagttcttcggacggctcctttttcactgatgctgactttgcccaggcagtcgcagcagcggcagagtatgctggtctgaaagtagcacgacggcaaatgcaggatgctgctggccgtcgacattttcatgcgtctcagtgccctaggcccacaagtcccgtgtctacagacagcaacatgagtgccgccgtaatgcagaaaaccagaccagccaagaaactgaaacaccagccaggacatctgcgcagagaaacctacacagatgatcttccaccacctcctgtgccgccacctgctataaagtcacctactgcccaatccaagacacagctggaagtacgacctgtagtggtgccaaaactcccttctatggatgcaagaacagacagatcatcagacagaaaaggaagcagttacaaggggagagaagtgttggatggaagacaggttgttgacatgcgaacaaatccaggtgatcccagagaagcacaggaacagcaaaatgacgggaaaggacgtggaaacaaggcagcaaaacgagaccttccaccagcaaagactcatctcatccaagaggatattctaccttattgtagacctacttttccaacatcaaataatcccagagatcccagttcctcaagctcaatgtcatcaagaggatcaggaagcagacaaagagaacaagcaaatgtaggtcgaagaaatattgcagaaatgcaggtacttggaggatatgaaagaggagaagataataatgaagaattagaggaaactgaaagctgaagacaaccaagaggcttatgagatctaatgtgaaaatcatcactcaagatgcctcctgtcagatgacacatgacgccagataaaatgttcagtgcaatcagagtgtacaaattgtcgtttttattcctcttattgggatatcattttaaaaactttattgggtttttattgttgttgtttgatccctaaccctacaaagagccttcctattcccctcgctgttggagcaaaccattataccttacttccagcaagcaaagtgctttgacttcttgcttcagtcatcagccagcaagagggaacaaaactgttcttttgcattttgccgctgagatatggcattgcactgcttatatgccaagctaatttatagcaagatattgatcaaatatagaaagttgatattcaacctcacaagggctctcaaagtataatctttctatagccaactgctaatgcaaattaaaacatatttcattttaacatgatttcaaaatcagtttttcatactaccctttgctggaagaaactaaaaatatagcaaatgcagaaccacaaacaattcgaatggggtagaaacattgtaaatatttactctttgcaaaccctggtggtattttattttggcttcatttcaatcattgaagtatattcttattggaaatgtacttttggataagtagggctaagccagttggatctctggttgtctagtcattgtcataagtaaacctagtaaaaccttgttctatttttcaatcatcaaaaagtaattataaatacgtattacaaacaagtggatgtttttaatgaccaattgagtaagaacatccctgtcttaactggcctaaatttcttctggtagtgtcagttcaactttcagaagtgccacttaaggaagtttgatttttgtttttgtaatgcactgtttttaatctctctctctttttttttttttttttggttttaaaagcacaatcactaaactttatttgtaaaccattgtaactattaaccttttttgtcttattgaaaaaaaaaatgttgagaagcgtttttaacctgttttgttaatgctctatgtttgtatttggaatatttgaataatgacagatggtgaagtaacatgcatactttattgtgggccatgaaccaaatggttcttacttttcctggacttaaagaaaaaaagaggtttaagtttgttgtggccaatgtcgaaacctacaagatttccttaaaatctctaatagaggcattacttgctttcaattgacaaatgatgccctctgactagtagatttctatgatccttttttgtcattttatgaatatcattgattttataattggtgctatttgaagaaaaaaatgtacatttattcatagatagataagtatcaggtctgaccccagtggaaaacaaagccaaacaaaactgaaccacaaaaaaaaaggctggtgttcaccaaaaccaaacttgttcatttagataatttgaaaaagttccatagaaaaggcgtgcagtactaagggaacaatccatgtgattaatgttttcattatgttcatgtaagaagccccttatttttagccataattttgcatactgaaaatccaataatcagaaaagtaattttgtcacattatttattaaaaatgttctcaaatacataaaaaaaaaaaaaaaaaaaaaaaaaaaaaaaaaaaaaaaaaaaaaaaaaaaaaaaa

SEQ ID NO: 1887 - DNA, 4345 bp, Homo Sapiens
  NM_002945
gggggcgggagcggtgcgcgcaacttctcgggccaataactgcgcagcgcgcgggacccgggtggggaagctggagctgttgcggggtccgcggggaagtcttggcggtggagccatggtcggccaactgagcgagggggccattgcggccatcatgcagaagggggatacaaacataaagcccatcctccaagtcatcaacatccgtcccattactacggggaatagtccgccgcgttatcgactgctcatgagtgatggattgaacactctatcctctttcatgttggcgacacagttgaaccctctcgtggaggaagaacaattgtccagcaactgtgtatgccagattcacagatttattgtgaacactctgaaagacggaaggagagtagttatcttgatggaattagaagttttgaagtcagctgaagcagttggagtgaagattggcaatccagtgccctataatgaaggactcgggcagccgcaagtagctcctccagcgccagcagccagcccagcagcaagcagcaggccccagccgcagaatggaagctcgggaatgggttctactgtttctaaggcttatggtgcttcaaagacatttggaaaagctgcaggtcccagcctgtcacacacttctgggggaacacagtccaaagtggtgcccattgccagcctcactccttaccagtccaagtggaccatttgtgctcgtgttaccaacaaaagtcagatccgtacctggagcaactcccgaggggaagggaagcttttctccctagaactggttgacgaaagtggtgaaatccgagctacagctttcaatgagcaagtggacaagttctttcctcttattgaagtgaacaaggtgtattatttctcgaaaggcaccctgaagattgctaacaagcagttcacagctgttaaaaatgactacgagatgaccttcaataacgagacttccgtcatgccctgtgaggacgaccatcatttacctacggttcagtttgatttcacggggattgatgacctcgagaacaagtcgaaagactcacttgtagacatcatcgggatctgcaagagctatgaagacgccactaaaatcacagtgaggtctaacaacagagaagttgccaagaggaatatctacttgatggacacatccgggaaggtggtgactgctacactgtggggggaagatgctgataaatttgatggttctagacagcccgtgttggctatcaaaggagcccgagtctctgatttcggtggacggagcctctccgtgctgtcttcaagcactatcattgcgaatcctgacatcccagaggcctataagcttcgtggatggtttgacgcagaaggacaagccttagatggtgtttccatctctgatctaaagagcggcggagtcggagggagtaacaccaactggaaaaccttgtatgaggtcaaatccgagaacctgggccaaggcgacaagccggactactttagttctgtggccacagtggtgtatcttcgcaaagagaactgcatgtaccaagcctgcccgactcaggactgcaataagaaagtgattgatcaacagaatggattgtaccgctgtgagaagtgcgacaccgaatttcccaatttcaagtaccgcatgatcctgtcagtaaatattgcagattttcaagagaatcagtgggtgacttgtttccaggagtctgctgaagctatccttggacaaaatgctgcttatcttggggaattaaaagacaagaatgaacaggcatttgaagaagttttccagaatgccaacttccgatctttcatattcagagtcagggtcaaagtggagacctacaacgacgagtctcgaattaaggccactgtgatggacgtgaagcccgtggactacagagagtatggccgaaggctggtcatgagcatcaggagaagtgcattgatgtgagaggagcagtgccaatcgggcagaagtttgcaaataggcagaatggaatcgatttcctcccacctccgtgtgacgatcccatgttagctacacagtgcagaggctcttgatggtggactaagcaatttcccccctcgtgcgcatctcagaacccatcggtaggcaaaggaaaatacgctcaggtggttgtggtgtagactgtgtcaggcctacggagtcagccagtggctagcgcaagaccagtcactccctctgccttcaggcttctgtcaatttcattatcatcaagcaggaattatgtcgtaagtcactgaccctaactgcagaccatgaagtaaattatgtaactaggtttttgcttctccagtggtgaccacccccccccatccccgctcacaacttgggttcttctcagcggggcgagctgagaagcggtcatgagcacctggggattttagtaagtgtgtcttcctagaattcgaaggctctctctttctagaggtgctacatagttggtaatgcttggaatggcaatagggtagaatgattaatcaaaggcatatcttctatatctgaagagtatccttccttcagggtttaatagactgagtcagatgggtctgatattaatcaaaattgtctcttctgaggaccgctgataagcattgacttgccgtcccctaaggaaatccgagcggctacaaagcgtttctttacttctcacttcaattaatgctgcgcttcgcttggtgagtgcgtactttttctacctgtacacattcctgcattcatgtattttgttttttttgactaaagctatgttacatggaaaggattttgaagccttttgtttcccttgctttgttttaataaacagtatattctttggttgtgaatcctactttctttgaatgcaaagagttcctataactggaaagcaattaattagccttcataataaatgttcacttgggggggatgttaactcattataaacccgaagattagtccaaggcatggagatccttcttcctagtgtttgcagccctgaaatgcatctttcaaagcatgaaaacactaaaaacaaaaagccattttgcctgaggatgctgatgatctggcacttgggattttattgatgtttacgcagcagtctaacaccaaccacgctttgaaatgtgtacagacagtgagctggtaagaaaacagtaattatgctagtgggcctttcagtcagcaaaagcatgctcgctctgtgtgttcctaatcatattaattatctatccggtggctgcaacacaccgcctgccattggccgcacatctcgccgtcgtaccccggcagtgcggcggtcactctgcagccagaggacctgctgttcatcactgcacatgccgcctgcggaggcttttggatatggggagtgatggtgtcctgtctgtctcccccctcggtgtctgccgttgacataggggccagccagccctagacgggatgacttccgttcctgaggacagacacagagggactcctgctcagcctcactaattgtttagacacattccttcctacccttctctagtctcaggagatggtaactgggtcgcatttcagtctctgactgaggcctcagccatttttacggaagttcttttctgtctgaccttgcttataaagcatcgacgagaaaattacagtcttcaaccctcttctggattgacaaattgtggctgggaagtggcgatctagctttcagcccagtaaccagtctttcatgcctactactcccagcattccctcctctccccacgtgtctgtccacacagtgaagaggcctgaccagccgtggtaccaggacaggacgtgtccagggaacgctgacacctgtcctcgcgccttctcagtggccagcgtgatgaaaccagcacgtctccgtggatgtgattgggaacccaggggcagtgccagggggagggctccctcgaggaggctgtttctaacagatttccccactcaaagatcagatcaccagcagaggagcatcagaaactggctccactgttgggcttttcagagattttggtccctgcgggttgcctaaatagattctggcccacagtttacctcgaaaggctgttgatgttgttctgtttctcctctttcacttagagatcaatgttgattttgcgtacaccatgacatcagcgttaggcaattaggagaaaaaaatctaatcatttcgcctttatttcaagtggttcttgaattccctccagtctcattgtgaaaggggcagggaaaaaaataaaagggtaataatctgatttctgtccatatttccagtgttttatgctttccattaaaaccttgctaatctct

SEQ ID NO: 1888 - DNA, 1741 bp, Homo Sapiens
  NM_002946
cttcgtaaagatggccgcggaggcttttggagccaactgggagcgcagtacgcgttttctggagcatgggcagaggagacaggaacaagcgtagcatccgtgagcaccgattggctgaagcgagcaccccgggagctgactggctccgccattcgcgggaaggcgtttgtggtgccagagaaaagtagccagagcggcgcagtggcggccgcgttctgtggttttccgctattcccccagacccgcaccttctcggcctctttgcggagaatcgtgaccaagatgtggaacagtggattcgaaagctatggcagctcctcatacgggggagccggcggctacacgcagtccccggggggctttggatcgcccgcaccttctcaagccgaaaagaaatcaagagcccgagcccagcacattgtgccctgtactatatctcagctgctttctgccactttggttgatgaagtgttcagaattgggaatgttgagatttcacaggtcactattgtggggatcatcagacatgcagagaaggctccaaccaacattgtttacaaaatagatgacatgacagctgcacccatggacgttcgccagtgggttgacacagatgacaccagcagtgaaaacactgtggttcctccagaaacatatgtgaaagtggcaggccacctgagatcttttcagaacaaaaagagcctggtagcctttaagatcatgcccctggaggatatgaatgagttcaccacacatattctggaagtgatcaatgcacacatggtactaagcaaagccaacagccagccctcagcagggagagcacctatcagcaatccaggaatgagtgaagcagggaactttggtgggaatagcttcatgccagcaaatggcctcactgtggcccaaaaccaggtgttgaatttgattaaggcttgtccaagacctgaagggttgaactttcaggatctcaagaaccagctgaaacacatgtctgtatcctcaatcaagcaagctgtggattttctgagcaatgaggggcacatctattctactgtggatgatgaccattttaaatccacagatgcagaataactggatctaactgggtacctgagatattttacagctggacctagtttcacaatctgttgtctccagctctgcatatgtctggccagggggcttctaggaagtaggtttcatctatcaaatgtctcctctgacttccttttgaaacttactgctcttctgttttattttgttttgtttgaagctcagagggagatgggcaattgacagggatgcaatccagggtgggatttcttgaggaagttacaaataagcttgttacaacatcaagatagatggaattggaaggatgctaccaggagagtacttacatagtgctcaggagtttctcttcttaaaatgtttactgctgaaagatgagcaggaccagggcgttataggcagagccctagccgagaaacctgctggcctctgcctgttttcatttcccactttggttgtgtggcattactttcagaattgcactttcctgcttgtcatgactttttgacacacttgccatgacgtgtgtttctgtgaacatgaagttctgcggtagtgcctccaggggcagaggaaaagaagaagtgttactgcgttttgtacaaaataaatacagtcatatgtttaataaaacagttctattgtaaaaaaaaaaaaaaaaaaaaaa

SEQ ID NO: 1889 - DNA, 2018 bp, Homo Sapiens
  NM_002948
cctttccgtctggcggcagccatcaggtaagccaagatgggtgcatacaagtacatccaggagctatggagaaagaagcagtctgatgtcatgcgctttcttctgagggtccgctgctggcagtaccgccagctctctgctctccacagggctccccgccccacccggcctgataaagcgcgccgactgggctacaaggccaagcaaggttacgttatatataggattcgtgttcgccgtggtggccgaaaacgcccagttcctaagggtgcaacttacggcaagcctgtccatcatggtgttaaccagctaaagtttgctcgaagccttcagtccgttgcagaggagcgagctggacgccactgtggggctctgagagtcctgaattcttactgggttggtgaagattccacatacaaattttttgaggttatcctcattgatccattccataaagctatcagaagaaatcctgacacccagtggatcaccaaaccagtccacaagcacagggagatgcgtgggctgacatctgcaggccgaaagagccgtggccttggaaagggccacaagttccaccacactattggtggctctcgccgggcagcttggagaaggcgcaatactctccagctccaccgttaccgctaatataagtaaagtttgtaaaattcatacttaataaacaatttaggacagtcatgtctgcttacaggtgttatttgtctgttaaaactagtctgcagatgtttcttgaatgctttgtcaaattaagaaagttaaagtgcaataatgtttgaagacaataagtggtggtgtatcttgtttctaataagataaacttttttgtctttgctttatcttattagggagttgtatgtcagtgtataaaacatactgtgtggtataacaggcttaataaattctttaaaaggagagaactgaaactagccctgtagatttgtctggtgcatgtgatgaaacctgcagctttatcggagtgatggcaatgctctgctggtttattttcaagtggctgcgttttttttagtttggcaggtgtagactttttaagttgggctttagaaaatctgggttagcctgaagaaaattgcctcagcctccacagtaccattttaaattcacataaaaggtgaaagctcctggttcagtgccatggcttcatggcattcagtgattagtggtaatggtaaacactggtgtgttttgaagttgaatgtgcgataaaattattagccttaagattggtaagctagcaatgaatgctagggtgggaagctggtgagccagtggccattagataaatacctttcaagtgtgagcttagacgtcaaccctaaaatacttaaccgtaatgctaattgtgatcattatgaatcccttcagtcacattagggggaaagtagttggctataagtacgtcattcttagtccagtcagtcttaaaaacatcttgggttacccactctgtccactcccataggctacagaaaaagtcacaagcgcatggtttccaaccatatgtgttttctgcagttatttctcttgttctggccaaacaaccctaaaaatccttaccattccacaaagttggaccatcacttgtgcacccactttgactatgagtataccaccacattgcatttctgtttgcaccatgtcttccaggagactagactactgttgtccagggtcaatttgagtgtaaagaaaatgtagacaaggaattgcccaattttaaattctgactttgctgacttaatttaaatgctcgttctgaaccaattttctcctatcttctctaggggtttcaaaagactcagttaattgatttccaggaagtactcatagcaagttcataaaagttcttgagacctaaatttcttcacaaaaaaagaaaagatcttaagtcatacattttaattgtgtagaggttgttcaactgaaggaataaatgtctattaaactaaaaaaaaaaaaaaaaaaaaaaaaaaaaa

SEQ ID NO: 1890 - DNA, 962 bp, Homo Sapiens
  NM_002952
cttcttttccgacaaaacaccaaatggcggatgacgccggtgcagcgggggggcccgggggccctggtggccctgggatggggaaccgcggtggcttccgcggaggtttcggcagtggcatccggggccggggtcgcggccgtggacggggccggggccgaggccgcggagctcgcggaggcaaggccgaggataaggagtggatgcccgtcaccaagttgggccgcttggtcaaggacatgaagatcaagtccctggaggagatctatctcttctccctgcctattaaggaatcagagatcattgatttcttcctgggggcctctctcaaggatgaggttttgaagattatgccagtgcagaagcagacccgtgccggccagcgcaccaggttcaaggcatttgttgctatcggggactacaatggccacgtcggtctgggtgttaagtgctccaaggaggtggccaccgccatccgtggggccatcatcctggccaagctctccatcgtccccgtgcgcagaggctactgggggaacaagatcggcaagccccacactgtcccttgcaaggtgacaggccgctgcggctctgtgctggtacgcctcatccctgcacccaggggcactggcatcgtctccgcacctgtgcctaagaagctgctcatgatggctggtatcgatgactgctacacctcagcccggggctgcactgccaccctgggcaacttcgccaaggccacctttgatgccatttctaagacctacagctacctgacccccgacctctggaaggagactgtattcaccaagtctccctatcaggagttcactgaccacctcgtcaagacccacaccagagtctccgtgcagcggactcaggctccagctgtggctacaacatagggtttttatacaagaaaaataaagtgaattaagcgtgaaaaaaaaaaaaaaaaaaaa

SEQ ID NO: 1891 - DNA, 3199 bp, Homo Sapiens
  NM_002953
gccgaagtgctagtgccgcggcggcggcggcggacggcccagccggagcgcgaggggctcgggggggcgcggcggttcgggtcgcagagccagggaccccaggacccgggaggcggcgcagccggggccgccggaggagcgcgggtgacctggcggcggcgagatgccgctcgcccagctcaaggagccctggccgctcatggagctagtgcctctggacccggagaatggacagacctcaggggaagaagctggacttcagccgtccaaggatgagggcgtcctcaaggagatctccatcacgcaccacgtcaaggctggctctgagaaggctgatccatcccatttcgagctcctcaaggttctgggccagggatcctttggcaaagtcttcctggtgcggaaagtcacccggcctgacagtgggcacctgtatgctatgaaggtgctgaagaaggcaacgctgaaagtacgtgaccgcgtccggaccaagatggagagagacatcctggctgatgtaaatcacccattcgtggtgaagctgcactatgccttccagaccgagggcaagctctatctcattctggacttcctgcgtggtggggacctcttcacccggctctcaaaagaggtgatgttcacggaggaggatgtgaagttttacctggccgagctggctctgggcctggatcacctgcacagcctgggtatcatttacagagacctcaagcctgagaacatccttctggatgaggagggccacatcaaactcactgactttggcctgagcaaagaggccattgaccacgagaagaaggcctattctttctgcgggacagtggagtacatggcccctgaggtcgtcaaccgccagggccactcccatagtgcggactggtggtcctatggggtgttgatgtttgagatgctgacgggctccctgcccttccaggggaaggaccggaaggagaccatgacactgattctgaaggcgaagctaggcatgccccagtttctgagcactgaagcccagagcctcttgcgggccctgttcaagcggaatcctgccaaccggctcggctccggccctgatggggcagaggaaatcaagcggcatgtcttctactccaccattgactggaataagctataccgtcgtgagatcaagccacccttcaagccagcagtggctcagcctgatgacaccttctactttgacaccgagttcacgtcccgcacacccaaggattccccaggcatcccccccagcgctggggcccatcagctgttccggggcttcagcttcgtggccaccggcctgatggaagacgacggcaagcctcgtgccccgcaggcacccctgcactcggtggtacagcaactccatgggaagaacctggtttttagtgacggctacgtggtaaaggagacaattggtgtgggctcctactctgagtgcaagcgctgtgtccacaaggccaccaacatggagtatgctgtcaaggtcattgataagagcaagcgggatccttcagaagagattgagattcttctgcggtatggccagcaccccaacatcatcactctgaaagatgtgtatgatgatggcaaacacgtgtacctggtgacagagctgatgcggggtggggagctgctggacaagatcctgcggcagaagttcttctcagagcgggaggccagctttgtcctgcacaccattggcaaaactgtggagtatctgcactcacagggggttgtgcacagggacctgaagcccagcaacatcctgtatgtggacgagtccgggaatcccgagtgcctgcgcatctgtgactttggttttgccaaacagctgcgggctgagaatgggctcctcatgacaccttgctacacagccaactttgtggcgcctgaggtgctgaagcgccagggctacgatgaaggctgcgacatctggagcctgggcattctgctgtacaccatgctggcaggatatactccatttgccaacggtcccagtgacacaccagaggaaatcctaacccggatcggcagtgggaagtttaccctcagtgggggaaattggaacacagtttcagagacagccaaggacctggtgtccaagatgctacacgtggatccccaccagcgcctcacagctaagcaggttctgcagcatccatgggtcacccagaaagacaagcttccccaaagccagctgtcccaccaggacctacagcttgtgaagggagccatggctgccacgtactccgcactcaacagctccaagcccaccccccagctgaagcccatcgagtcatccatcctggcccagcggcgagtgaggaagttgccatccaccaccctgtgaggcaccagggcattcgggccacagggcggtgctagcttgacacagtcagcatgcttcccagagggagcaggccggaaccacagggccagagggagctggaacccgaggggccggggaagctgccagcccagaacacccctaatgagggtgtgagaagtgccttctccttccccaggatggactcttctcggctcaggctctgctggtggaaagcgattcactgtataaacttttttttatgaaaaaaatggcatcaaccaccatggatttttacaagatccatttgcctttctgggagcagaaacagccattgcggccccaggaggggaactgagtcacgctggggctctctgagactctttagagcagctttgggatcccaccctggggacccccacgattggccacctgtagccatctgcacacacctccgagacagtccagtgtcacctctctcagagcatctggctgtttagcagaactcattctatccccaatcagctccttttccgttctgttctgctgggagttctagaaccacttcctgctacaggaggggtctcatgtcctgctggcttccagcttcaggcaccagcatccaccttggctctgccagtggatcccctgcggtcaggctgggcagccccagagagaggatgtggaaagcactttttggctgacttcatctggggttggcaacaggacagagttcacaggaggccagtgggcgggccatgagggacagggtcttttttcatttcttcctcagctggttactcagggttcatctgtccatggcctttctaataaactgttgagttgaagcac

SEQ ID NO: 1892 - DNA, 5898 bp, Homo Sapiens
  NM_002956
gctgctgctgcagtgggacaggtggcggcgaccggcggcgtccgaggagatttaatccagagactgacttcactatagaacccacagttgtatcaatggttggggaaagatagtggcaacaggcaaaggagaaacagctctgacatacaaagaaaatgagtatgctaaagccaagtgggcttaaggcccccaccaagatcctgaagcctggaagcacagctctgaagacacctacggctgttgtagctccagtagaaaaaaccatatccagtgaaaaagcatcaagcactccatcatctgagactcaggaggaatttgtggatgactttcgagttggggagcgagtttgggtgaatggaaataagcctggatttatccagtttcttggagaaacccagtttgcaccaggccagtgggctggaattgttttagatgaacccataggcaagaacgatggttcggtggcaggagttcggtatttccagtgtgaacctttaaagggcatatttacccgaccttcaaagttaacaaggaaggtgcaagcagaagatgaagctaatggcctgcagacaacgcccgcctcccgagctacttcaccgctgtgcacttctacggccagcatggtgtcttcctccccctccaccccttcaaacatccctcagaaaccatcacagccagcagcaaaggaaccttcagctacgcctccgatcagcaaccttacaaaaactgccagtgaatctatctccaacctttcagaggctggctcaatcaagaaaggagaaagagagctcaaaatcggagacagagtattggttggtggcactaaggctggtgtagtccggtttcttggggagaccgactttgccaagggggagtggtgtggcgtggagttagatgagccacttgggaagaatgatggcgctgttgctggaacaaggtattttcagtgtcaacccaaatatggcttgttcgctcctgtccacaaagttaccaagattggcttcccttccactacaccagccaaagccaaggccaacgcagtgaggcgagtgatggcgaccacgtccgccagcctgaagcgcagcccttctgcctcttccctcagctccatgagctcagtggcctcctctgtgagcagcaggcccagtcggacaggactattgactgaaacctcctcccgttacgccaggaagatctccggtaccactgccctccaggaggccctgaaggagaagcagcagcacattgagcagctgctggcggaacgggatctggagagggcggaggtggccaaggccacgagccacgtgggggagatagagcaggagctagctctggcccgggacggacatgaccagcatgtcctggaattggaagccaaaatggaccagctgcgaacaatggtggaagctgctgacagggagaaggtggagcttctcaaccagcttgaagaggagaaaaggaaggttgaggaccttcagttccgggttgaagaagaatcaattaccaaaggtgatcttgagacgcagaccaaactggagcatgcccgcattaaggagcttgaacagagcctgctctttgaaaagaccaaagctgacaaactccagagggagttagaagacactagggtggctacagtttcagaaaagtcacgtataatggaactggagaaagacctagcattgagagtacaggaagtagctgagctccgaagaaggctagagtccaataagcctgctggggatgtggacatgtcactttcccttttgcaagagataagctctttgcaagaaaagttagaagtcacccgtactgaccaccagagagaaataacttctctgaaggagcattttggagcccgggaagaaactcatcagaaggagataaaggctctgtataccgccacggaaaagctttccaaagagaacgagtcattgaaaagcaagctggagcatgccaacaaagagaactcagatgtgatagctctatggaagtccaaactggagactgccatcgcatcccaccagcaggcgatggaagaactgaaggtatctttcagcaaagggcttggaacagagacggcagaatttgctgaactaaaaacacaaatagagaaaatgagactagattaccaacacgaaatagaaaatttgcagaatcaacaagactctgaacgggctgcccatgctaaagagatggaagccttgagggctaaactgatgaaagttattaaagaaaaggaaaacagtctggaagccatcaggtcgaaactggacaaagcagaagaccagcatctcgtagaaatggaagacacgttaaacaaattacaggaagctgaaataaaggtaaaggagctagaggtactgcaagccaaatgcaatgaacaaaccaaggttattgataattttacatcacagctcaaggctactgaagaaaagctcttggatcttgatgcacttcggaaagccagttccgaaggtaaatcggaaatgaagaaacttagacagcagcttgaggcagctgagaaacagattaaacatttagagattgaaaagaatgctgaaagtagcaaggctagtagcattaccagagagctccaggggagagagctaaagcttactaaccttcaggaaaatttgagtgaagtcagtcaagtgaaagagactttggaaaaagaacttcagattttgaaagaaaagtttgctgaagcttcagaggaggcagtctctgttcagagaagtatgcaagaaactgtaaataagttacaccaaaaggaggaacagtttaacatgctgtcttctgacttggagaagctgagagaaaacttagcagatatggaggcaaaatttagagagaaagatgagagagaagagcagctgataaaggcaaaggaaaaactggaaaatgacattgcagaaataatgaagatgtcaggagataactcttctcagctgacaaaaatgaacgatgaattacgtctgaaagaaagagatgtagaagaattacagctaaaacttacaaaggctaatgaaaatgcaagttttctgcaaaaaagtattgaggacatgactgtcaaagctgaacagagccagcaagaagcagctaaaaagcatgaggaagaaaagaaagaattggagaggaaattgtcggacctggaaaagaaaatggaaacaagccacaaccagtgtcaggagctgaaagccaggtatgagagagccacttctgagacaaaaaccaagcatgaagaaatcctacagaacctccagaagacgctgctggacacagaggacaagctgaagggcgcacgggaggagaacagtggcttgctgcaggagctggaggagctgagaaagcaagccgacaaagccaaagctgctcaaacagcggaagatgccatgcagataatggaacagatgaccaaagagaagactgagactctggcctccttggaggacaccaagcaaacaaatgcaaaactacagaatgaattggacacacttaaagaaaacaacttgaaaaatgtggaagagctgaacaaatcaaaagaactcctgactgtagagaatcaaaaaatggaagaatttaggaaagaaatagaaaccctaaagcaggcagcagctcagaagtcccagcagctttcagcgttgcaagaagagaacgttaaacttgctgaggagctggggagaagcagggacgaagtcacaagtcatcaaaagctggaagaagaaagatctgtgctcaataatcagttgttagaaatgaaaaaaagagaatccaagttcataaaagacgcagatgaagagaaagcttccttgcagaaatccatcagtataactagtgccttactcacagaaaaggatgccgagctggagaaactgagaaatgaggtcacagtgctcaggggagaaaacgcctctgccaagtccttgcattcagttgttcagactctagagtctgataaggtgaagctcgagctcaaggtaaagaacttggagcttcaactcaaagaaaacaagaggcagctcagcagctcctcaggtaatacagacactcaggcagacgaggatgaaagagcccaggagagtcagattgatttcctaaattcagtaatagtggaccttcaaaggaagaatcaagacctcaagatgaaggtggagatgatgtcagaagcagccctgaatgggaacggggatgacctaaacaattatgacagtgatgatcaggagaaacagtccaagaagaaacctcgcctcttctgtgacatttgtgactgctttgatctccacgacacagaggattgtcctacccaggcacagatgtcagaggaccctccccattccacacaccatggcagtcggggtgaggaacgcccatactgtgaaatctgtgagatgtttggacactgggccaccaactgcaatgacgacgaaaccttctgatgaagcctccagtggagaactgggcttgctcagacgcactcgcattgacacaacgtaacaccagcattgtgtgtgcagacttcaggagaactcatgttattttttaaccccgtcaacaaatctaggaaaatattttgatcttcaacaaattgccctttagtctccccgtatgagttagaataataaatatttagtaggtgagttttcacctcgaattttgttttcttgatttttacgtttgaagacattgcaccagatgccattacatttattggccccccgaccttgtagaaaaacccctaccctcacaataccttatttaagtaactttaaattatgccgttacttttcatatttgcactaagatatttccaggctgcatttgtatatttagattttttggttaagctttgacactggaatgagttgaaaaaatgtgccattttgcattttcatctactcatttaaagtattttattcttattcaaagaaatatctgagctctttgcactacctgttatcagtagtgcctttacttcaggcttgataatacttaggtgtgattataaaatcatgaagcaggtaaagggaggggcaagcccccaaactgctgtggggacattttataatctatatgctgcacccacttaatctactgtggtgttttgtttattagttttgcataatttcagcttctatatattgtatgtatatattttttaaaaatctatattttgggaaaaaaacatacacaatgtgtctttctttttggacatttacctttttgaaaaagaaaacacttaaaatgatcattaggacataacagactaggccagacatagcatcttgtggctttgcaaccattttcatttgtttgttttccttttatttcttcaccagatttaaataactggaggaattttctccaatttttttttccttctctggcaggtatccccagcagtcaattaacaataagccagtataaaacacctaaataaccaatctacaatctcccttcacaagtttttttactgtttttagatgaatgtacgatgagaaattcaacgttaataattctggattttcttatcacaaaaaagaaaatgaaggacctcaaagcacctgaacagtttatcgaccagtttgaatctatttatcttcatttgaatgtcttctagaatatgtaaaaagtcataaaatgtatcttccatgctacatgtacaataagaacttctataattgtatatatgcctttgatgtattttcccctcaagattatcaactgtgtgttcgacagtgaatattcaatctggtaccagttgaaatttttggttataaatgtaatacgaattgtttcacaaacagaaaacatgtaaagcagtattaaaatttggccaaacaagtgttctgtatctactttaataaatggttattctttaaaaaaaaaaaaaaaaaa

SEQ ID NO: 1893 - DNA, 5547 bp, Homo Sapiens
  NM_002957
gcgacttttgcaacaactcgccgcgccgcggcctccgcgcgccgccgccgccaccgcagccgccggctccccgccgcccgggcccgggccggccgcgccgggggccgccgcgcccgccgcccgctgcctgcgccgccggccgggcatgagttagtcgcagacatggacaccaaacatttcctgccgctcgatttctccacccaggtgaactcctccctcacctccccgacggggcgaggctccatggctgccccctcgctgcacccgtccctggggcctggcatcggctccccgggacagctgcattctcccatcagcaccctgagctcccccatcaacggcatgggcccgcctttctcggtcatcagctcccccatgggcccccactccatgtcggtgcccaccacacccaccctgggcttcagcactggcagcccccagctcagctcacctatgaaccccgtcagcagcagcgaggacatcaagccccccctgggcctcaatggcgtcctcaaggtccccgcccacccctcaggaaacatggcttccttcaccaagcacatctgcgccatctgcggggaccgctcctcaggcaagcactatggagtgtacagctgcgaggggtgcaagggcttcttcaagcggacggtgcgcaaggacctgacctacacctgccgcgacaacaaggactgcctgattgacaagcggcagcggaaccggtgccagtactgccgctaccagaagtgcctggccatgggcatgaagcgggaagccgtgcaggaggagcggcagcgtggcaaggaccggaacgagaatgaggtggagtcgaccagcagcgccaacgaggacatgccggtggagaggatcctggaggctgagctggccgtggagcccaagaccgagacctacgtggaggcaaacatggggctgaaccccagctcgccgaacgaccctgtcaccaacatttgccaagcagccgacaaacagcttttcaccctggtggagtgggccaagcggatcccacacttctcagagctgcccctggacgaccaggtcatcctgctgcgggcaggctggaatgagctgctcatcgcctccttctcccaccgctccatcgccgtgaaggacgggatcctcctggccaccgggctgcacgtccaccggaacagcgcccacagcgcaggggtgggcgccatctttgacagggtgctgacggagcttgtgtccaagatgcgggacatgcagatggacaagacggagctgggctgcctgcgcgccatcgtcctctttaaccctgactccaaggggctctcgaacccggccgaggtggaggcgctgagggagaaggtctatgcgtccttggaggcctactgcaagcacaagtacccagagcagccgggaaggttcgctaagctcttgctccgcctgccggctctgcgctccatcgggctcaaatgcctggaacatctcttcttcttcaagctcatcggggacacacccattgacaccttccttatggagatgctggaggcgccgcaccaaatgacttaggcctgcgggcccatcctttgtgcccacccgttctggccaccctgcctggacgccagctgttcttctcagcctgagccctgtccctgcccttctctgcctggcctgtttggactttggggcacagcctgtcactgctctgcctaagagatgtgttgtcaccctccttatttctgttactacttgtctgtggcccagggcagtggctttcctgaggcagcagccttcgtggcaagaactagcgtgagcccagccaggcgcctccccaccgggctctcaggacaccctgccacaccccacggggcttgggcgactacagggtcttcgggccccagccctggagctgcaggagttgggaacggggcttttgtttccgttgctgtttatcgatgctggttttcagaattcctgtgtggccctcctgtctggagtgacatcttcatctgctctgaatactggtgcccagccagcccgtgacagcttccccctaatcaggaggggacagctgggggcgcaagctggtgtgtcatcagcaaagacctcagccgcctcggggatgagaggggactcgtggggcaagcaagctgccctgtgctctgagtgagggggaaggtagcccctttttccaaagataactcacagttttgccctcgagccaatgagaacatgagctgccctctgtgcaaggtttcggggccacctccaggctgcaggggcgggtcactcacccccctgttttctctctgccttggtgttctggtttcagactcccgactccccgttcagaccagagtgccccggcccctccccagcctgagtcttctccttgctctgcggggtgggctgaggcttgtccttgtttcctgcagggctggccctggctcgggcagggtggggcatcaccacctcactggccttgctggaggcacagggctctgcggacctgcagccatctgtgaggcccgcggggatgggaggggaggagggtggcctgttggtttccctcagagggggcaggtggcctggagagagaggggctcaggaactgggagcctcgtgggtggggcagatgctccgcggcctggagtggctctgccggggcattggtgggacccctgctcaggccttctctctggctgccagttgtgtctaaaagactcttggaatctgagaacccggagtcgcagcgccctcgggcctgggccacacgcaggccctggtgggaccacccagcctggtattgtccacggacagcgttgttcacccagagccttacttgggagcctcactgaacgcctgctctggttgaaggtggggtgggggcggggcttggggcctccctggctcagcccagtgcggcctggcgctcctcccgcaggctctgcccccgggctccggtggtgcggggccctctcaggttgaactcgcctcttttgcactggaaggccctccctttggcctgagtacttttcccgttcacgcctcagtcccgtggacccagcctttgtcagtggcaggtgcctgaacagagggtggatgggggggataccggagggggtcttgtcttcccagccgcagtctaggaatgatgcgggggggtggacgccttctccatagtctttccccacctggagcaggggcttcctcagtggtgaggggagctgcctacaggttggaccgggaggcagtggcttggagaggcagctttccagccttggtggggaagaaagtgtccattctttgccttcctggagctcccagccagagctgagcttaggcacccgagtggagcctgcagctgagtctgtgcccgagacaggctgtcagagattccagaagcctctcctccccgccgccctccacccctgcctttcagcgttgtggatccctagaggtggccccctgcccgatccaccgtcctgaggcagagtgttgagcctcatacctgtaccaggtccccggccagctgggcccctcccaggcactgccaggaagccccagctgcccctggcgggtgtggtggaaatggcaggagggtgcaggtactcttggggccccagcggtgggagtgcaaaagacccaacgccaacacctggtgccttctgcagccagcgcccacccatccgtgcccggacccttgggaatgcccgcggctccagaggaaaaagcccagggacggggcctccgttgcggggggtcggctgcttcttgggaactttgtcgtttccggcgctggctggctggctggctggctgtaaagcactgaagccccccggccgccaacccctgaaagcagaacctggcctccctggccacagcagccttacccaccgctctacgtgtcccgggcacttcccgcagccttcccgtccctttctcatcggccttgtagttgtacagtgctgttggtttgaaaaggtgatgtgtggggagtgcggctcatcactgagtagagaggtagaatttctatttaaccagacctgtagtagtattaccaatccagttcaattaaggtgattttttgtaattattattattttggtgggacaatctttaattttctaaagatagcactaacatcagctcattagccacctgtgcctgtccccgccttggcccggctggatgaagcggcttccccgcagggcccccacttcccagtggctgcttcctggggacccagggcaccccggcaccttcaggcacgctcctcagctggtcacctcccggctttgccgttcagatggggctcctgaggctcaggagtgaagatgccacagagccgggctcccctaggctgcgtcgggcatgcttggaagctggcctgccaggaccttccaccctggggcctgtgtcagccgccggccctccgcaccctggaagcacacggcctctgggaaggacagccctgaccttcggttttccgagcacggtgtttcccaagaattctgggctggcggcctggtggcagtgctggagatgaccccgagcccctccccgtggggcacccaggagggccctgccggaatgtgcagcctgtgggtagtcggctggtgtccctgtcgtggagctggggtgcgtgatctggtgctcgtccacgcaggtgtgtggtgtaaacatgtatgtgctgtacagagagacgcgtgtggagagagccgcacaccagcgccacccaggaaaggcggagcggttaccagtgttttgtgtttatttttaatcaagacgtttcccctgttttcctataaatttgcttcgtgtaagcaagtacataaggaccctcctttggtgaaatccgggttcgaatgaatatctcaaggcaggagatgcatctattttaagatgctttggagcagacagctttagccgttcccaatccttagcaatgccttagctgggacgcatagctaatactttagagaggatgacagatccataaagagagtaaagataagagaaaatgtctaaagcatctggaaaggtaaaaaaaaaaaatctatttttgtacaaatgtaattttatccctcatgtatacttggatatggcggggggagggctgggactgtttcgtttctgcttctagagattgaggtgaaagcttcgtccgagaaacgccaggacagacgatggcagaggagagggctcctgtgacggcggcgaggcttgggaggaaaccgccgcaatgggggtgtcttccctcggggcaggagggtgggcctgaggctttcaagggttttcttccctttcgagtaatttttaaagccttgctctgttgtgtcctgttgccggctctggccttcctgtgactgactgtgaagtggcttctccgtacgattgtctctgaaacatcgtggcctcaggtgccagggtttgatggacagtagcattagaattgtggaaaaggaacacgcaaagggagaagtgtgagaggagaaacaaaatatgagcgtttaaaatacatcgccattcagttcgttaaaaaaaaaaaaaaaaaaaaaaaaa

SEQ ID NO: 1894 - DNA, 2933 bp, Homo Sapiens
  NM_002958
cggctcggggctgtgagcggctcggggccgggggtgggcggcggtgcggcgggcggccgacgctcctcttcggcggcggcggcggcggccatgcgtggggcggcgcggctggggcggccgggccggagttgcctcccgggggcccgcggcctgagggccccgccgccgccgccgctgctgcttctgcttgcgctgttgccgctgctgcccgcgcctggcgctgccgccgcccccgccccgcggcccccggagctgcagtcggcttccgcggggcccagcgtgagtctctacctgagcgaggacgaggtgcgccggctgatcggtcttgatgcagaactttattatgtgagaaatgaccttattagtcactacgctctatcctttagtctgttagtacccagtgagacaaatttcctgcacttcacctggcatgcgaagtccaaggttgaatataagctgggattccaagtggacaatgttttggcaatggatatgccccaggtcaacatttctgttcagggggaagttccacgcactttatcagtgtttcgggtagagctttcctgtactggcaaagtagattctgaagttatgatactaatgcagctcaacttgacagtaaattcttcaaaaaattttaccgtcttaaattttaaacgaaggaaaatgtgctacaaaaaacttgaagaagtaaaaacttcagccttggacaaaaacactagcagaactatttatgatcctgtacatgcagctccaaccacttctacgcgtgtgttttatattagtgtaggggtttgttgtgcagtaatatttctcgtagcaataatattagctgttttgcaccttcatagtatgaaaaggattgaactggatgacagcattagtgccagcagtagttcccaagggctgtctcagccatccacccagacgactcagtatctgagagcagacacgcccaacaatgcaactcctatcaccagttatcctaccttgcggatagagaagaacgacttgagaagtgtcactcttttggaggccaaaggcaaggtgaaggatatagcaatatccagagagaggataactctaaaagatgtactccaagaaggtacttttgggcgtattttccatgggattttaatagatgaaaaagatccaaataaagaaaaacaagcatttgtcaaaacagttaaagatcaagcttctgaaattcaggtgacaatgatgctcactgaaagttgtaagctgcgaggtcttcatcacagaaatcttcttcctattactcatgtgtgtatagaagaaggagaaaagcccatggtgatattgccttacatgaattgggggaatcttaaattgtttttacgacagtgcaagttagtagaggccaataatccacaggcaatttctcagcaagacctggtacacatggctattcagattgcctgtggaatgagctacctggccagaagggaagtcatccacaaagacctggctgccaggaactgtgtcattgatgacacacttcaagttaagatcacagacaatgccctctccagagacttgttccccatggactatcactgtctgggggacaatgaaaacaggccagttcgttggatggctcttgaaagtctggttaataacgagttctctagcgctagtgatgtgtgggcctttggagtgacgctgtgggaactcatgactctgggccagactccctacgtggacattgaccccttcgagatggccgcatacctgaaagatggttaccgaatagcccagccaatcaactgtcctgatgaattatttgctgtgatggcctgttgctgggccttagatccagaggagaggcccaagtttcagcagctggtacagtgcctaacagagtttcatgcagccctgggggcctacgtctgactcctctccaatcccacaccatcaggaagaaggtgcctgtcggggctcacttgaagcctgtcagggatgctttgtatctaacacaacgccaacagaagcacatttgtcttccagaacaccgtgccttagaaatgctttagaatctgaactttttaagacagacttaataatgtggcatattttctagatatcacttttattaggttgaactgaaagggtttttgtaaattttttggccaaaattttttaaaacatacttactttggactaggggtacattcttacaaaataaataaacagtttttaaaattgtttagacacagatatttggaattagctatcttagtgccaactgctttttatttttttacttcatcaaggtgatgtaagtgactcacctttaaagtttttttagtgttattttttatcactactctgggaaatggtttgtcttcaagatgcaatacttttcttagtaaaggaaaaacagcataaaaagatacctggtctgccttgtacaagaaaaggcaatattagaggaagaaaatttaaagaaaagctagaggaaaaaaaaatttttttaaaaatacttattagaagcaaactgcccttgcatggaaaactgtttatttttttcagtgaaaaggaattctgctttcgtgtttttgggaaagcaggaactgagttcattacatctttaatttggcagaaattagcctttctgtgaaccagatgtggtttggggcagatctgtagtaaacaatggtgattttatttatttttactctctggaaaaggagataatacaattccagaaagtgaactcatatttctaaggttaagattcccttttattgcacctagaatagtgctatgcacagagcgggtgcttgagttgttgtcgttttttgtttgttttttaaatgtaaactggtaaattttgtgcttatcttcaaggctggcttaagtataaaattgttttttaaacacttgaaaaattaaaggatttgttttatatt

SEQ ID NO: 1895 - DNA, 7018 bp, Homo Sapiens
  NM_002959
ggcgggcgcgccgggcggcaggtgtcggcgtcggcggcattcggcggcgatggagcggccctggggagctgcggacggcctctcgcgctggccccatggcctcggcctcctcctcctcctgcagctgctgccgccgtcgaccctcagccaggaccggctggacgcgccgccgccgcccgctgcgccgctgccgcgctggtctggccccatcggggtgagctgggggctgcgggcggccgcagccgggggcgcgtttccccgcggcggccgttggcgtcgcagcgcgccgggcgaggacgaggagtgcggccgggtccgggacttcgtcgccaagctggccaacaacacgcaccagcatgtgtttgatgatctcagaggctcagtatccttgtcctgggttggagatagcactggggtcattctagtcttgactaccttccatgtaccactggtaattatgacttttggacagtccaagctatatcgaagtgaggattatgggaagaactttaaggatattacagatctcatcaataacacctttattcggactgaatttggcatggctattggtcctgagaactctggaaaggtggtgttaacagcagaggtgtctggaggaagtcgtggaggaagaatcttcagatcatcagattttgcgaagaattttgtgcaaacagatctcccttttcatcctctcactcagatgatgtatagccctcagaattctgattatcttttagctctcagcactgaaaatggcctgtgggtgtccaagaattttgggggaaaatgggaagaaatccacaaagcagtatgtttggccaaatggggatcagacaacaccatcttctttacaacctatgcaaatggctcctgcaaagctgaccttggggctctggaattatggagaacttcagacttgggaaaaagcttcaaaactattggtgtgaaaatctactcatttggtcttgggggacgtttcctttttgcctctgtgatggctgataaggataccacaagaaggatccacgtttcaacagatcaaggggacacatggagcatggcccagctcccctccgtgggacaggaacagttctattctattctggcagcaaatgatgacatggtattcatgcatgtagatgaacctggagacactgggtttggcacaatctttacctcagatgatcgaggcattgtctattccaagtctttggaccgacatctctacactaccacaggcggagagacggactttaccaacgtgacctccctccgcggcgtctacataacaagcgtgctctccgaagataattctatccagaccatgatcacttttgaccaaggaggaaggtggacgcacctgaggaagcctgaaaacagtgaatgtgatgctacagcaaaaaacaagaatgagtgcagccttcatattcatgcttcctacagcatctcccagaaactgaatgttccaatggccccactctcagagccgaatgccgtaggcattgtcattgctcatggtagcgtgggggatgccatctcagtgatggttccagatgtgtacatctcagatgatgggggttactcctggacaaagatgctggaaggaccccactattacaccatcctggattctggaggcatcattgtggccattgagcacagcagccgtcctatcaatgtgattaagttctccacagacgaaggtcaatgctggcaaacctacacgttcaccagggaccccatctatttcactggcctagcttcagaacctggagctaggtccatgaatatcagcatttggggcttcacagaatctttcctgaccagccagtgggtctcctacaccattgattttaaagatatccttgaaaggaactgtgaagagaaggactataccatatggctggcacactccacagaccctgaagattatgaagatggctgcattttgggctacaaagaacagtttctgcggctacgcaagtcatccgtgtgtcagaatggtcgagactatgttgtgaccaagcagccctccatctgcctctgttccctggaggactttctctgtgattttggctactaccgtccagaaaatgactccaagtgtgtggaacagccagaactgaagggccacgacctggagttttgtctgtacggaagagaagaacacctaacaacaaatgggtaccggaaaattccaggggacaaatgccagggtggggtaaatccagttcgagaagtaaaagacttgaaaaagaaatgcacaagcaactttttgagtccggaaaaacagaattccaagtcaaattctgttccaattatcctggccatcgtgggattgatgctggtcacagtcgtagcaggagtgctcattgtgaagaaatatgtctgtgggggaaggttcctggtgcatcgatactctgtgctgcagcagcatgcagaggccaatggtgtggatggtgtggatgctttggacacagcctcccacactaataaaagtggttatcatgatgactcagatgaggacctcttggaatagctcttcagaggagctggacccagcatggatggtggaaccacagtacctcttacactccctgtggctccaacttcaggaaataaatttcccattgcgagggacccagctctgtttctgctgcttccatcaaagccaaaaggacctacactaaagaaatgcagggtgggggtggggaaccctgagcacttttttacaattggctctgagaaaaagggagacattttaaattctttaacttcttatttctcgtcctgtctctttgcaaagtatgggcttttttgtttttgttttttaagggaaacgaaatggaattcgaagggaccttttcactaaccccacttctgtgtgttctgcatggcgcctgccccagggcatctgccaactccagtatcagctctcacagtgtacttggtaccatccctgggctctgctggcgagacgaaacagctgtagagatgaaaacaggctgcagaggctggcacagcctggccggcttttctccatctggggacagtcctactccaagaacactgcacaccagctcctcacacagatcccacttactctttttttttttttcagagaccacagaccacagtgatttttcttttcccttgtttaattaggcaatacccttgttaattgccctttggcaactaacttaaccatgtgcttcccacacagtacatcaggaaaacttacagggcaatatttttaacttggggcaggaagaagggagcagcagagaattgactagatatagcacctattaaaagagaactcttgcttcttctgagatttttcaagctgtgctttgtgtgtgtgccagtagacttacgcaaggacagggtacaaacttagctggaagtctgcccaggctgaatgatctcttccctagagttgattgtcgggtacacagtgtgaacccccgaagacggaacctcacagtcttccatgttcccttcttaactgtcgtgtggctcgttgctaaatcatgacaatggctgcctatctgctgcttcttaggttgctgttgtacatggaaccaggactagagattttttcagatttatagacttaaaaaattagaattttattaccaggctttccttctcaccccttttttctgactttgccaagtaatttgttgacacgaaaattttggaggaaccaattgaaaacacacttccagtctagatgatgctttgtgtgatacattaagttcttattttggattaaaagaagttttccatttgatacttctctaaattaaataaattatagaatgtagttgggtggattttggggtggccatatagtaatggaaagctgcaataattagttttaatacagcttgaatatttgctatatagaaatatagtatggaaagtttttggtcttaatgtagctactgtgcgggtcacagtttctcccaatgattatgactgggacattctttggtagataccatttgctactagtttattttgtggctagaaagtcagttttgtgtgtttttttttttttttatttgaagtgccaaattaactttagtcagaatgtgagcagatggctaagttctctcctccccagaatggattaacagctgcgtggaaagtgggggagagagtggatggagacttttagagatgttaaaactgcagtagaatgaaatgagtcagggagcttcagttagaaaataaagttgaggcagtttttgtgaagataatatggttagggctggagtgcactagtctttttgcttattcattttgcatggttttaaaattaaaaataattccgaagatacaccagctcacaaatgaaaacgtcagcctctgccccaccctccctcctgcccaaagtgaatttggtactcagaaaagaactgtttataccactcacctttctcccagcatgtactcactgtgggcagatgcaccaatacatggtaatcctcttactcattttaagacgtaggaaactcaatattcttctctaaccatatacgatagggctcttcgcttttaatgatatctgggatttctgtggaacttggcaaattttcagagcaccttcactcacataatgtcatttgaacctcacaatgttcttgggatggagtcagttgttcagggtccccgtgtgtgtgataagcagtgctggctggctgtcttcagaactcttggaaatctttacacatgcgagtgctaaccactttgagcaaggctgccttcttgtagatgacttgctgttctttatgacagggatcagtggcatttgtttcctagcagtatttagcacctttttgccaccttggtgaacagaaaattgtattttcctgtctttcatggctgaaaacaaaagtaatgggaattttaaatacgtttgcagaaactgcccctcccctcattgagggtcactgctcaagagtgcaggagtggactctccactgatgggtctccctccccatcctggtttccaccccgggctggctagctctgttggtttgaagactgacagccagcctggctcattctcattattggctagttagctttctttatcaacctgctcactcacaaatgtgtgccctcagccagagagtaagaaagcccaaatctgttacagcttctaaaaaaatagatttctaatttgtcctactcatgttaggagcattatctttgaaggtaaaacatagtgtatcattgtgtaaactcccaggcttgatgtagcagaagagatcatttctggaggcttcagcaatggaatttagcattataagagagattggacaaaccagtccaaagtggtccgagttcttaaatccaggtagggaactcactcttctttcttctctggacctaattgggcattgggctttagtgagaccacagaccaggcccgtctctcctgtaggcttttaattcaatggcaactctatttcaaagaataaaagcctttggagagttgcggcagttctgggggcgggctcaggagagtccatagatcagccgtaactggaacgtagaatctacgtctgcctctgaatggacttcccacctcctctctcttgctctgatgcttgcctctgggcctctccatgcccaaggtggtctttcatccttgacaggctggtaatgtgctggccacctccagctcctgcatcgagtctgtaaaccagagctggttctcatggccttcgtcacgataccaggatacggaggggagcccagggccatccatacccaccccagggtaacggggctggcctggcattagtcattatttagtttccaggccaaccatccagatagagattccctctttcctttgagcagtgctctcaagagctccgtgcctgtccacaatgacctagagtgcatcctgctcattgtcagtgtagcccctcgcccctatattcatccaggatacttggaagtgctaaaataggaagggattcggctttcaactttgctaccatcttccctgaagcaggaaaatgaacatggacttaaatgttctttgaaaaaaccaaagttttaagatttgctgtgtgatgaagtgacagggagggccggagtcagcaggtgccagactttctgttctgtctgccatgggtttgtccagctcaggtagctctaggagcaccatcctgccctagcagagcccaggccttgccctcatgaagcatcattgaaatagcaggagcatgttgatttcttggttaggttgcattataataacaagagtcagaacattaattcgaaacaacttgcagtatgcatttcttcacaccagtacattcttaagtgtacttgtttataaggaataacataaactaatctgtacctttatatatatgtgtgtgtacatatatacatatataaactgtatagtgtacatggtaatgatttattgctatgccccagatccttaatgtagttctcatcctccgcatgccctcagccacaagcgggtgactgactgttccctgatgatttggcccacctcctgtgtttggacctctagggaggagggttttggtcatactctccttatcctcgtgcacagaaatgctcagggtccccatgtgcctgttgttcagccctctctcttgttccctttctgagcatgtggtccttccccaggctgtgggacagctgccttcccacgaaagtgtaaagcagtattaagatcattactgcatgtgccctaaaaacccaagttttctattcccttaggacagaaaattgcatgtgaggtgggataatcgagtttcagtgacccacgtcagttacacattaaagccagaccccatgataaaattccacaaaatggaaataaaactcaaatttctttagcattgtgtaaataaatctgaatgtgtttaactttgtactggtaattttctgtatatttggaatatttgggttaaaaataaaacagactggactttgttacctgacctac

SEQ ID NO: 1896 - DNA, 532 bp, Homo Sapiens
  NM_002964
gagaaaccagagactgtagcaactctggcagggagaagctgtctctgatggcctgaagctgtgggcagctggccaagcctaaccgctataaaaaggagctgcctctcagccctgcatgtctcttgtcagctgtctttcagaagacctggtggggcaagtccgtgggcatcatgttgaccgagctggagaaagccttgaactctatcatcgacgtctaccacaagtactccctgataaaggggaatttccatgccgtctacagggatgacctgaagaaattgctagagaccgagtgtcctcagtatatcaggaaaaagggtgcagacgtctggttcaaagagttggatatcaacactgatggtgcagttaacttccaggagttcctcattctggtgataaagatgggcgtggcagcccacaaaaaaagccatgaagaaagccacaaagagtagctgagttactgggcccagaggctgggcccctggacatgtacctgcagaataataaagtcatcaatacctcaaaaaaaaaa

SEQ ID NO: 1897 - DNA, 1089 bp, Homo Sapiens
  NM_002970
ggccaatgttcaaatgcgcagctcttagtcgcgggccgactggtgtttatccgtcactcgccgaggttccttgggtcatggtgccagcctgactgagaagaggacgctcccgggagacgaatgaggaaccacctcctcctactgttcaagtacaggggcctggtccgcaaagggaagaaaagcaaaagacgaaaatggctaaattcgtgatccgcccagccactgccgccgactgcagtgacatactgcggctgatcaaggagctggctaaatatgaatacatggaagaacaagtaatcttaactgaaaaagatctgctagaagatggttttggagagcaccccttttaccactgcctggttgcagaagtgccgaaagagcactggactccggaaggacacagcattgttggttttgccatgtactattttacctatgacccgtggattggcaagttattgtatcttgaggacttcttcgtgatgagtgattatagaggctttggcataggatcagaaattctgaagaatctaagccaggttgcaatgaggtgtcgctgcagcagcatgcacttcttggtagcagaatggaatgaaccatccatcaacttctataaaagaagaggtgcttctgatctgtccagtgaagagggttggagactgttcaagatcgacaaggagtacttgctaaaaatggcaacagaggagtgaggagtgctgctgtagatgacaacctccattctattttagaataaattcccaacttctcttgctttctatgctgtttgtagtgaaataatagaatgagcacccattccaaagctttattaccagtggcgttgttgcatgtttgaaatgaggtctgtttaaagtggcaatctcagatgcagtttggagagtcagatctttctccttgaatatctttcgataaacaacaaggtggtgtgatcttaatatatttgaaaaaaacttcattctcgtgagtcatttaaatgtgtacaatgtacacactggtacttagagtttctgtttgattcttttttaataaactactctttgatttaaaaaaaaaaaaaaaaaaaaaaaaaaa

SEQ ID NO: 1898 - DNA, 5556 bp, Homo Sapiens
  NM_002971
tttctcgctcgctcccgttccccggacgcggcggatgagccggccccgctggggaaggctccgggcggcggcgggcggccgggaggaggctgcgtgctcggggctggggctgcgagcggggtgattttgtattaaaatgaggaggaggaagaagaggcacccacagcggcagcggcggcggcggcggcagcagcagcaggagcagcggcggagagggctgcagcccgggcggacgcgcggagccgagcggggcacggcggcggcagcgacagcggccgggatgagtcaactaataatttaatgggggcagagacggcagcgaggggtagagctagcgagggagagagcgagagaagcagccccgtccggggactcgcgctcacactcacgcacacacacaaacacacacacacctctccctgtgccacccagcaacacccggcctcgtcacaacaacaacagccgcggccgccctctatcctgcccgggggcccagccgaaagccagggcgactctagaggacgctgcccgcccccctctttcatttcgggaaactcctgatcagttttgtcggggtttctgggtttcttttcccccaaagtcctagtgccattgtggtgctcgttgtttacctcggactctggacgagtgagagcttggcgactttttggggggagggggcggggagtttgtcgctgcctaggcggtggaggtggctgggggtgccttctgatcttcctcctcctccccctccccccgaacctcttctctcctcacttgctgggaccccagacgctcacagccccgcgtcaatgggcagggagagggtccttgcggctgttgtcagcgagggcagaatcaaaagtggcattttagtgcctttccggggcttttctcgcgaccccctgccccccaccctcgctgtcccccgctagatgccctcgttgggggtgcgaggctgtggggaaaagtttaaggtttgttaatattagtcgcgattgttggcgaggggggtgggggtgattggaagggaggcgaggtggccttcccaatgcgcgttattcggggttattgaagaataatattgcaagtgacagccagaagtagactttctgtcctcacaccgaagaacccgagtgagcaggagggagggagagacgcgaagagaccttttttcctttttggagaccttgtccgcagtgatttttttttttttaagagaatcctcagtcaccacgtcgtttccccagcaccatcacagtgtacagctcataacgggttttgctttgtttttacgatttccccccaacgaatcacttgtcagatcaattttatcttcttcctcctccctgcttcccactctcccctcctccccatcgcaaaccctgttctctgaggttagacattttacaaacccctatatgttggttttcgaattgtgattttttttttaaacccctttctcatggctactcttctagacgtttatttctgcccttcccccgcttaggggggcgggggtaggggaaaggaaaataatacaatttcaggggaagtcgccttcaggtctgctgcttttttatttttttttttttaattaaaaaaaaaaaggacatagaaaacatcagtcttgaacttctcttcaagaacccgggctgcaaaggaaatctcctttgtttttgttatttatgtgctgtcaagttttgaagtggtgatctttagacagtgactgagtatggatcatttgaacgaggcaactcaggggaaagaacattcagaaatgtctaacaatgtgagtgatccgaagggtccaccagccaagattgcccgcctggagcagaacgggagcccgctaggaagaggaaggcttgggagtacaggtgcaaaaatgcagggagtgcctttaaaacactcgggccatctgatgaaaaccaaccttaggaaaggaaccatgctgccagttttctgtgtggtggaacattatgaaaacgccattgaatatgattgcaaggaggagcatgcagaatttgtgctggtgagaaaggatatgcttttcaaccagctgatcgaaatggcattgctgtctctaggttattcacatagctctgctgcccaggccaaagggctaatccaggttggaaagtggaatccagttccactgtcttacgtgacagatgcccctgatgctacagtagcagatatgcttcaagatgtgtatcatgtggtcacattgaaaattcagttacacagttgccccaaactagaagacttgcctcccgaacaatggtcgcacaccacagtgaggaatgctctgaaggacttactgaaagatatgaatcagagttcattggccaaggagtgccccctttcacagagtatgatttcttccattgtgaacagtacttactatgcaaatgtctcagcagcaaaatgtcaagaatttggaaggtggtacaaacatttcaagaagacaaaagatatgatggttgaaatggatagtctttctgagctatcccagcaaggcgccaatcatgtcaattttggccagcaaccagttccagggaacacagccgagcagcctccatcccctgcgcagctctcccatggcagccagccctctgtccggacacctcttccaaacctgcaccctgggctcgtatcaacacctatcagtcctcaattggtcaaccagcagctggtgatggctcagctgctgaaccagcagtatgcagtgaatagacttttagcccagcagtccttaaaccaacaatacttgaaccaccctccccctgtcagtagatctatgaataagcctttggagcaacaggtttcgaccaacacagaggtgtcttccgaaatctaccagtgggtacgcgatgaactgaaacgagcaggaatctcccaggcggtatttgcacgtgtggcttttaacagaactcagggcttgctttcagaaatcctccgaaaggaagaggaccccaagactgcatcccagtctttgctggtaaaccttcgggctatgcagaatttcttgcagttaccggaagctgaaagagaccgaatataccaggacgaaagggaaaggagcttgaatgctgcctcggccatgggtcctgcccccctcatcagcacaccacccagccgtcctccccaggtgaaaacagctactattgccactgaaaggaatgggaaaccagagaacaataccatgaacattaatgcttccatttatgatgagattcagcaggaaatgaagcgtgctaaagtgtctcaagcactgtttgcaaaggttgcagcaaccaaaagccagggatggttgtgcgagctgttacgctggaaagaagatccttctccagaaaacagaaccctgtgggagaacctctccatgatccgaaggttcctcagtcttcctcagccagaacgtgatgccatttatgaacaggagagcaacgcggtgcatcaccatggcgacaggccgccccacattatccatgttccagcagagcagattcagcaacagcagcagcaacagcaacagcagcagcagcagcagcaggcaccgccgcctccacagccacagcagcagccacagacaggccctcggctccccccacggcaacccacggtggcctctccagcagagtcagatgaggaaaaccgacagaagacccggccacgaacaaaaatttcagtggaagccttgggaatcctccagagtttcatacaagacgtgggcctgtaccctgacgaagaggccatccagactctgtctgcccagctcgaccttcccaagtacaccatcatcaagttctttcagaaccagcggtactatctcaagcaccacggcaaactgaaggacaattccggtttagaggtcgatgtggcagaatataaagaagaggagctgctgaaggatttggaagagagtgtccaagataaaaatactaacacccttttttcagtgaaactagaagaagagctgtcagtggaaggaaacacagacattaatactgatttgaaagactgagataaaagtatttgtttcgttcaacagtgccactggtatttactaacaaaatgaaaagtccaccttgtcttctctcagaaaacctttgttgttcattgtttggccaatgaatcttcaaaaacttgcacaaacagaaaagttggaaaaggataatacagactgcactaaatgttttcctctgttttacaaactgcttggcagccccaggtgaagcatcaaggattgtttggtattaaaatttgtgttcacgggatgcaccaaagtgtgtaccccgtaagcatgaaaccagtgttttttgttttttttttagttcttattccggagcctcaaacaagcattataccttctgtgattatgatttcctctcctataattatttctgtagcactccacactgatctttggaaacttgccccttatttaaaaaaaaaaaagaaaaaaaagagtttgttactctattgtatgttacaaaagaactatagactgtggaatgcagtttaaagatgacatatgccaacaaatgccttgtattatatggcactgccgtaattcaaatttgtttttattttggaaataaaagttcactgtacttttttttcattctcattgttacatgattttttaaaaaaaggaaaagaaaatgtgaaacacaatttagtcctcattatttatttgtagatcctgcagcatcatgttgtaattaattttttggaagtttccgttaaatgtaatattgcttctcttgttaccatactgattcttttctatttataaatgtattttgatgggcagtaaaacaaagtgtcttaaaagttttaaatagagaaaatgtgctttacacagttgcctataaaaagtgctctatgttatccaagcaattcatactataagcttcactcttattgttgtatgcaatttttactatcatgcaaataagcttaggtaaataaaactaatagatcaccttagaaaattatgcaattaatgtgaaaataattgatgtttgcaatgtgtcttcctttggtttacaatcaattttaaagctacatctgtataaaatttctgtataaaggtgtatttcttttttatgagtttatggctatgaaaacagctattttgttacagctggctgtttttataagtgtatcacaattttctttatgcagaaatgttctgactaggagtggttattgactgtaactacacaattaaaattgtttgtatcgtatgacatggtagggtttgtctgcttatgtgaagtaactaaaggagtcaaaggatggccctctcatttaggtgcatgttaataacttgttatttcactgattttaaaaagagcaattgacaagttacttgaaacactgtaaatttaaatcacaaacacatgctcatttttaaataggtatgaaatttcacaatgaaaataacctgtttggttaacattttgcttaataagtagagataggatggtcaaaagactctccgacaaaaacaaatccagtctctagcagttatgttgttagaatgga

SEQ ID NO: 1899 - DNA, 8033 bp, Homo Sapiens
  NM_002972
gggcgggccggctggctgggaagatggcggcgggaacctgggccgccgccgccgccgccgccgccgccgcggagcgaaccaggggtgtccggggtgcgcggtccagggccggggccgggccatgagcgcgccgtcctcgagtccccgagccgcggagcccgcccgcgcccctcgggccgccccgcgtccctcgccatggcgcggctcgcggactacttcgtgctggtggcgttcgggccgcacccgcgcgggagtggggaaggccagggccagattctgcagcgcttcccagagaaggactgggaggacaacccattcccccagggcatcgagctgttttgccagcccagcgggtggcagctgtgtcccgagaggaatccaccgaccttctttgttgctgtcctcaccgacatcaactccgagcgccactactgcgcctgcttgaccttctgggagccagcggagccttcacaggaaacgacgcgcgtggaggatgccacagagagggaggaagagggggatgagggaggccagacccacctgtctcccacagcacctgccccatctgcccagctgtttgcaccgaagacgctggtactggtgtcgcgactcgaccacacggaggtgttcaggaacagccttggcctcatctatgccatccacgtggagggcctgaatgtgtgcctggagaacgtgattgggaacctgctgacgtgcactgtgcccctggctgggggctcgcagaggacgatctctttgggggctggtgaccggcaggtcatccagactccactggccgactcgctgcccgtcagccgctgcagcgtggccctgctcttccgccagctaggcatcaccaacgtgctgtctttgttctgtgccgccctcacggagcacaaggttctcttcctgtcccggagctaccagcggctcgccgatgcctgtaggggcctcctggcactgctgtttcctctcagatacagcttcacctatgtgcccatcctgccggctcagctgctggaggtcctcagcacacccacgcccttcatcattggggtcaacgcggccttccaggcagagacccaggagctgctcgatgtgattgttgctgatctggatggagggacggtcaccattcctgagtgtgtgcacattccacccttgccagagccactgcagagtcagacgcacagtgtgctgagcatggtcctggacccggagctggagttggctgacctcgccttccctccgcccacgacatccacctcctccctgaagatgcaggacaaggagctgcgcgcggtcttcctgcggctgttcgctcagctgctgcagggctatcgctggtgcctgcacgtcgtgcgcatccacccggagcctgtcatccgcttccataaggcagccttcctgggccagcgtgggctggtagaggacgatttcctgatgaaggtgctggagggcatggcctttgctggctttgtgtcagagcgtggggtcccataccgccctacggacctgttcgatgagctggtggcccacgaggtggcaaggatgcgggcggatgagaaccacccccagcgtgtcctgcgtcacgtccaggaactggcagagcagctctacaagaacgagaacccgtacccagccgtggcgatgcacaaggtacagaggcccggtgagagcagccacctgcgacgggtgccccgacccttcccccggctggatgagggcaccgtgcagtggatcgtggaccaggctgcagccaagatgcagggtgcacccccagctgtgaaggccgagaggaggaccaccgtgccctcagggccccccatgactgccatactggagcggtgcagtgggctgcatgtcaacagcgcccggcggctggaggttgtgcgcaactgcatctcctacgtgtttgaggggaaaatgcttgaggccaagaagctgctcccagccgtgttgagggccctgaaggggcgagctgcccgccgctgcctcgcccaggagctgcacctgcatgtgcagcagaaccgtgcggtcctggaccaccagcagtttgactttgtcgtccgtatgatgaactgctgcctgcaggactgcacttctctggacgagcatggcattgcggcggctctgctgcctctggtcacagccttctgccggaagctgagcccgggggtgacgcagtttgcatacagctgtgtgcaggagcacgtggtgtggagcacgccacagttctgggaggccatgttctatggggatgtgcagactcacatccgggccctctacctggagcccacggaggacctggcccccgcccaggaggttggggaggcaccttcccaggaggacgagcgctctgccctagacgtggcttctgagcagcggcgcttgtggccaactctgagtcgtgagaagcagcaggagctggtgcagaaggaggagagcacggtgttcagccaggccatccactatgccaaccgcatgagctacctcctcctgcccctggacagcagcaagagccgcctacttcgggagcgtgccgggctgggcgacctggagagcgccagcaacagcctggtcaccaacagcatggctggcagtgtggccgagagctatgacacggagagcggcttcgaggatgcagagacctgcgacgtagctggggctgtggtccgcttcatcaaccgctttgtggacaaggtctgcacggagagtggggtcaccagcgaccacctcaaggggctgcatgtcatggtgccagacattgtccagatgcacatcgagaccctggaggccgtgcagcgggagagccggaggctgccgcccatccagaagcccaagctgctgcggccgcgcctgctgccgggtgaggagtgtgtgctggacggcctgcgcgtctacctgctgccggatgggcgtgaggagggcgcggggggcagtgctgggggaccagcattgctcccagctgagggcgccgtcttcctcaccacgtaccgggtcatcttcacggggatgcccacggaccccctggttggggagcaggtggtggtccgctccttcccggtggctgcgctgaccaaggagaagcgcatcagcgtccagacccctgtggaccagctcctgcaggacgggctccagctgcgctcctgcacattccagctgctgaaaatggcctttgacgaggaggtggggtctgacagcgccgagctcttccgtaagcagctgcataagctgcggtacccgccggacatcagggccacctttgcgttcaccttgggctctgcccacacacctggccggccaccgcgagtcaccaaggacaagggtccttccctcagaaccctgtcccggaacctggtcaagaacgccaagaagaccatcgggcggcagcatgtcactcgcaagaagtacaacccccccagctgggagcaccggggccagccgccccctgaggaccaggaggacgagatctcagtgtcggaggagctggagcccagcacgctgaccccgtcctcagccctgaagccctccgaccgcatgaccatgagcagcctggtggaaagggcttgctgtcgcgactaccagcgcctcggtctgggcaccctgagcagcagcctgagccgggccaagtctgagcccttccgcatttctccggtcaaccgcatgtatgccatctgccgcagctacccagggctgctgatcgtgccccagagtgtccaggacaacgccctgcagcgcgtgtcccgctgctaccgccagaaccgcttccccgtggtctgctggcgcagcgggcggtccaaggcggtgctgctgcgctctggaggcctgcatggcaaaggtgtcgtcggcctcttcaaggcccagaacgcaccttctccaggccagtcccaggcggactcgagtagcctggagcaggagaagtacctgcaggctgtggtcagctccatgccccgctacgccgacgcgtcgggacgcaacacgcttagcggcttctcctcagcccacatgggcagtcacgttcccagccccagagccagggtcaccacgctgtccaaccccatggcggcctcggcctccagacggaccgcaccccgaggtaagtggggcagtgtccggaccagtggacgcagcagtggccttggcaccgatgtgggctcccggctagctggcagagacgcgctggccccaccccaggccaacgggggccctcccgacccgggcttcctgcgtccgcagcgagcagccctctatatccttggggacaaagcccagctcaagggtgtgcggtcagaccccctgcagcagtgggagctggtgcccattgaggtattcgaggcacggcaggtgaaggctagcttcaagaagctgctgaaagcatgtgtcccaggctgccccgctgctgagcccagcccagcctccttcctgcgctcactggaggactcagagtggctgatccagatccacaagctgctgcaggtgtctgtgctggtggtggagctcctggattcaggctcctccgtgctggtgggcctggaggatggctgggacatcaccacccaggtggtatccttggtgcagctgctctcagaccccttctaccgcacgctggagggctttcgcctgctggtggagaaggagtggctgtccttcggccatcgcttcagccaccgtggagctcacaccctggccgggcagagcagcggcttcacacccgtcttcctgcagttcctggactgcgtacaccaggtccacctgcagttccccatggagtttgagttcagccagttctacctcaagttcctcggctaccaccatgtgtcccgccgtttccggaccttcctgctcgactctgactatgagcgcattgagctggggctgctgtatgaggagaagggggaacgcaggggccaggtgccgtgcaggtctgtgtgggagtatgtggaccggctgagcaagaggacgcctgtgttccacaattacatgtatgcgcccgaggacgcagaggtcctgcggccctacagcaacgtgtccaacctgaaggtgtgggacttctacactgaggagacgctggccgagggccctccctatgactgggaactggcccaggggccccctgaacccccagaggaagaacggtctgatggaggcgctccccagagcaggcgccgcgtggtgtggccctgttacgacagctgcccgcgggcccagcctgacgccatctcacgcctgctggaggagctgcagaggctggagacagagttgggccaacccgctgagcgctggaaggacacctgggaccgggtgaaggctgcacagcgcctcgagggccggccagacggccgtggcacccctagctccctccttgtgtccaccgcaccccaccaccgtcgctcgctgggtgtgtacctgcaggaggggcccgtgggctccaccctgagcctcagcctggacagcgaccagagtagtggctcaaccacatccggctcccgtcaggctgcccgccgcagcaccagcaccctgtacagccagttccagacagcagagagtgagaacaggtcctacgagggcactctgtacaagaagggggccttcatgaagccttggaaggcccgctggttcgtgctggacaagaccaagcaccagctgcgctactacgaccaccgtgtggacacagagtgcaagggtgtcatcgacttggcggaggtggaggctgtggcacctggcacgcccactatgggtgcccctaagactgtggacgagaaggccttctttgacgtgaagacaacgcgtcgcgtttacaacttctgtgcccaggacgtgccctcggcccagcagtgggtggaccggatccagagctgcctgtcggacgcctgagcctcccagccctgcccggctgctctgcttccggtcgttaccgaccactaggggtgggcagggccgccccggccatgtttacagccccggccctcgacagtattgaggccccgagcccccagcacttgtgtgtacagcccccgtccccgccccgccccgcccggccggccctaacttattttggcgtcacagctgagcaccgtgccgggaggtggccaaggtacagcccgcaatgggcctgtaaatagtccggccccgtcagcgtgtgctggtccagccagcggctgcaggcgagtttctagaaccagagtctatataaagagagaactaacgccacgctcctgtgcctgccttccccactccccggctgcctgctctcggcctacccagagggtcccatctgcccctatccaggcccacctggcgggaggttggcatctttctcgtgagcctctcctggtgcctgggtccacccagctcggcctgcatgtccctgggagtgactttgctctgggggcggatcgagcaggaggcttcactggggacttgcttgattccctccacgcctcagggctggtctaggggccggcacggctggagaggaagcccccatccctacccaggggatgcagaagctgacctcacagaggcttgggggtgaaagggtgggtggtcatttgaccccagaaggctgttgcaggtccagaggacacttgaggtggacgtcagtttctggctagacccgagctgaagggatggaggccggaggcgggggggggggggggacagtgggctcccaggggaatgcaggttgaccacatctggctcctgccaggcaacgagcagcatctggcagagtaaggggccaacgcccatgggggatggaccctctcagttcttgggaattctgccccaaaagtcctttccctggggtctcagagggcccccgtccttcccttcttggtgtcactgtggcccctcactgctcttttcctattcaaacctgagtcccaccaggcccagggcttcacctgctgagctgttgtgtccttgcctgtgacgaggcctggccaggggtgcaggagcagaaggtggggagggttatagacgctgcaaaggccaagagaacatctgagagtggcagctggtgacctggccagaggggctggtgaggggcagagaacctggctagaggctgggtccctcaggtggtcctctcaggtgggaggcgagcagcaggtgtgggtgaggggaaggttctgatgacagctgcagaggcagggcccagtgctggcaggtggggggccaagaccctcccctggtgggacgttgaagccaaggatggccttggaccctgtcaggcccagcatggtcccgccacctcccccaccccacaggtggtgttgggacacctgggcgagatgtgagggtgggctcacttgagccactgaaaccagccaggtcttccctcaggccggacagatggcgcctgaccgaagttcctggcacctggaaaacccacaggtcagagtaaggggagaaaggaccctgccctccctgttccacgtctgtggggggagaggacaaatgccaggcacagggtaggcggcgagaacaaggcactcaatgtgtagctggggcagagactcggcctctggggagctgagcgggttccctccacccccaaccgtggtggaaagacaagctcgctggggcggggtgggggtctggtctccacctgcccctcccactcagccactgaggacaaggtggggcccaggcttctgggagggggagctggcacaaaaggaagtcctggggttgatgtgtttgagcgttaggcgaagtggttccccccatcccccaaacggaaaaatgtcagtatttgctaagctgtagagacctgatgccgtgatgtggcctgttccgcctccacccattacacggggataacgctggggggtggcgggcccacaaaagaggtgctggaggagactctcccacccctggccgggccggggctttggggccggaaggttcacagtacgcggtttgtccgaacgtcacggcttttattgggagttgggggtttggggtgccctgtcaggtgatcagaacattaaaaatggactcaacgtaaaaaaaaaaaaaaaaaa

SEQ ID NO: 1900 - DNA, 9771 bp, Homo Sapiens
  NM_002977
cggggctgctacctccacgggcgcgccctggcaggaggggcgcagtctgcttgcaggcggtcgccagcgctccagcggcggctgtcggctttccaattccgccagctcggctgaggctgggctagcctgggtgccagtggctgctagcggcaggcgtcccctgagcaacaggagcccagagaaaaagaagcagccctgagagagcgccggggaaggagaggcccgcgccctctcctggagccagattctgcaggtgcactgggtggggatgatcggcgggctaggttgcaagcctcttatgtgaggagctgaagaggaattaaaatatacaggatgaaaagatggcaatgttgcctcccccaggacctcagagctttgtccatttcacaaaacagtctcttgccctcattgaacaacgcattgctgaaagaaaatcaaaggaacccaaagaagaaaagaaagatgatgatgaagaagccccaaagccaagcagtgacttggaagctggcaaacagctgcccttcatctatggggacattcctcccggcatggtgtcagagcccctggaggacttggacccctactatgcagacaaaaagactttcatagtattgaacaaagggaaaacaatcttccgtttcaatgccacacctgctttatatatgctttctcctttcagtcctctaagaagaatatctattaagattttagtacactccttattcagcatgctcatcatgtgcactattctgacaaactgcatatttatgaccatgaataacccaccggactggaccaaaaatgtcgagtacacttttactggaatatatacttttgaatcacttgtaaaaatccttgcaagaggcttctgtgtaggagaattcacttttcttcgtgacccgtggaactggctggattttgtcgtcattgtttttgcgtatttaacagaatttgtaaacctaggcaatgtttcagctcttcgaactttcagagtattgagagctttgaaaactatttctgtaatcccaggcctgaagacaattgtaggggctttgatccagtcagtgaagaagctttctgatgtcatgatcctgactgtgttctgtctgagtgtgtttgcactaattggactacagctgttcatgggaaacctgaagcataaatgttttcgaaattcacttgaaaataatgaaacattagaaagcataatgaataccctagagagtgaagaagactttagaaaatatttttattacttggaaggatccaaagatgctctcctttgtggtttcagcacagattcaggtcagtgtccagaggggtacacctgtgtgaaaattggcagaaaccctgattatggctacacgagctttgacactttcagctgggccttcttagccttgtttaggctaatgacccaagattactgggaaaacctttaccaacagacgctgcgtgctgctggcaaaacctacatgatcttctttgtcgtagtgattttcctgggctccttttatctaataaacttgatcctggctgtggttgccatggcatatgaagaacagaaccaggcaaacattgaagaagctaaacagaaagaattagaatttcaacagatgttagaccgtcttaaaaaagagcaagaagaagctgaggcaattgcagcggcagcggctgaatatacaagtattaggagaagcagaattatgggcctctcagagagttcttctgaaacatccaaactgagctctaaaagtgctaaagaaagaagaaacagaagaaagaaaaagaatcaaaagaagctctccagtggagaggaaaagggagatgctgagaaattgtcgaaatcagaatcagaggacagcatcagaagaaaaagtttccaccttggtgtcgaagggcataggcgagcacatgaaaagaggttgtctacccccaatcagtcaccactcagcattcgtggctccttgttttctgcaaggcgaagcagcagaacaagtctttttagtttcaaaggcagaggaagagatataggatctgagactgaatttgccgatgatgagcacagcatttttggagacaatgagagcagaaggggctcactgtttgtgccccacagaccccaggagcgacgcagcagtaacatcagccaagccagtaggtccccaccaatgctgccggtgaacgggaaaatgcacagtgctgtggactgcaacggtgtggtctccctggttgatggacgctcagccctcatgctccccaatggacagcttctgccagagggcacgaccaatcaaatacacaagaaaaggcgttgtagttcctatctcctttcagaggatatgctgaatgatcccaacctcagacagagagcaatgagtagagcaagcatattaacaaacactgtggaagaacttgaagagtccagacaaaaatgtccaccttggtggtacagatttgcacacaaattcttgatctggaattgctctccatattggataaaattcaaaaagtgtatctattttattgtaatggatccttttgtagatcttgcaattaccatttgcatagttttaaacacattatttatggctatggaacaccacccaatgactgaggaattcaaaaatgtacttgctataggaaatttggtctttactggaatctttgcagctgaaatggtattaaaactgattgccatggatccatatgagtatttccaagtaggctggaatatttttgacagccttattgtgactttaagtttagtggagctctttctagcagatgtggaaggattgtcagttctgcgatcattcagactgctccgagtcttcaagttggcaaaatcctggccaacattgaacatgctgattaagatcattggtaactcagtaggggctctaggtaacctcaccttagtgttggccatcatcgtcttcatttttgctgtggtcggcatgcagctctttggtaagagctacaaagaatgtgtctgcaagatcaatgatgactgtacgctcccacggtggcacatgaacgacttcttccactccttcctgattgtgttccgcgtgctgtgtggagagtggatagagaccatgtgggactgtatggaggtcgctggtcaagctatgtgccttattgtttacatgatggtcatggtcattggaaacctggtggtcctaaacctatttctggccttattattgagctcatttagttcagacaatcttacagcaattgaagaagaccctgatgcaaacaacctccagattgcagtgactagaattaaaaagggaataaattatgtgaaacaaaccttacgtgaatttattctaaaagcattttccaaaaagccaaagatttccagggagataagacaagcagaagatctgaatactaagaaggaaaactatatttctaaccatacacttgctgaaatgagcaaaggtcacaatttcctcaaggaaaaagataaaatcagtggttttggaagcagcgtggacaaacacttgatggaagacagtgatggtcaatcatttattcacaatcccagcctcacagtgacagtgccaattgcacctggggaatccgatttggaaaatatgaatgctgaggaacttagcagtgattcggatagtgaatacagcaaagtgagattaaaccggtcaagctcctcagagtgcagcacagttgataaccctttgcctggagaaggagaagaagcagaggctgaacctatgaattccgatgagccagaggcctgtttcacagatggttgtgtacggaggttctcatgctgccaagttaacatagagtcagggaaaggaaaaatctggtggaacatcaggaaaacctgctacaagattgttgaacacagttggtttgaaagcttcattgtcctcatgatcctgctcagcagtggtgccctggcttttgaagatatttatattgaaaggaaaaagaccattaagattatcctggagtatgcagacaagatcttcacttacatcttcattctggaaatgcttctaaaatggatagcatatggttataaaacatatttcaccaatgcctggtgttggctggatttcctaattgttgatgtttctttggttactttagtggcaaacactcttggctactcagatcttggccccattaaatcccttcggacactgagagctttaagacctctaagagccttatctagatttgaaggaatgagggtcgttgtgaatgcactcataggagcaattccttccatcatgaatgtgctacttgtgtgtcttatattctggctgatattcagcatcatgggagtaaatttgtttgctggcaagttctatgagtgtattaacaccacagatgggtcacggtttcctgcaagtcaagttccaaatcgttccgaatgttttgcccttatgaatgttagtcaaaatgtgcgatggaaaaacctgaaagtgaactttgataatgtcggacttggttacctatctctgcttcaagttgcaacttttaagggatggacgattattatgtatgcagcagtggattctgttaatgtagacaagcagcccaaatatgaatatagcctctacatgtatatttattttgtcgtctttatcatctttgggtcattcttcactttgaacttgttcattggtgtcatcatagataatttcaaccaacagaaaaagaagcttggaggtcaagacatctttatgacagaagaacagaagaaatactataatgcaatgaaaaagctggggtccaagaagccacaaaagccaattcctcgaccagggaacaaaatccaaggatgtatatttgacctagtgacaaatcaagcctttgatattagtatcatggttcttatctgtctcaacatggtaaccatgatggtagaaaaggagggtcaaagtcaacatatgactgaagttttatattggataaatgtggtttttataatccttttcactggagaatgtgtgctaaaactgatctccctcagacactactacttcactgtaggatggaatatttttgattttgtggttgtgattatctccattgtaggtatgtttctagctgatttgattgaaacgtattttgtgtcccctaccctgttccgagtgatccgtcttgccaggattggccgaatcctacgtctagtcaaaggagcaaaggggatccgcacgctgctctttgctttgatgatgtcccttcctgcgttgtttaacatcggcctcctgctcttcctggtcatgttcatctacgccatctttggaatgtccaactttgcctatgttaaaaaggaagatggaattaatgacatgttcaattttgagacctttggcaacagtatgatttgcctgttccaaattacaacctctgctggctgggatggattgctagcacctattcttaacagtaagccacccgactgtgacccaaaaaaagttcatcctggaagttcagttgaaggagactgtggtaacccatctgttggaatattctactttgttagttatatcatcatatccttcctggttgtggtgaacatgtacattgcagtcatactggagaattttagtgttgccactgaagaaagtactgaacctctgagtgaggatgactttgagatgttctatgaggtttgggagaagtttgatcccgatgcgacccagtttatagagttctctaaactctctgattttgcagctgccctggatcctcctcttctcatagcaaaacccaacaaagtccagctcattgccatggatctgcccatggttagtggtgaccggatccattgtcttgacatcttatttgcttttacaaagcgtgttttgggtgagagtggggagatggattctcttcgttcacagatggaagaaaggttcatgtctgcaaatccttccaaagtgtcctatgaacccatcacaaccacactaaaacggaaacaagaggatgtgtctgctactgtcattcagcgtgcttatagacgttaccgcttaaggcaaaatgtcaaaaatatatcaagtatatacataaaagatggagacagagatgatgatttactcaataaaaaagatatggcttttgataatgttaatgagaactcaagtccagaaaaaacagatgccacttcatccaccacctctccaccttcatatgatagtgtaacaaagccagacaaagagaaatatgaacaagacagaacagaaaaggaagacaaagggaaagacagcaaggaaagcaaaaaatagagcttcatttttgatatattgtttacagcctgtgaaagtgatttatttgtgttaataaaactcttttgaggaagtctatgccaaaatcctttttatcaaaatattctcgaaggcagtgcagtcactaactctgatttcctaagaaaggtgggcagcattagcagatggttatttttgcactgatgattctttaagaatcgtaagagaactctgtaggaattattgattatagcatacaaaagtgattcagttttttggtttttaataaatcagaagaccatgtagaaaacttttacatctgccttgtcatcttttcacaggattgtaattagtcttgtttcccatgtaaataaacaacacacgcatacagaaaaatctattatttatctattatttggaaatcaacaaaagtatttgccttggctttgcaatgaaatgcttgatagaagtaatggacattagttatgaatgtttagttaaaatgcattattagggagcttgactttttatcaatgtacagaggttattctatattttgaggtgcttaaatttattctacattgcatcagaaccaatttatatgtgcctataaaatgccatgggattaaaaatatatgtaggctattcatttctacaaatgtttttcattcatcttgactcacatgccaacaaggataagacttacctttagagtattgtgtttcatagcctttcttctttcatatccctttttgttcatagaataaccacagaacttgaaaaattattctaagtacatattacactcctcaaaaaaaacaaagataactgagaaaaaagttattgacagaagttctatttgctattatttacatagcctaacatttgactgtgctgcccaaaatactgataatagtctcttaaactcttttgtcaaattttcctgctttcttatgcagtattgtttagtcatcctttcgctgtaagcaaagttgatgaaatccttcctgatatgcagttagttgtttgaccacggtacatacttgagcagataataacttgggcacagtatttattgcatcacttgtatacaatcccgtgtttggcaagctttcaaatcatgtaatatgacagactttacacagatatgtgtttagtatgaataaaaaagcattgaaatagggattcttgccaacttgctctcttgccaccaacttactttcctaaattatggaagtaatcttttttggatatacttcaatgtatacaatgaggaagatgtcaccttctccttaaaattctatgatgtgaaatatattttgcctcaatcaacacagtaccatgggcttctaatttatcaagcacatattcattttgcattagctgtagacatctagttttttgaaaacacctattaatagtaatttgaaaagaaataaccataatgctttttttcgtgagtttatttcaggaatatgagatctttcttctataaagttattcatgcacaggcaaaaattgagctacacaggtagaatgtagttttacttagaagatttttgtgggaggttttgaagcaaatatataaaacaactttcactaatttgctttccatatttaaaaaataataaattacatttatataataaatgtttaaagcacatattttttgttgttctggcaatttaaaaagaaagaggatttaaacgtacctatagaaacaaagatttatggttaaagaatgagatcagaagtctagaatgtttttaaattgtgatatattttacaacatccgttattactttgagacatttgtcctaatctacgtataaaactcaatctagggctaaagattctttataccatcttaggttcattcatcttaggctatttgaaccactttttaatttaatatgaaagacaccatgcagtgttttccgagactacatagatcattttatcacatacctaccaagcctgttggaaataggttttgataatttaagtagggacctatacaaaatatattacatttatcagatttttaaatacattcaattaagaatttaacatcaccttaaatttgaattcaatctaccgttatttcaaactcacaaatataactgcattatgaatacttacataatgtagtaagacaagatgtttgacaggttcgtgtgtaattttctattaatgtttttacattgccttgtttttatgtaaaataaaaaatatgggcaactggtttgttaacaacacaatttcttcttagcatttcaaaaatatatataaagttgttctttttcctatttcatgaactatgtttttttttaaaataacatggttaagttttatatatatttacgtttgtttcaggaatgtctacttgtgactttttatcaattaaaaataatatttggaagaaagagcttattaagtataagcttgaagtaaaattagacctctctttccatgtagattactgtttgtactgatggtttcacccttcagaaggcactgtcatattaatatttaaattttataatcgctgaacttattacacccaacaatacagaaaggcagttacactgaagaacttaacttagaataaaatggaagcaaacaggttttctaaaaacttttttaagtgaccaggtctcgctctgtcacccaggctagagtgcaatggcatgatcatagctctctgcagcctcaactctgggctcaagcaaccctcctgcctcagcctcccaagtagctaagactacaggtacatgccaccatgcctggctaatatttaaatttttgtagataaggggtcttgctatgttgcccaggctagtctcaaactcctggcttcaagtgttcctactgtcatgacctgccaacatgctggggttacaggcatgagccaccatgccccaaacaggtttgaacacaaatctttcggatgaaaattagagaacctaattttagctttttgatagttacctagtttgcaaaagatttgggtgacttgtgagctgtttttaaatgctgattgttgaacatcacaacccaaaatacttagcatgattttatagagttttgatagctttattaaaaagagtgaaaataaaatgcatatgtaaataaagcagttctaaatagctatttcagagaaatgttaatagaagtgctgaaagaagggccaactaaattaggatggccagggaattggcctgggtttaggacctatgtatgaaggccaccaattttttaaaaatatctgtggtttattatgttattatcttcttgaggaaaacaatcaagaattgcttcatgaaaataaataaatagccatgaatatcataaagctgtttacataggattctttacaaatttcatagatctatgaatgctcaaaatgtttgagtttgccataaattatattgtagttatattgtagttatacttgagactgacacattgtaatataatctaagaataaaagttatacaaaataaaaaaaaaaaaa

SEQ ID NO: 1901 - DNA, 2503 bp, Homo Sapiens
  NM_002978
actcgggaaggccacacagccagtgacgaagctgtgattcacacaggcctgggtgactccagcatggctttcctctccaggacgtcaccggtggcagctgcttccttccagagccggcaggaggccagaggctccatcctgcttcagagctgccagctgcccccgcaatggctgagcaccgaagcatggacgggagaatggaagcagccacacgggggggctctcacctccaggctgcagcccagacgccccccaggccggggccaccatcagcaccaccaccaccacccaaggaggggcaccaggaggggctggtggagctgcccgcctcgttccgggagctgctcaccttcttctgcaccaatgccaccatccacggcgccatccgcctggtctgctcccgcgggaaccgcctcaagacgacgtcctgggggctgctgtccctgggagccctggtcgcgctctgctggcagctggggctcctctttgagcgtcactggcaccgcccggtcctcatggccgtctctgtgcactcggagcgcaagctgctcccgctggtcaccctgtgtgacgggaacccacgtcggccgagtccggtcctccgccatctggagctgctggacgagtttgccagggagaacattgactccctgtacaacgtcaacctcagcaaaggcagagccgccctctccgccactgtcccccgccacgagccccccttccacctggaccgggagatccgtctgcagaggctgagccactcgggcagccgggtcagagtggggttcagactgtgcaacagcacgggcggcgactgcttttaccgaggctacacgtcaggcgtggcggctgtccaggactggtaccacttccactatgtggatatcctggccctgctgcccgcggcatgggaggacagccacgggagccaggacggccacttcgtcctctcctgcagttacgatggcctggactgccaggcccgacagttccggaccttccaccaccccacctacggcagctgctacacggtcgatggcgtctggacagctcagcgccccggcatcacccacggagtcggcctggtcctcagggttgagcagcagcctcacctccctctgctgtccacgctggccggcatcagggtcatggttcacggccgtaaccacacgcccttcctggggcaccacagcttcagcgtccggccagggacggaggccaccatcagcatccgagaggacgaggtgcaccggctcgggagcccctacggccactgcaccgccggcggggaaggcgtggaggtggagctgctacacaacacctcctacaccaggcaggcctgcctggtgtcctgcttccagcagctgatggtggagacctgctcctgtggctactacctccaccctctgccggcgggggctgagtactgcagctctgcccggcaccctgcctggggacactgcttctaccgcctctaccaggacctggagacccaccggctcccctgtacctcccgctgccccaggccctgcagggagtctgcattcaagctctccactgggacctccaggtggccttccgccaagtcagctggatggactctggccacgctaggtgaacaggggctgccgcatcagagccacagacagaggagcagcctggccaaaatcaacatcgtctaccaggagctcaactaccgctcagtggaggaggcgcccgtgtactcggtgccgcagctgctctcggccatgggcagcctctgcagcctgtggtttggggcctccgtcctctccctcctggagctcctggagctgctgctcgatgcttctgccctcaccctggtgctaggcggccgccggctccgcagggcgtggttctcctggcccagagccagccctgcctcaggggcgtccagcatcaagccagaggccagtcagatgcccccgcctgcaggcggcacgtcagatgacccggagcccagcgggcctcatctcccacgggtgatgcttccaggggttctggcgggagtctcagccgaagagagctgggctgggccccagccccttgagactctggacacctgaaccagacctgccagggctgtgcgatctcttggcctggtccttgcagctgtggcagcagcaggctccccagcggcccagggtgggccagaccagcagcccaggaagcagcacacgcggccgtggggaggcaggcaccgggcatgtcggcgcctctggtcaaaccacctacactgcctggggtgggtctcaaggaggcccggggcggaggggggttcccgcgtgcacacgagtgcggctggacgtgccgacacgcggtgatgtacccatgctccgtgtgtctgtgtctgcatgtccacacgtctgatgcacctgtgtacgtgtgtcaagcctagccacctcagctgcagggaggcagaaggcaaggcaggccccacggacacacttgggctgctctgaaataaagctgttgactccacctg

SEQ ID NO: 1902 - DNA, 1237 bp, Homo Sapiens
  NM_002985
gctgcagaggattcctgcagaggatcaagacagcacgtggacctcgcacagcctctcccacaggtaccatgaaggtctccgcggcagccctcgctgtcatcctcattgctactgccctctgcgctcctgcatctgcctccccatattcctcggacaccacaccctgctgctttgcctacattgcccgcccactgccccgtgcccacatcaaggagtatttctacaccagtggcaagtgctccaacccagcagtcgtctttgtcacccgaaagaaccgccaagtgtgtgccaacccagagaagaaatgggttcgggagtacatcaactctttggagatgagctaggatggagagtccttgaacctgaacttacacaaatttgcctgtttctgcttgctcttgtcctagcttgggaggcttcccctcactatcctaccccacccgctccttgaagggcccagattctaccacacagcagcagttacaaaaaccttccccaggctggacgtggtggctcacgcctgtaatcccagcactttgggaggccaaggtgggtggatcacttgaggtcaggagttcgagaccagcctggccaacatgatgaaaccccatctctactaaaaatacaaaaaattagccgggcgtggtagcgggcgcctgtagtcccagctactcgggaggctgaggcaggagaatggcgtgaacccgggaggcggagcttgcagtgagccgagatcgcgccactgcactccagcctgggcgacagagcgagactccgtctcaaaaaaaaaaaaaaaaaaaaaaatacaaaaattagccgggcgtggtggcccacgcctgtaatcccagctactcgggaggctaaggcaggaaaattgtttgaacccaggaggtggaggctgcagtgagctgagattgtgccacttcactccagcctgggtgacaaagtgagactccgtcacaacaacaacaacaaaaagcttccccaactaaagcctagaagagcttctgaggcgctgctttgtcaaaaggaagtctctaggttctgagctctggctttgccttggctttgccagggctctgtgaccaggaaggaagtcagcatgcctctagaggcaaggaggggaggaacactgcactcttaagcttccgccgtctcaacccctcacaggagcttactggcaaacatgaaaaatcggcttaccattaaagttctcaatgcaaccataaaaaaaaaa

SEQ ID NO: 1903 - DNA, 2858 bp, Homo Sapiens
  NM_003001
gcgtcacttccgtccagaccggaacccaagatggctgcgctgttgctgagacacgttggtcgtcattgcctccgagcccactttagccctcagctctgtatcagaaatgctgttcctttgggaaccacggccaaagaagagatggagcggttctggaataagaatataggttcaaaccgtcctctgtctccccacattactatctacagttggtctcttcccatggcgatgtccatctgccaccgtggcactggtattgctttgagtgcaggggtctctctttttggcatgtcggccctgttactccctgggaactttgagtcttatttggaacttgtgaagtccctgtgtctggggccagcactgatccacacagctaagtttgcacttgtcttccctctcatgtatcatacctggaatgggatccgacacttgatgtgggacctaggaaaaggcctgaagattccccagctataccagtctggagtggttgtcctggttcttactgtgttgtcctctatggggctggcagccatgtgaagaaaggaggctcccagcatcatcttcctacacattattacattcacccatctttctgtttgtcattcttatctccagcctgggaaaagttctccttatttgtttagatccttttgtattttcagatctccttggagcagtagagtacctggtagaccataatagtggaaaagggtctagttttccccttgtttctaaagatgaggtggctgcaaaaactccccttttttgcccacagcttgcctactctcggcctagaagcagttattctctctccatattgggctttgatttgtgctgagggtcagcttttggctccttcttcctgagacagtggaaacaatgccagctctgtggcttctgccctggggatgggccgggttggggggtgggttggtgaggctttgggtgccactgcctgtgggttgctggcttaaaggacaattctcttcattggtgagagcccaggccattaacacctacacagtgttattgaaagaagagaggtgggggtggaggggaattagtctgtcccagctagagggagataaagagggctagttagttcttggagcagctgcttttgaggagaaaatatatagctttggacacgaggaagatctagaaaattatcattgaacatattaatggttatttctttttcttggatttccagaaaagcctcttaattttatgctttctcatcgaagtaatgtaccctttttttctgaaactgaattaaatactcattttatctttgactctccttgaaatctagagaaaccaagaaaatggctgttgggaaggaaccaatttcctcctcttccctcgggtctcaggcatttacatcctccctctccccgcaatctgacctttaccaggagggaaacagttctcctacatctcatcattggaaaagttttcagggaatcagatagaacttagccagagatttaaatatcacagaaaagcctcagagaaggaaggagaaaaagaaaagaagtgacgcatgtagagtgcttttgggttataggcaccaaaatcccattaaggactgattataagcttcatggtacagttcagcaaattatgattcattgaggggcacagaggaccagtgttggtgacagctaggggatgatgacctgaggttataggcttggggtgaatgaagcatagagtttttttttaaaaaagaagggattgttgaaaacctggcaaaaatgtataatttaatgagaaaacttgctgcttttaaaatccatataggccaggctttagcaggcatgctgttttgatagtttttgggaactctggaataagagacttatctcatctgtcacttcgagttgttggccagccagttaaagctgtgggtcgaagaggggaaatgttaactggctggtgtcaattggataggaagaccttagttaaggtggggacccgctgttttaacagtcttcattcagggtcccaaatagtatttggctttaagtaatgattggttttccctttttactagaggggccctgggaagtccttgtacctttcctccattttaaaccagctgttctctactttgtccttggaatgagggacaagtgatcatgacagaacactttgtcattgggactgggaaaggtttggcaagggcattaaatttaacagccagtgccaggaaaatataaaatggggtcaatgataaacagctgttagaggctggaaaatgggtagggcagttgaattttttggtggtttcgtaccatttgggtgattgaagcatggtagtgggtgggtggggggtgtgacagagcatcatgtttgttattctgccttaaatttctacttactgtctttttcttctctgtcttccaatcactttaatatcttcaattttcaaactatatttgtacttgggcttagatagaaagtcttacacaagcatagtatcttctactttggttttccctaccttttcttccccaccttctccaaacacacatatacatactctactcaattctatttctgattttgtagttgttagttgtccatgctcaggataaaaaatgagtgggtagggttgagggactggttctttgaggttctgccctttttccatgattcagaccaactttctcttggtcatttctggagtataactgactcaattcttgtaaaaatgtgttccacccaaaccactgtatgttcttttccctactttattttctcctaccttccttctcctaattgtgttacaagaggcagccatagcaagaatggaaaatccagatcagtaaaagattcaacaaaaaaaa

SEQ ID NO: 1904 - DNA, 3185 bp, Homo Sapiens
  NM_003005
ggcagtgagactgtaagcagtctgggttgggcagaaggcagaaaaccagcagagtcacagaggagatggccaactgccaaatagccatcttgtaccagagattccagagagtggtctttggaatttcccaactcctttgcttcagtgccctgatctctgaactaacaaaccagaaagaagtggcagcatggacttatcattacagcacaaaagcatactcatggaatatttcccgtaaatactgccagaatcgctacacagacttagtggccatccagaataaaaatgaaattgattacctcaataaggtcctaccctactacagctcctactactggattgggatccgaaagaacaataagacatggacatgggtgggaaccaaaaaggctctcaccaacgaggctgagaactgggctgataatgaacctaacaacaaaaggaacaacgaggactgcgtggagatatacatcaagagtccgtcagcccctggcaagtggaatgatgagcactgcttgaagaaaaagcacgcattgtgttacacagcctcctgccaggacatgtcctgcagcaaacaaggagagtgcctcgagaccatcgggaactacacctgctcctgttaccctggattctatgggccagaatgtgaatacgtgagagagtgtggagaacttgagctccctcaacacgtgctcatgaactgcagccaccctctgggaaacttctcttttaactcgcagtgcagcttccactgcactgacgggtaccaagtaaatgggcccagcaagctggaatgcttggcttctggaatctggacaaataagcctccacagtgtttagctgcccagtgcccacccctgaagattcctgaacgaggaaacatgacctgccttcattctgcaaaagcattccagcatcagtctagctgcagcttcagttgtgaagagggatttgcattagttggaccggaagtggtgcaatgcacagcctcgggggtatggacagccccagccccagtgtgtaaagctgtgcagtgtcagcacctggaagcccccagtgaaggaaccatggactgtgttcatccgctcactgcttttgcctatggctccagctgtaaatttgagtgccagcccggctacagagtgaggggcttggacatgctccgctgcattgactctggacactggtctgcacccttgccaacctgtgaggctatttcgtgtgagccgctggagagtcctgtccacggaagcatggattgctctccatccttgagagcgtttcagtatgacaccaactgtagcttccgctgtgctgaaggtttcatgctgagaggagccgatatagttcggtgtgataacttgggacagtggacagcaccagccccagtctgtcaagctttgcagtgccaggatctcccagttccaaatgaggcccgggtgaactgctcccaccccttcggtgcctttaggtaccagtcagtctgcagcttcacctgcaatgaaggcttgctcctggtgggagcaagtgtgctacagtgcttggctactggaaactggaattctgttcctccagaatgccaagccattccctgcacacctttgctaagccctcagaatggaacaatgacctgtgttcaacctcttggaagttccagttataaatccacatgtcaattcatctgtgacgagggatattctttgtctggaccagaaagattggattgtactcgatcgggacgctggacagactccccaccaatgtgtgaagccatcaagtgcccagaactctttgccccagagcagggcagcctggattgttctgacactcgtggagaattcaatgttggctccacctgccatttctcttgtgacaacggctttaagctggaggggcccaataatgtggaatgcacaacttctggaagatggtcagctactccaccaacctgcaaaggcatagcatcacttcctactccaggggtgcaatgtccagccctcaccactcctgggcagggaaccatgtactgtaggcatcatccgggaacctttggttttaataccacttgttactttggctgcaacgctggattcacactcataggagacagcactctcagctgcagaccttcaggacaatggacagcagtaactccagcatgcagagctgtgaaatgctcagaactacatgttaataagccaatagcgatgaactgctccaacctctggggaaacttcagttatggatcaatctgctctttccattgtctagagggccagttacttaatggctctgcacaaacagcatgccaagagaatggccactggtcaactaccgtgccaacctgccaagcaggaccattgactatccaggaagccctgacttactttggtggagcggtggcttctacgataggtctgataatgggtgggacgctcctggctttgctaagaaagcgtttcagacaaaaagatgatgggaaatgccccttgaatcctcacagccacctaggaacatatggagtttttacaaacgctgcatttgacccgagtccttaaggtttccataaacacccatgaatcaaagacatggaattaccttagattagctctggaccagcctgttggacccgctctggaccaaccctgtttcctgagtttgggattgtggtacaatctcaaattctcaacctaccaccccttcctgtcccacctcttctcttcctgtaacacaagccacagaagccaggagcaaatgtttctgcagtagtctctgtgctttgactcacctgttacttgaaataccagtgaaccaaagagactggagcatctgactcacaagaagaccagactgtggagaaataaaaatacctctttattttttgattgaaggaaggttttctccactttgttggaaagcaggtggcatctctaattggaagaaattcctgtagcatcttctggagtctccagtggttgctgttgatgaggcctcttggacctctgctctgaggcttccagagagtcctctggatggcaccagaggctgcagaaggccaagaatcaagctagaaggccacatgtcaccgtggaccttcctgccaccagtcactgtccctcaaatgacccaaagaccaatattcaaatgcgtaattaaaagaattttccccaaaaaaaaaaaaaaaa

SEQ ID NO: 1905 - DNA, 893 bp, Homo Sapiens
  NM_003009
gcgggttccttatcctccgccttggcgcctctccgcccaccgcccaccgcccctccctggcattggttggcgccaggggaagccgaggctccatcctttctgcgcaggttcccgccgcactcgcgcagacctagcgcgtccaggtgggaggttagtgtggcccgggcgtccgctcctcagcggatgtggcagccccgagccatggctctcgccgtccgagtcgtttattgtggcgcttgaggctacaagtccaagtatcttcagctcaagaagaagttagaagatgagttccccggccgcctggacatctgcggcgagggaactccccaggccaccgggttctttgaagtgatggtagccgggaagttgattcactctaagaagaaaggcgatggctacgtggacacagaaagcaagtttctgaagttggtggccgccatcaaagccgccttggctcagggctaatgcgccctgaaggcagagtccagggaccttgacccagcccctctcagcagacgcttcatgataggaaggactgaaaagtcttgtggacacctggtctttccctgatgttctcgtggctgctgttgggggcagagattgacgcccccggtctttgcctctgagcgggagagtctgtgtgtatgtgtcttccccggaatccacaccaccccaccctcctcctgtcccgtggtttcatcatatctctttgcataccccatgtcttccccagttgtcccctggagtttggggggacatcccgcctcaggcatccttctcaaggggaagccaagagaggcatcaggatgggtgggtttctgattgtggcaacgtttgcaaccgttcacgattcaataaatattggatgaatttaaccgaaaaaaaaaaaaaaa

SEQ ID NO: 1906 - DNA, 2936 bp, Homo Sapiens
  NM_003011
gtaggaggaggtggaggaggaggcggctcgggagagcgagcagcgagctggctggatcgccgagcgcgagtgagggagccgagccgcccgccgccgccgcctccgcctcccctccgcgaacaggagcccgggccggggcccggcacgccgccccagcccgtccctcggcgtcaggccgcgagggtagcgcgcgcgagcgagcgagggggagggagagcgagcgagcgccgggaggaggcggccggaccgagcgggcgcccgcgcgtgtggcgtgaggggaagccgcttgcccgcccccttcgccttcccttctctccccctccccgctccccccccgaccgcggagcagcaccatgtcggcgccggcggccaaagtcagtaaaaaggagctcaactccaaccacgacggggccgacgagacctcagaaaaagaacagcaagaagcgattgaacacattgatgaagtacaaaatgaaatagacagacttaatgaacaagccagtgaggagattttgaaagtagaacagaaatataacaaactccgccaaccattttttcagaagaggtcagaattgatcgccaaaatcccaaatttttgggtaacaacatttgtcaaccatccacaagtgtctgcactgcttggggaggaagatgaagaggcactgcattatttgaccagagttgaagtgacagaatttgaagatattaaatcaggttacagaatagatttttattttgatgaaaatccttactttgaaaataaagttctctccaaagaatttcatctgaatgagagtggtgatccatcttcgaagtccaccgaaatcaaatggaaatctggaaaggatttgacgaaacgttcgagtcaaacgcagaataaagccagcaggaagaggcagcatgaggaaccagagagcttctttacctggtttactgaccattctgatgcaggtgctgatgagttaggagaggtcatcaaagatgatatttggccaaacccattacagtactacttggttcccgatatggatgatgaagaaggagaaggagaagaagatgatgatgatgatgaagaggaggaaggattagaagatattgacgaagaaggggatgaggatgaaggtgaagaagatgaagatgatgatgaaggggaggaaggagaggaggatgaaggagaagatgactaaatagaacactgatggattccaaccttcctttttttaaattttctccagtccctgggagcaagttgcagtcttttttttttttttttttttttttccctcttgtgctcagtcgccctgttcttgaggtctcttttctctactccatggttctcaatttatttggggggaaataccttgagcagaatacaatgggaaaagagtctctacccctttctgttcgaagttcatttttatcccttcctgtctgaacaaaaactgtatggaatcaacaccaccgagctctgtgggaaaaaagaaaaacctgctcccttcgctctgctggaagctggagggtgctaggcccctgtgtagtagtgcatagaattctagcttttttcctcctttctctgtatattgggctcagagagtacactgtgtctctatgtgaatatggacagttagcatttaccaacatgtatctgtctactttctcttgtttaaaaaaagaaaaaaaaacttaaaaaaatggggttatagaaggtcagcaaagggtgggtttgagatgtttgggtgggttaagtgggcattttgacaacatggcttctcctttggcatgtttaattgtgatatttgacagacatccttgcagtttaagatgacacttttaaaataaattctctcctaatgatgacttgagccctgccactcaatgggagaatcagcagaacctgtaggatcttatttggaattgacattctctattgtaattttgttcctgtttatttttaaattttctttttgtttcactggaaaggaaagatgatgctcagttttaaacgttaaaagtgtacaagttgctttgttacaataaaactaaatgtgtacacaaaggatttgatgcttttctctcagcataggtatgcttactatgaccttccaagtttgacttgtataacatcactgtcaaactttgtcaccctaacttcgtattttttgatacgcactttgcaggatgacctcagggctatgtggattgagtaatgggatttgaatcaatgtattaatatctccatagctgggaaacgtgggttcaatttgccattggtttctgaaagtattcacatcatttgggataccagatagctcaatactctctgagtacattgtgcccttgatttttatctccaagtggcagtttttaaaattggccttttacctggatataaattaattgtgcctgccaccaccatccaacagacctggtgctctaatgccaagttatacacgggacagttgctggcatgtcttcattggctatataaaatgtggccaagaagataggctctcagtaagaagtctgatggtgagcagtaactgtccctgctttctggtataaagctctcaaatgtgaccatgtgaatctgggtgggataatggactcagctctgtctgctcaatgccattgtgcagagaagcaccctaatgcataagctttttaatgctgtaaaatatagtcgctgaaattaaatgccactttttcagaggtgaattaatggacagtctggtgaacttcaaaagctttttgatgtataaaacttgataaatggaactattccatcaataggcaaaagtgtaacaacctatctagatggatagtatgtaatttctgcacaggtctctgtttagtaaatacatcactgtataccgatcaggaatcttgctccaataaaggaacataaagattttttttggaaaaaaaaaaaaaaaaaa

SEQ ID NO: 1907 - DNA, 2005 bp, Homo Sapiens
  NM_003013
caacggctcattctgctcccccgggtcggagccccccggagctgcgcgcgggcttgcagcgcctcgcccgcgctgtcctcccggtgtcccgcttctccgcgccccagccgccggctgccagcttttcggggccccgagtcgcacccagcgaagagagcgggcccgggacaagctcgaactccggccgcctcgcccttccccggctccgctccctctgccccctcggggtcgcgcgcccacgatgctgcagggccctggctcgctgctgctgctcttcctcgcctcgcactgctgcctgggctcggcgcgcgggctcttcctctttggccagcccgacttctcctacaagcgcagcaattgcaagcccatccctgccaacctgcagctgtgccacggcatcgaataccagaacatgcggctgcccaacctgctgggccacgagaccatgaaggaggtgctggagcaggccggcgcttggatcccgctggtcatgaagcagtgccacccggacaccaagaagttcctgtgctcgctcttcgcccccgtctgcctcgatgacctagacgagaccatccagccatgccactcgctctgcgtgcaggtgaaggaccgctgcgccccggtcatgtccgccttcggcttcccctggcccgacatgcttgagtgcgaccgtttcccccaggacaacgacctttgcatccccctcgctagcagcgaccacctcctgccagccaccgaggaagctccaaaggtatgtgaagcctgcaaaaataaaaatgatgatgacaacgacataatggaaacgctttgtaaaaatgattttgcactgaaaataaaagtgaaggagataacctacatcaaccgagataccaaaatcatcctggagaccaagagcaagaccatttacaagctgaacggtgtgtccgaaagggacctgaagaaatcggtgctgtggctcaaagacagcttgcagtgcacctgtgaggagatgaacgacatcaacgcgccctatctggtcatgggacagaaacagggtggggagctggtgatcacctcggtgaagcggtggcagaaggggcagagagagttcaagcgcatctcccgcagcatccgcaagctgcagtgctagtcccggcatcctgatggctccgacaggcctgctccagagcacggctgaccatttctgctccgggatctcagctcccgttccccaagcacactcctagctgctccagtctcagcctgggcagcttccccctgccttttgcacgtttgcatccccagcatttcctgagttataaggccacaggagtggatagctgttttcacctaaaggaaaagcccacccgaatcttgtagaaatattcaaactaataaaatcatgaatatttttatgaagtttaaaaatagctcactttaaagctagttttgaataggtgcaactgtgacttgggtctggttggttgttgtttgttgttttgagtcagctgattttcacttcccactgaggttgtcataacatgcaaattgcttcaattttctctgtggcccaaacttgtgggtcacaaaccctgttgagataaagctggctgttatctcaacatcttcatcagctccagactgagactcagtgtctaagtcttacaacaattcatcattttataccttcaatgggaacttaaactgttacatgtatcacattccagctacaatacttccatttattagaagcacattaaccatttctatagcatgatttcttcaagtaaaaggcaaaagatataaattttataattgacttgagtactttaagccttgtttaaaacatttcttacttaacttttgcaaattaaacccattgtagcttacctgtaatatacatagtagtttacctttaaaagttgtaaaaatattgctttaaccaacactgtaaatatttcagataaacattatattcttgtatataaactttacatcctgttttacctataaaaaaaaaaaaaaa

SEQ ID NO: 1908 - DNA, 3144 bp, Homo Sapiens
  NM_003017
atgtgattccagtatggcgtataaataaaggcgaggagaaggcggtggtccgccatttcgtggacgccgggtgagtgagagagttggttggtgttgggccggaggaaagcgggaagactcatcggagcgtgtggatttgagccgccgcattttttaaccctagatctcgaaatgcatcgtgattcctgtccattggactgtaaggtttatgtaggcaatcttggaaacaatggcaacaagacggaattggaacgggcttttggctactatggaccactccgaagtgtgtgggttgctagaaacccacccggctttgcttttgttgaatttgaagatccccgagatgcagctgatgcagtccgagagctagatggaagaacactatgtggctgccgtgtaagagtggaactgtcgaatggtgaaaaaagaagtagaaatcgtggcccacctccctcttggggtcgtcgccctcgagatgattatcgtaggaggagtcctccacctcgtcgcagatctccaagaaggagaagcttctctcgcagccggagcaggtccctttctagagataggagaagagagagatcgctgtctcgggagagaaatcacaagccgtcccgatccttctctaggtctcgtagtcgatctaggtcaaatgaaaggaaatagaagacagtttgcaagagaagtggtgtacaggaaattacttcatttgacaggagtatgtacagaaaattcaagttttgtttgagacttcataagcttggtgcatttttaagatgttttagctgttcaaatctgtttgtctcttgaaacagtgacacaaaggtgtaattctctatggtttgaaatggatcatacgaggcatgtaataccaagaattgttactttacaatgttcccttaagcaaaattgaatttgctttgaacttttagttatgcacagactgataataaacctctaaacctgcccagcggaagtgtgtttttttttaaatttaaatacagaaacaactggcaaaaattgaactaagatttacttttttttccatagctgggatataggctgcagctatagttgaacaagcagtctttaaaaactgctgtgaaacacaggccatcagggaaaacgaaatgctgcactattaaattagaggtttttgaaaaatccaactctcatcctgggcagaggttgcctagttggtatagaatgttaagtttcaagaaagtttacctttgctttaggtcataagttccttatttgattgctgtatatggatacatggctgttcgtgacattctttatgtgcaaatttgtgatttcaaaaatgtcctgccagtttaagggtacattgtagagccgaactttgagttactgtgcaagatttttttttcatgctgtcatttgtaatatgttttgtgagaatccttgggattaaagttttggttacaaattgttctttaacttgaaagcctgtttttccttgcaaactcaaatctgtgagcttggtaccaagtccaggtataacattcctattggaagccatacttatattttcttgtaaagtgcttttgaattaataaaatattagcataattgtgtatagtcagttgaacccactgttaccattgttcttatcccatgggaagcagttggttacacgattcttattttataagaaacagctgagaggcactatggattagtcttctgaagtgaaggaaatatagatgtcacctaagtgatagttaacccattttttttttttttaggcatagaagccagttcagggtccataatatttagtgaccaacattttaaagtatagcagcaacctggttcttaaacacaaagtaagttgcccattaacaaatggcttttatctttagcatgaaaactttccacaggtctaaaaattgcttccattttataatttgaggtgttgcatgggaattctaagctgatccatcatgatgtaaaagttcacaatatggttcaaatgtaacagtgcagaattgaatatggaggcatgcataaccttcctcttagaaaatggcaggtgttgtaatttcaaatttttgtgcaattagattaaatcataatgcaacagtcttgtggcttagtttccttaaatatgctcttaagatagttttggattatgcggtattgactgtcttaaatatgaaagataagtcattgcattaagagttcaagctaaatggatacattaagatacagttcctaaacaaattatttatttccaccttttacacaaatcttgggagaattggtgtcaggaaggttcagccttaaagttaagcatgttcaagaaagacacttttcagacagcctgtttatttactgagagctctggcattgggcattttgtctttagtattctcacatagcctacaacctgttcctgttaggaacaagccaagatagctaagaagttacggaagccatgcaatatgtcaattacattgctttttataaatggacaacttatgtgggcatttttgggcagtatatgacttccttgcaggctcttaagttggaagggtttctgtaaaaaggacagttacgggtataatatggctaagagaaataatacagaacctgaaataaaagtaacttcaccagggagttatcctgacttaggtgacatacagtcccagttggcagttactttaaccaggagccctagcataacctcaagactcttagaaactttagaacatggaaattgttaaaagctttgaattgcacatttagattgtggctattaggaatttttaaagttgtaattcctaaaataacaggtcacactaaccggtcttgtccatattcagggttgagtgtaaaaatgaaaggaatcacaaaactgaacttagacctgtggtttaaggatcaaggtgttcactagaagtcactgttactaatacttgatgacaatgtaaagaaacattaaggattatatttgattgttttcaaagacactggctggatgtggtggctcacacttgtaattcctagcactttgggaggctagggcgggtgggaggatctcttgaagccaggagttggagaccagtctgcccaacatggcaagattcacatttctattaaaaggaatatttagtttga

SEQ ID NO: 1909 - DNA, 6021 bp, Homo Sapiens
  NM_003028
gcgccgccgggacgggcacgggcgcgcgggctccggcgggcgccggctgccttcctccgtcgctcgctgtctctcccggccgcattctcctccgctgcggggccgagctctccccagcgctcgcaggaaggaagaagggagccgaggacgccgagaagttcccgcggcagccgcggatcccggccaaggcggaggctgcggctccgacggggcaggagcgcgatccacggcgaggggcgtacggccaaagggtccgcggcgtggagcgctcggaccttccgctctcccccgggcgtgggccgggaccccatgagacgcgcccacgaggggcgcgagattcctagcttgggcggcgctaggcggagggaggtgttgcagccgccggagccagagagctgccggcaggaggcggcggcggcaagaacttgaacttggcgtcgggagcgggcgccccggacgccccccgccggggccggggcgccgagggacctgcgccgcagcgctgccccccgaatggccgcggcggcggaccgggctcccgcgccgcggccctaggcggcctctcgccatggccaagtggctaaacaagtacttcagcttgggcaacagcaagaccaagagccccccgcagccgccgcggccagactaccgcgagcagcggcgccgaggcgagcggccttcgcagcccccccaggccgtgccgcaggcctcctccgccgcctcggcgtcctgcggtccggccaccgcctcctgcttctcagcctcttcgggctcgctgcccgacgacagcggcagcaccagcgacctcatccgcgcctaccgcgcgcagaaggagcgagacttcgaggacccctacaacgggcctggctcgtcgctgcgcaaactgcgcgccatgtgccgcctggactactgcggcggcagcggggagccaggcggggtccagcgcgccttctcggcctcgtccgcgtcgggcgccgcgggctgttgctgcgcctcctcgggcgcgggggccgccgcgtcctcgtcctcgtcctccggctctccgcatctctaccgcagcagcagcgagcggcggcccgccacgccggccgaggtgcgctacatctcccccaagcaccgcctcatcaaagtggagagcgccgcgggcggtggggccggggaccccctggggggcgcctgcgcgggcggccgcacctggagcccgacggcctgcggaggcaagaaactgctcaacaagtgcgccgcctcagccgcggaggagagcggggccggcaagaaggacaaggtgaccatagccgatgactactcagatccctttgatgccaagaatgatctcaagagcaaagcaggaaagggggagagtgctggctacatggagccctatgaggcacagaggatcatgacagaatttcagaggcaggaaagtgtccggtcccagcataaaggtatccagttatatgacaccccttacgaacctgaaggccaaagtgttgactcagactcggagagcacagtcagcccccgactgcgggagagcaagctgccccaggatgacgacaggcccgccgatgagtacgaccagccttgggagtggaaccgggtcaccatcccagccctggcagcacagtttaatggcaacgagaagcggcagtcatccccctcaccttcgcgggaccggcggcgccagcttcgtgcccctggagggggctttaagcctatcaaacatgggagccctgagttctgcgggatcctaggagaaagggtggatcctgccgtccccctggagaagcaaatatggtatcacggagccatcagcagaggagacgccgagaacctgctgcgactctgcaaggagtgtagctaccttgtccggaacagccagaccagcaagcatgactactccctctccctgaggagcaaccagggttttatgcacatgaaactggccaaaaccaaagagaaatacgttctgggtcagaacagccctccgttcgacagtgtcccggaagtcatccactactacaccaccagaaagctacccatcaaaggggctgagcacttgtccctcctctatcccgtggctgtgaggaccctgtgagcggaccagacctgccctgctctgtgacagagcctgagacttggaggtgccagaggccccccaccaaccagcccagccactgttgctggctgtgtcgtttgtgttgtgtgtatggtactagcacaccactgcatgtctctagaatgctgttgccacttacgggggctggagaaggcctggataaagacagaagggcggcaacacaccaccccagcccccacccccaccctctccttgagtttctgtgaattaaaatatttgcaaatccaaagagatgccttccaggatgaacaaaggcagaccagctccgaggggcggggtagggtggggcgggagctccctggctgacatctctttgttctccagctgtctcaaattcacacctctgtacagggcaaagttttcccacaggagcccccctactgatgctgggagccaaatgctggtgctttgagagtcccggaggccccggggttcccgccccgctggtgtgtatatgtgtgtctgtgtgagtgtgtgtgtgagtacagatgtgagaaggtggtcacacacagatgggtaagcccactgatctacttgtagtcactcagtgtaatcattaggctatcttcaaggaatcattgtgcagtcaaaaagaggattcaattatttatgaatagggtgtgtaaataaaatagtcatttaatatatagccttatccttttttgatatactgcagagggtctctgagggggcagttctggtttcactcccagagcaaggcgtgtctcctctgggcttgctgctgtggcaggccccagggaggggagggaggccgaggcctcagctccagccctcagcagctctggacacaagagccgtctgctctgacaactgggctgaggcagtcggtagcactctgggagtcaacccagagctcagagttcaggcttcagcagtggacatagtcaggagcctccagtgttgaccaaaaaaccagtctttccctcctgcagtgggacgtctgtgttgacacccccccaacccctggacacagcacccagctggctacaaagggctctctccccactatctgttagcaccacctgggaggtatttggcatgtagggaaagggagacagagaaggaacgtcatttgcccaaagccacacagctcaccagcagcagagcggttctgcagccaatgctctttcgttggttctgcatggccttgctgtcaccctgcccatggaggagggagaatcctgacctcccagggacatagagccctcagtggtccacactgcttccacacacaagaacacctacacacacacacacacacacacacacagccctcagtggtccacactgcttccacacacaagaacacctacacacacacacacacacacacacagccctcagtggtccacactgcttccacacacaagaacacctacacacgcacacgcacacgcgacctctctcttgcttgccatagcagggtcctcccacacaggccaggcagccccgatgaggctaagagtttctcagctctcctgctttttccacccacccagtagcatgaagatgtggctgccctctcctgaatgagatacaagggttccagagccttcgccaggcaccagctggtctgaatgaactagaagtttgacgactgtcatccctggcccacctgggcagagcacaaggggccgagtttgaatgtcatcagcaggttcagacatcagcgctgctcatgtctttagagactgtttggaggtggttccagctcactgttcacatgcagagacacaggcccggagaaggaggactcgccaaggccacgtgtcgagctgggactgagccctgcccctttaggtagctgcgtggacttcagcggtttgtgcaaagccctgcccttggtgacccgcctttagtgaccagtctgcctcttgggtcttcctcccaggccttgtctggcacgtccacgtggcccagccctcatagagaccacgctggctgtggcctgggtttaatctcttaaagaagccaatcctttccttgcctgtttggcatttcctaaaacatccctcaatgagggaggaaggcagggacaccctggaacgattcgtgctttcctttgggggagtgggaaggtaggtgggaaatgacaagatgagtgaggagttggcacttggccaaacagaggagcctggaccccaaggcttattctcagaggaggcccaagagaggctgaggaagagggggaacaaccctccggcgggggaggagggtgagacctcacactggcaagttcaggtccagccacttcctgaggctgctgggtggggccgcacctcacggtccttccctgtagaccatcttcccgggcacattgctcctcagaaaaggctctgggagggtctcagtggaagctggcagctgtgccctctggccctgacttggcctcttagggtattcctgggaccctccctctgtccctggccttcgtcttcctgaagtttccctgggaggcccaacctcctgcccctctcagggacagaggccagcagaggagccagcttacaggatgggagctgctgaaaagaatttttttcccttaattttatgaacctctccctcttcttcctctaattgtgaccgtttcctgtgtcagcctgtattcatgttttcttggacatctaacaattgaaacagcttttccctttcagaaacactcacattcaggttactggctttggtttggtttttgttttgggtttgttttttttttttttcatctgctgccaattaattggggaaaaaattgagctggatttctttgagagaaaagaaaagctcctgccacacaacgtcgcgccctcggcattttgtctgagaacctccagcactagcggctgtttctgtgtctcccttctttgctggctttattattgaccataatgcctgcccacttgagcaactctgtccttgagcgctgaggagtcaagggcccttctggcagccccccaaacaggatggcgcccacagaaagaaaggaggctttgtaggggaagagggccccaccgcctgccagtcccgtcctgaagtcagaagaatggcccaggctgacaccctctcctggagagaggctcacagcgtagctgttcccaggaaaggggtgcaaagactccgaggcttcaggaggcaggccctgtcctcacagggcggctgtgggccggggcccctctgtggcctgagagtgagcaggagggaaacctgaagcagctacccgcaaggcgtccggtcaacagggtggagctgcaggctccctctgcccattcccagaaccagcggccccctttgtaagatgctgaacacgaagttccggtagctccccagacgctgtctcagaagtggtgatatcattgaccaagggcctggcaaggaccggcagccagggtccccatttgctcttgcagccctagggactgtgcaggtagaagccctgccagcagagcaggctggcgtttggtgttggcccacagacacccgtgaagggtcatggccgaatcaggcagctgtccagccaactgtctctccacccttccagaattggtgatcagcgaagaccaaattcggcaagccatccagagggagtgcagggcgcacagtcttagatgtgggcgcacctcccagaaccccacggggacttgttcacaggcgcgcttgcaggagggcaagccccttggtcctggaacacaggtgccccttggcctttccacctccctccttggggctgtttgcatccctgccaggagccttaaaccagccacctactgctgaagtctcttgtaacattccaaatctatgtgacacactgtataatgatgaatatttaatgtgaagctcttaatatactacaagtgtcttgttta

SEQ ID NO: 1910 - DNA, 4295 bp, Homo Sapiens
  NM_003032
gaggaggttcctgtagggcggcacaaccagggagggcgtggaagctctgcatcccttctcccataccttgctctacacatctcttcatctgtatcctctgcagcatccttgatgataaaccagtaaatatgagttttgatcatcctgagaaaaatgggccttggcctgcagacccaataaaccttccctcccatggataatagtgctaattcctgaggacctgaagggcctgccgcccctgggggattagccagaagcaggcttgttttcctgctcagaacaaagtgacttccctgaacacatcttcattatgattcacaccaacctgaagaaaaagttcagctgctgcgtcctggtctttcttctgtttgcagtcatctgtgtgtggaaggaaaagaagaaagggagttactatgattcctttaaattgcaaaccaaggaattccaggtgttaaagagtctggggaaattggccatggggtctgattcccagtctgtatcctcaagcagcacccaggacccccacaggggccgccagaccctcggcagtctcagaggcctagccaaggccaaaccagaggcctccttccaggtgtggaacaaggacagctcttccaaaaaccttatccctaggctgcaaaagatctggaagaattacctaagcatgaacaagtacaaagtgtcctacaaggggccaggaccaggcatcaagttcagtgcagaggccctgcgctgccacctccgggaccatgtgaatgtatccatggtagaggtcacagattttcccttcaatacctctgaatgggagggttatctgcccaaggagagcattaggaccaaggctgggccttggggcaggtgtgctgttgtgtcgtcagcgggatctctgaagtcctcccaactaggcagagaaatcgatgatcatgacgcagtcctgaggtttaatggggcacccacagccaacttccaacaagatgtgggcacaaaaactaccattcgcctgatgaactctcagttggttaccacagagaagcgcttcctcaaagacagtttgtacaatgaaggaatcctaattgtatgggacccatctgtataccactcagatatcccaaagtggtaccagaatccggattataatttctttaacaactacaagacttatcgtaagctgcaccccaatcagcccttttacatcctcaagccccagatgccttgggagctatgggacattcttcaagaaatctccccagaagagattcagccaaaccccccatcctctgggatgcttggtatcatcatcatgatgacgctgtgtgaccaggtggatatttatgagttcctcccatccaagcgcaagactgacgtgtgctactactaccagaagttcttcgatagtgcctgcacgatgggtgcctaccacccgctgctctatgagaagaatttggtgaagcatctcaaccagggcacagatgaggacatctacctgcttggaaaagccacactgcctggcttccggaccattcactgctaagcacaggctcctcactcttctccatcaggcattaaatgaatggtctcttggccaccccagcctgggaagaacattttcctgaacaattccagcctgctccttttactctaggggcctctgtcagcaagaccatggggacttcaagagcctgtggtcaggaaatcaggtccagccttccctgtagccagacagtttatgagcccagagcctcctgccacacacatgcacacatatctagcattctttccagacagcatcctccccgccttccaccttggtagatgcaaggtctatctctcccatcagggctgccaaagctgggctttgtttttcccagcagaatgatgccattctcacaaaccaatgctctatattgcttgaagtctgcatctaaatattgatttcacgttttaaagaaattctcttaaattacaattgtgcccaatgcagggtggctctggggggcaagtaggtggtacaggggattggaaacatgctccgcgcctccagagaaaagttgctcccgaggtccatgcccctggaacgtgttcctatcactctggctggttgggctggtccttagactgggtgcttatgattaaagggtcttggttagcccactttccctctccatgtggagatggaaggtagagaaggatacagtgtctatcctcaagttgctacggttcagtgagagaggcagacatctgaacaggcaggtaggattcagtgtgctcagtgcactggggatttggagagagatgggcttgctctctctgtgcacccaggagggccacgcacttaaaactgtgtttgtggatcagagaaggctttatagcacagggggcattcagatgagtcttagaggaagagaagaaacatggcaagcagattacatctgagccgtttgaattgtgtttttctttcttcccatgtttattttctaagatctacctgaacttagagactcaagatatttttttaggaaacctcctacccatgtctgaggtagcaagtgcagcctcacgacagataccaggcaatccagagccacaaaacgtgattcctccaggctctgcctggcctgaccctgtcctgtcagctgggtttacataccagtcccattcttccttttcaatacctacccccaaatcttctcctaaccaccatctgttttttttttttaaagcattttttgctttaaaagcatcctgaccccaatttctttgagctcacgggccttttgctgaaggtctctcagggtgtagtggtgtggctctctggacttaacgtcactctcagaggtcagaaccttggagatcagaactgattctcaccaggtgtgagaggtgtggtagcagattgcaatgctctgcacctcttccttgcaagtgagcaacttcaggctctctgggcagaggctggcccactgtagtttgcagacatgctctccagatggttttactaagtcccctctccctgatagggaatcctgctggaccagcgcagccctggtgtggagaggttaaaagacttgcacaggatcaccaagtcatgctgtagagccaggattcctagacccagggctctgcactctcaaggctggccccatgtgctcaaggggatctaatgtttgggctccaaactaaccatctcggagctgggctcctcatttactgccaaaccctcagcttatgtagctagaaagggccctggagtgagaaagcctggattttcaaattgatgctcccctactgactagctgtgccactctgggcaaatgctcttccttgagcctgtttccacacctgtaaagtggggatgatgatcctatctcactgcttttgtgaggattacaggaaagcacctgtcctggctctgtacctggcacgtagtaggtgctcagttcatgctggtttccttcctgcctttagtagggacctgctctgtgctcacacctcggctgcatgcaccctgctgtgacggaggctagtgtggaagaggtcctgtcctcagggaattaactgtcttattgggagacaacaactgtcctccttggaacacccaagaaaccatgcaaagcagtggacaacacagaacacgccctcctcctcgctgcctgcagctccaatctgattctgcttgggaatgggcggagcacgtgggctgcttaactgctgtataggacaagccccttacccctctctgggcccatgaattcctggcttggtttatgttctgatttgacacactgattttaatcttcgaatcatgacactgagtgcagaggaggtggcattccgacagcaggacatacatgttggtgtgaagactgggacgacactgggtagaatctagtttttaattattattaatataaaggatcaaattaatttaaatatgattctgaagtctacagaacttttagttctgtgctgtctatgtggacactttggtaaaatgcaaattatgatatggacgttatcattggtctggtgagatgtttcatatttgtgacagttaatttaaaaattatgagttaatgctgcctgtgtctatggggttctgtcttctttgatagccatctattcatctggatcatgggaccctctctaatccttccaccaatcaaataagctattgctattggtttggagttgagatatcagtctcggaaacttctgaaaaatgctaataattacccaaggattatgtcaaattttaaaataaatgtgtgtgtgtttctttaaaaaaaaaaaaaaaa

SEQ ID NO: 1911 - DNA, 9737 bp, Homo Sapiens
  NM_003034
ggggggggttgcctggcggcgcagcagcgcgggaggcggcgaagggcgcaggagcatcgctcggaggggacaaggggacgccacgggccacatgtttaggagggagccgagccttctcccggaccctcgccgagggcgaccgtgatgctgcagaaccggcgggagcgactcgccgccgccgctctctgcgcactcggagaccccagcgcccgccttctgcaggggaagcgaccatggccatagatcgtgacttcacccccagccacttcccctagaaagaaatccttggaaaagttgcatttgaaaaaatccttgcgctgacctttggggccgacggggccgaagaagcgtgcgtgcgtttgcaagtaagagaaccaaaggtgtgtgtgcatggggggctggcggtgggggaccctccgctgccacttcgcctagctttgtgctgaggccccggcccccgcccctgggacgccggggctgcgatgagcccctgcgggcgggcccggcgacaaacgtccagaggggccatggctgtactggcgtggaagttcccgcggacccggctgcccatgggagccagtgccctctgtgtcgtggtcctctgttggctctacatcttccccgtctaccggctgcccaacgagaaagagatcgtgcagggggtgctgcaacagggcacggcgtggaggaggaaccagaccgcggccagagcgttcaggaaacaaatggaagactgctgcgaccctgcccatctctttgctatgactaaaatgaattcccctatggggaagagcatgtggtatgacggggagtttttatactcattcaccattgacaattcaacttactctctcttcccacaggcaaccccattccagctgccattgaagaaatgcgcggtggtgggaaatggtgggattctgaagaagagtggctgtggccgtcaaatagatgaagcaaattttgtcatgcgatgcaatctccctcctttgtcaagtgaatacactaaggatgttggatccaaaagtcagttagtgacagctaatcccagcataattcggcaaaggtttcagaaccttctgtggtccagaaagacatttgtggacaacatgaaaatttataaccacagttacatctacatgcctgccttttctatgaagacaggaacagagccatctttgagggtttattatacactgtcagatgttggtgccaatcaaacagtgctgtttgccaaccccaactttctgcgtagcattggaaagttctggaaaagtagaggaatccatgccaagcgcctgtccacaggactttttctggtgagcgcagctctgggtctctgtgaagaggtggccatctatggcttctggcccttctctgtgaatatgcatgagcagcccatcagccaccactactatgacaacgtcttacccttttctggcttccatgccatgcccgaggaatttctccaactctggtatcttcataaaatcggtgcactgagaatgcagctggacccatgtgaagatacctcactccagcccacttcctaggaacaatggaagaagaaaggactgaaccagggtatttttgttaggttttctatgtgactccaagagggaatggtcaagttgtttcatgagtttgcatgggcccttggaaaaacaggaaaggagcaatgaagatccaagcaaaactttactttcagcgttggcttggaggacaaataagaaatgaaacatcctatgaaatactttatagcacatggcagatttgcaactagtaaaatgctggtgaaatgctgttggtaaagcacatggttcaaatctagaagatgcagttcaaaaacaagacagactcgagttgttagggctgaggaaccaatcaaggtagaacaaagaaaatgttggggtaaaagtgttgctgattgtcaacacaaactggcttaataatattaataagaacctgtcttattaagactggctttagaaccgtaggtttttttaaaaaattattatttatttttgccctctttggggaagtgggtgggtagatttaaaaaatcccttcctgagtaataaagatacaaaatgttactgctgataattgtgatttgttgagccacgtctatattaactatagctcccctctatttttaaaattttacataagaattgcttcttcctcttttgtcaagtccacagagacaatgtgaagcattattgaatttagactgtgttgcttcatagtctggataacaggagccactttccttcctcagaatttaggacataaacccaattttaggtctgcattatgtaagcctgtttgcattgtcatttttattttagtgcaaaagactaccaatatgagtgaattatttgtttgtaaattggcataattgtcttcataatttaatgttcagaaatgcagtaaagcacgttgatgaaaagcttagtctctgtggaagacagaccagaagacaaatcccttttctatctactgtggcatattcactgcaaggtaaaggacatgtatgcatacatgcaagaatgaattgagcgaaactttgaatatgtttcctcttttgagctattgttatttagtagttacctaaaaaagaatacatttttactagtataccattaaaaatgtaaaaggcttaacatgtatgcatacatgtagacacacatacacacacacaaagttaaacaaagctcattactgtgcaactatgaaagctgaactcatatgacctggtatggcaaaaatttgtaaccagtgttggagaatcacaaatgtgttatgcactatccattacatgttgatataagacaaccgagctcactggttgccgcacataatacccatagcagcacaagatgcaagtcttacccccaaatgcttacccggaatgagcagaattgtcttactcatcctgattttacccaaaatctcatgaatgggcttgctgttgagcgtggtcacacaaggtatagtttgtacaagtaaagaaatgtgaattagtagctatttatttccttagtagcaggtaggactacttagcttgttacaacagctttgatacacagtaagaaaactctactgacagattacaagcagccaaatgtgtttacatttcagagaagggtaagggaagcctctcgttgtcttcatactttggaatgtcttaagctaaaatgtgacactagagttcaatttcttttttattttaaatgtcactaaattgtaggtaaactgtaccaaaaagttctagtttaattttaacagtaaaaactcagcataccatgttaccacgtaaacaataatggctggtattttctgtgggttaatttaacatgacataaacataggaaagcccttggcaaaattctacatcattgaagtagaccatttctaaatgcaattaaatagtgaggttattataaaaattagaatttaaaatatgacttgttgatagtgcagattataatgttacttagaaagttaagaattcgagagtaatgatgctattggagaactggtttgctatacggcagcaaaaacataatgagaatgtaccatgaagaaattgtgttaaatattcactttgagtgaaactttaaatatgtttcctcttttgagctactgttatttagcagttacctaaaaaagaatacatttttactagtctaccattaaaaatataaaaggcttaacaaaaacgcatataaaagttaataaaatgttactcagattagtactttaattgttaaaatgtaattaatgagctccatagagcccatacatcacagttccattgaaaatatcatctggactagaatctcttaaacccaggaagtggaggttgcagtgagccaagatggtgccactgcactccagcctgggtgacagggcaagaccctgtctcaaaaaaaaaaaaaagaaaagaaaaagaaagaaaatattatgtggaaatttttcatctttttatgatgcctgggatagatttatgcagtagatttatatataatgtttagtttacaaacttgtgaaactatttcatgtgggttctgaaaggcaaaacagaaatggccagtgctggtgatgtttgattagaccagctcttctcagctggggtgattcattatccctctctggtgacatttggcaatgtctggagaccagagacattttttattttcatgactcaagggtgctaatagcatgtacttagtagaggttagggatcctgctaaagatcttacaatgcacaagtcagcctctcacagcaaaataattatccaggctgagatgtcagtagtatcaaggttgacatctcagacctggattagacctggattagaccaaaatgaaattttgattgttccaccttgtcttcacttaaagatagatatacatgctcacagcattcaaaatatgactacaatttaatgaaaatattttcttatggtagattacaactcactagatacaccatacatatgccttttggacataattggttagataggagtgtgtgtgtgtgtgtgtgtgtgtgtgtgtgtgtgtgtgtgtgtgtagcatgaagttaggcatctctatccttaactgtgctatgtgttcctaagtaaggacctcgctagaatcatcctgtagagtgctctggaatactctattattaagatcttcaattctaagctcccattatctttctttgtttatctgaaattaagaccttcagaattaggcctggtacttttccagatttgatcagttacattttgatataactgactcttaaaattcagcttagaagacattcaataagaaaatctttaatcacttttggtgatgcacctgccaagagggggcatcactttgtaccatcagactaattaaaaaaattgttgtgtagtcataaaaattaggctgatccataggggcaaaaggaagggtgaagagactaaaaactagtaccctgatagaattttagtttttattagcctcgatttgagaactgcattgattccaaagatcatgaaggtaggtgaaggattaagtcattccataattaagaaaagtaatgtttatatgaaagatttttatatggacaatgactcacagacacatatgctttgtatagaggattttgccaaaagtttatacaaaattgcacatctaaactgcataattctcatacaagaagttaaggaagtgctcactggattttgcttctgtatagttcacttttatctgtcttcacaagggtaggaagtaaatgatctcaaatggcacatgttcagacaatactgtgtttggctttgtgatgtctcatgtctttctcttggctaaaaaaaattgtttaggctatatataacttgtacctgaagcaatctggacaacatggcttaaaatggaaaataactgaaaaaatcctgggattttaaatttgccaaaaatacccttggattagtcaaaggctttacaagagtgttatagatgatccaaaatggaaacaatattgataacatttcttttcgtcagcagctacatattccagttttataactttattatatacattttttgattattaatagaaagtcagccatccagagttttaacttctgtggttgaaatattgactttgtgaaatttttcactgacaaatacttgttaggagggacctaagggggaggggaatgttaccagtccactgaaaactttaggaaatgttcattgtgttgtgtaaatactttcccaccagcaccaggtaatatattctctatgtttgtagaattccaaagatcaaaagctgtaaggacgtttatgtgaacttgacgcaaacttgtggaggaataaggactgagagtaatgttgtgctttttctttatcttcccgtcgtataggtcgactctcaggttatatgacttttattgggcacacgtcaggggtggaagtggtagaagtgggttaacaatttcaaggcctggcaacctaggtcaaaacctctaataaagtcagcagtaaacataactagcaacttcattccactatgtgctaggaggagggtgaggcaagttgaaaggagatgaccctatccccacactctcaggatgtaaaagggcagagtgctctctacccttaaccttggctttttagcaccgtcagtctctgtcctctcccaggagagctgccttggctccagagttgagctagtagcattgtgactagagaggtagtgtggaaattcgctgaggacctcaaaattttacactgccttaaactgttttgtttttgcttaaactcgtgctgtctaaatgtgggtgttttgtggcagagtctgatcaccccgacctagttatagccctgccagtgattctaaagtggaacttttccccctcattcatatggatagtctgagtccttgaagctagggagatatcaaatattctaccagttcctacatagcttctttaaaagtcctagagactaactcacaggaagtctgaagcccagagcgtctgtttataaactcctaaatatgaggccacaatatttaggttgagcactagaaaatttctattttgcaagtggaaggagacttgaatctataattgctgtagctttttttcccttctatcataagaaaatggataccatctgctttaccctcagcccagacttgtcttttgaattttttacatacatcttaggggtgagagattgaaacaagtgcatgaatgaaaagcttattgaaacataacacagcccctgctcaccatttcagtaagggaaaatacatgtttctgtttccctctaatttgttttctctggtgccaacatttctgatttcttctgtctctaatacataaggaataaataccatattttaaattgacttacatgcctgcgagcatttgccagataatcaaagcctatgactctaactttttaaagcacagaagaggaattatattttatggtcactcctctgtgtttctattgatctctatattgtgctaaaattctttcaggtaatttttttcttgttgaagctgtgggatataatcaatgatgccaagctgtctgagaattttatagaataatatccaaatatattgatcctgcctctttctgcttctatgtaattaaactttcttttgatgtttatttttaaaatgtatgcttcacacaacaccaataaacatctaagagatgtgatataatccaaggcaaagaaaagtaagaatcagttaatgtctattttatctgcacagcattacgaacagaaaattgtaataaaaaaaggtttaaccaaactgaaaaaaagagagacaaaatcttggttttaatttgaaaagatgattgggagtgatctcagaagagagttcagcaggaagcaaggaagaggctgttgaccttgagtgcagcctcaagaatggaacctttttgaaatattttaaaggaaatatcttgtcatccagctgttatggttaataatgaatagttttctctgggtgaagcttatccattgcacacctgatgtgctggcccctgcgatttccccaaatgttggaatgttgcctgcataatttgtggtaatgggggactgtgttcctgcttttacctggttacaaaaaacaaaacaaaacaaaacaaaacaacaaacagaaaaaaaaagagagaaaagatgctagaggaagcagtgtgacagacagatcatgagatgctgacggagagaacagagtggtacctgtttacccacttggaccatgacagtatcaaggctccaccccttgctgtcccttcccaagaggtgctctcctgggagtttgatcacagtgaaacaacactcccgttttctttttcctttctttctttctttcttttttttttttttttttttttttgttgagacagagttttttgctcttgttgcccaggctggagtgcaatggcgtgatctcggctcaccgcaacctccgcctcccaggttcaagcgattctcgtgcctcagcctctggagtagctgggattacaggcatgcgccaccacacccggctaattttgtacttttagtagagatggggtttctccatattggtcaggctggtcccgaactcctgacctcaggtgatctgcccgcctcagcctcccaaagtgctgggattacaggcataagccaccgagcccagccccacactcctgttttcatagcccttttttgtctgtactttggtacatattccccaaataagattattatttacatctgtcatgatgaggcagtgatagcagcaagtgtcactttgaccctcacccttggaaagtgggctatgcatagctagagttagaacaggaggttctaatcctgcttccacaattacttcagtaacaggcttttgtatccatgattacttaagctgacttagatgcattttctaccctgtattctagtgtacacaacacaaacacacataagccctttacctgtggagaagagggagatggttgattcagtgggagtggggagtggcagagggtgccttaactttttctggcttgacccctacttccttatgtgtttccttcatatacctctgtcactttagagatgtaatcatgtctgttccaagttgtatcgttattatcaagaagtcctataaatgtagcaaatgtgactattttatagaaatgcacaatagtttataggccttggagaagtctgataatagtatgtaaatatccttcattgaagtcatagaaccttctagtaggaagctccataggtgataactgcaagaggattaatgtttgtttctccagtaaacaccggaagcaaggaatcaatctgtcactgtttatcattcagtcttgagcaccgttgggtgttgataggttactatagacactccccttataattaatatacaggactcacaatttaggatgtctgatggccactagggtacatcatagagacactagagagaagagaacaaatatagctccatcaaaaagcctgcttaatctttaacaagtctgaaatattactaaaattccagttaccgtgcagcatagtcagtctaaaaagcactggggaaaaaggtgtctttttggtctctttaattctattatggcacattttaatattattccacatgtgtgcaaactatttctcaagagcaaagtttgaggctggagttaagaaaatagaaaaattaaaacattattttttctcatataatataatctgactactagttcatggatataataattctgggaaaaattttagattaaactataaaattgaaatcacctttgaagagtatatggaattgcttctttctattaaagccaacctacattggcaaaaagtgtggagaaaatcagtgtgctcaattctttttgtagagtttcatctaaaatgttgcaggtaaaaaagaaaactttaattggtactttctacggtgtgattagaaaaattagtatctatctctgttggttctgctgacttgcttctttccaccgaatctaaatgcaatgtcataggaggaggtttgctgtaaaaacatgtctttttctttggtgtattcattgtaattatggctggcagtgagaaggttcggtaagtctcaatttctctacctcctttacttggagaaaatttgtaaatgtaccctgtgaataaaatgattttttataaaaaaaaaaaaaaaaaaaaaaaa

SEQ ID NO: 1912 - DNA, 2009 bp, Homo Sapiens
  NM_003037
acagctaaggaaagaagctggggcgcatgtttctgcccaaagccgggttttggccgaggtgactacacaccccctttcctggctcccataggctaagtgcctggcttcttgagaagcctgcttcttgagaacaaaaaagtgatttaaagcctcatgggagatgagcaatcctcaagacacaagcagaaaaagtcccagtgatacaggaagcgggttcaggaacctgctggttcctgatacataaatcagacagcctctgctgcatgacacgaagcttgcttctgcctggcatctgtgagcagctgccaggctccggccaggatcccttccttctcctcattggctgatggatcccaaggggctcctctccttgaccttcgtgctgtttctctccctggcttttggggcaagctacggaacaggtgggcgcatgatgaactgcccaaagattctccggcagttgggaagcaaagtgctgctgcccctgacatatgaaaggataaataagagcatgaacaaaagcatccacattgtcgtcacaatggcaaaatcactggagaacagtgtcgagaacaaaatagtgtctcttgatccatccgaagcaggccctccacgttatctaggagatcgctacaagttttatctggagaatctcaccctggggatacgggaaagcaggaaggaggatgagggatggtaccttatgaccctggagaaaaatgtttcagttcagcgcttttgcctgcagttgaggctttatgagcaggtctccactccagaaattaaagttttaaacaagacccaggagaacgggacctgcaccttgatactgggctgcacagtggagaagggggaccatgtggcttacagctggagtgaaaaggcgggcacccacccactgaacccagccaacagctcccacctcctgtccctcaccctcggcccccagcatgctgacaatatctacatctgcaccgtgagcaaccctatcagcaacaattcccagaccttcagcccgtggcccggatgcaggacagacccctcagaaacaaaaccatgggcagtgtatgctgggctgttagggggtgtcatcatgattctcatcatggtggtaatactacagttgagaagaagaggtaaaacgaaccattaccagacaacagtggaaaaaaaaagccttacgatctatgcccaagtccagaaaccaggtcctcttcagaagaaacttgactccttcccagctcaggacccttgcaccaccatatatgttgctgccacagagcctgtcccagagtctgtccaggaaacaaattccatcacagtctatgctagtgtgacacttccagagagctgacaccagagaccaacaaagggactttctgaaggaaaatggaaaaaccaaaatgaacactgaacttggccacaggccccaagtttcctctggcagacatgctgcacgtctgtacccttctcagatcaactccctggtgatgtttcttccacatacatctgtgaaatgaacaaggaagtgaggcttcccaagaatttagcttgctgtgcagtggctgcaggcgcagaacagagcgttacttgataacagcgttccatctttgtgttgtagcagatgaaatggacagtaatgtgagttcagactttgggcatcttgctcttggctggaactggataataaaaatcagactgaaagccaggacatctgagtacctatctcacacactggaccaccagtcacaaagtctggaaaagtttacattttggctatctttactttgttctgggagctgatcatgataacctgcagacctgatcaagcctctgtgcctcagtttctctctcaggataaagagtgaatagaggctgaagggtgaatttcttattatacataaaacactctgatattattgtataaaggaagctaagaatattattttatttgcaaaacccagaagctaaaaagtcaataaacagaaagaatgattttgaaaaaaaaa

SEQ ID NO: 1913 - DNA, 2454 bp, Homo Sapiens
  NM_003039
ctttagcaatggggaaataccgtagactgttccatcaggacaatgctgggcctgcagtccccagggggcacccacttacttagccaaaccccagacgtttcatttaaaagcagaagtgaaaggaagaccaggttcctgaaagggttattctgacttaatctggctataaaaatgctattggctgttatttggcatggccaaagtgcacccagaatgtcttctctctccattcagtgcacgcgttactttggctaaaaggaggtgagcggcactctgcccttccagagcaagcatggagcaacaggatcagagcatgaaggaagggaggctgacgcttgtgcttgccctggcaaccctgatagctgcctttgggtcatccttccagtatgggtacaacgtggctgctgtcaactccccagcactgctcatgcaacaattttacaatgagacttactatggtaggaccggtgaattcatggaagacttccccttgacgttgctgtggtctgtaaccgtgtccatgtttccatttggagggtttatcggatccctcctggtcggccccttggtgaataaatttggcagaaaaggggccttgctgttcaacaacatattttctatcgtgcctgcgatcttaatgggatgcagcagagtcgccacatcatttgagcttatcattatttccagacttttggtgggaatatgtgcaggtgtatcttccaacgtggtccccatgtacttaggggagctggcccctaaaaacctgcggggggctctcggggtggtgccccagctcttcatcactgttggcatccttgtggcccagatctttggtcttcggaatctccttgcaaacgtagatggctggccgatcctgctggggctgaccggggtccccgcggcgctgcagctccttctgctgcccttcttccccgagagccccaggtacctgctgattcagaagaaagacgaagcggccgccaagaaagccctacagacgctgcgcggctgggactctgtggacagggaggtggccgagatccggcaggaggatgaggcagagaaggccgcgggcttcatctccgtgctgaagctgttccggatgcgctcgctgcgctggcagctgctgtccatcatcgtcctcatgggcggccagcagctgtcgggcgtcaacgctatctactactacgcggaccagatctacctgagcgccggcgtgccggaggagcacgtgcagtacgtgacggccggcaccggggccgtgaacgtggtcatgaccttctgcgccgtgttcgtggtggagctcctgggtcggaggctgctgctgctgctgggcttctccatctgcctcatagcctgctgcgtgctcactgcagctctggcactgcaggacacagtgtcctggatgccatacatcagcatcgtctgtgtcatctcctacgtcataggacatgccctcgggcccagtcccatacccgcgctgctcatcactgagatcttcctgcagtcctctcggccatctgccttcatggtggggggcagtgtgcactggctctccaacttcaccgtgggcttgatcttcccgttcatccaggagggcctcggcccgtacagcttcattgtcttcgccgtgatctgcctcctcaccaccatctacatcttcttgattgtcccggagaccaaggccaagacgttcatagagatcaaccagattttcaccaagatgaataaggtgtctgaagtgtacccggaaaaggaggaactgaaagagcttccacctgtcacttcggaacagtgactctggagaggaagccagtggagctggtctgccaggggcttcccactttggcttatttttctgacttctagctgtctgtgaatatccagaaataaaacaactctgatgtggaatgcagtcctcatctccagcctccccaccccagtgggaactgtgcaaagggctgccttgctgttcttgaagctgggctgtctctctccatgttggcctgtcaccagacccgagtcaattaaacagctggtcctccactttgctggttcagccttcgtgtggctcctggtaacgtggctccaccttgatgggtcaacctttgtgtggctcctggtaacataacaacaacagttactatagtggtgagatggaaggaatcaaattttgccagagaaactaacttggtggccccgacaggtcttccggggccatgggcatttgtttagagccaaattcatcctcttaccagatccttttccagaaatacctgtctaggaaggtgtgatgtcagaaacaatgacatccagaaagctgaggaacaggttcctgtggagacactgagtcagaattcttcatcctaaattattttgttagtggaaaatggaattgcttctgtgtagtcaataaaatgaacctgatcacttttcaaaaaaaaaaaaaaaaaa

SEQ ID NO: 1914 - DNA, 6516 bp, Homo Sapiens
  NM_003043
gagagctgcctgctcagacaacagacacgcgaggtcaggaagaagccgcttataaattaccgcttccttcgcgccgccgccaacgccgagccccgaggaccgcaagcccagaggacaagctgcgccaagagggagtgcggagcgttcacccagcgggtcagagagcgagcgggcaggcagcccccggccggcggaacccggcacagccgagcagagcgcgggcggcgccgcagccaccccagatccagaaccagaaccacagcccttctgaggagctcccaaacaaagcaaggagatggccaccaaggagaagctgcagtgtctgaaagatttccacaaggacatcctgaagccctcaccagggaagagcccaggcacgcggcctgaggacgaggctgagggaaaacctccgcagagggagaagtggtctagcaagatcgactttgtgctctctgtggctggcggcttcgtgggcttgggcaacgtctggcgcttcccgtacctctgctacaagaatggtggaggtgcgtttctcataccgtattttattttcctgtttgggagcggcctgcctgtgtttttcttggagatcatcataggccagtacacctctgaagggggcatcacctgctgggaaaagatctgccccttgttctctggtatcggctatgcctccgttgtaattgtgtccctcctgaatgtctactacatcgtcatcctggcctgggccacatactacctgttccagtccttccagaaggagctgccctgggcacactgcaaccacagctggaacacacctcactgcatggaggacaccatgcgcaagaacaagagtgtctggatcaccatcagctccaccaacttcacctcccctgtcatcgagttctgggagcgcaacgtgctgagcttgtcccctggaatcgaccacccaggctctctgaaatgggacctcgctctctgccttcttttagtctggctagtgtgtttcttctgcatctggaagggcgtcaggtccactgggaaggtcgtctacttcacagccacttttccattcgccatgctcctggtgctgctggtccgagggctgacgctgccgggcgcgggcgcaggcatcaagttctatctgtatcctgacatcacccgccttgaggacccacaggtgtggattgacgctgggactcagatattcttctcttatgccatctgcctgggggctatgacctcgctggggagctacaacaagtacaagtataactcgtacagggactgtatgctgctgggatgcctgaacagtggtaccagttttgtgtctggcttcgcaattttttccatcctgggcttcatggcacaagagcaaggggtggacattgctgatgtggctgagtcaggtcctggcctggccttcattgcctacccaaaagctgtgacaatgatgccgctgcccacattttggtccattcttttttttattatgcttctcttgcttggactggatagccagtttgttgaagttgaaggacagatcacatccttggttgatctttacccatccttcctaaggaagggttatcgtcgggaaatcttcatcgccttcgtgtgtagcatcagctacctgctggggctgacgatggtgacggagggtggcatgtatgtgtttcagctctttgactactatgcagctagcggtgtatgccttttgtgggttgcattctttgaatgttttgttattgcctggatatatggaggtgataacctttatgatggtattgaggacatgattggctatcggcccgggccctggatgaagtacagctgggctgtgatcactccagttctctgtgttggatgtttcatcttctcgctcgtcaagtacgtacccctgacctacaacaaaacatacgtgtaccccaactgggccattgggctgggctggagcctggccctttcctccatgctctgcgttcccttggtcatcgtcatccgcctctgccagactgaggggccgttccttgtgagagtcaagtacctgctgaccccaagggaacccaaccgctgggctgtggagcgcgagggagccacaccttacaactctcgcaccgtcatgaacggcgctctcgtgaaaccgacccacatcattgtggagaccatgatgtgagctctctcgggtcgacggggccggcggctttcctgctgtttactaacattagattctcataggaccaggtttacagagctttatatttgcactaggatttttttttttttgtaattgtcacagaaaatgtaattgtgggtatgtgtgcgtgcgtgtgtgtgtgtgtgtgtatcgtgtgtgtgtgttttgttttgatttgggggatattttgtacaaaaagaaaacccacgggaagatgtccgtggagaggcagagctttcatactgaattagatgtattttatgggaatttggtaaatttttctttgtatttttttttttacatataagtatatatacacttagagattgtcatatacttttaccacttgaattgatcttcttgccagcaatagatctcattttcaaaagcaattcttcggtgctgtgtagctggcagaaagttctgtccagtaaacgcaggatggaattttcctgggactctacacccatcttaaggtggtataccttccaaatcctggttcagatggaagaaatagcaggagagaggacccattagctggcagacccagggggaagaaaggagggctgtgaggagatacctcattaaacttggcttagtgaagaagagagatgccaaaggaatgaaccaacccttcacataaaggagactggctgaagctgaatgaggaggccctatagcagaagtctgattctaagagcagtagaaacttgtaccagaagcaaaatcccacttttaattttgagatggtgagtggatagtcagtagaccgtcagaaccactggccagagagggagctgctagagatccaagaaggctggcaggagtgaggctcacaactcagcctcgcaagaggtggcagaggcacaggaggccacagtccttcctggggcattccaggcagagaaggagcagaggctctcccggcaggagctggggtctcagggctcagatgagtctgttgcatttgaatggggtcatagcaggttctggtcattccccaagcaacatctcagcatctcttaaagttgcctgcaggaatgaagcatgacatacctgttgagggactaggggagtggtggggaggtgagtggaccaaaggatataggccccaggcatgcagatgggcccggtgtcggggaggggtgctttctttcctcatctccccactccccactctcagcctgggagactcctgccaagccctcattaaagatgccaccctgggctgccctggcacctagcaaggcacaccaagaacagcttttgagtctgtatcctccactgggggaagtgctcccagttcagaacaagggcagcccgtggtgctgacctaggatataacaaagctcttcacttcaaaacccctgcaatagctgggtttacagacatttaccacctgcggacccaaaagagaaggcctaggagagttttctagaaggttgggattgtcagggtcctggcccctcagaactggcttgatcaagggccttatgtggagcagaggttgtctctgaaccaggagagaaggtactatacctttcaaatccccagggcagacacacccccacccagcccctatttggacctaaactgtgccatttgaacagtcacttccaagctcagtctaaatgaaaccgaaacgtgaccacgcacaaaggcagtcactgcctcgaggggtgcagaccgcagaattttcacagcaggggctcttggaaccctggaaacccccttcttaaatttgggaggaggagtatgcctttggtgtccccctcccaaggggcaattctgaaccccatctttggcaggcatacatatttcactgtttccaaagctatctactctgccaaacaacacccagtcctattccaaactctcaacgattctatcttgttcctgtttttctatgtatttatggttgccgtttgtgtctgatttgattttactgttttttccctgattttatggagtagcattgtgacctgttttcctttgtcttatataactttagtaaactaaccactgtcaatgattgagggcaggtggcacgtggggaagaggggacttggcacgcagtggctacctgggcatttgtggtcatttcagtttccatctccccagcgggggctccctgggtgaaaggccacagtattttgggttggtaggcaaattgcaacattctggacatggcctgaggaaggcctcttcttataagattctcagaccaaattctagaccaaagacacaggcagaccaagtccccaggccccgcctggaaggaagtcgttcctcaactctccccaaggcacctgtctccaatcagagccctctcgcccagccagccctggctctgtgtgcagagcatagctctgcgagtacctgtgtaataatgctcaaccttcatgtctccgtataaacgaaactttccatgagagctcatgactctggtccacctgtctatagagaatgggcaaagtccttcacctgctttctgcttgggatgggtcagaaatgctgatgcccgcacatagcccagccagccagatctggaaaggaagcgagggggttgtttaaatcaattttttaagatgaagaagtgggagacactgcgttgagatgggccatgctagggccacagagatttcctgacggtcagggagagaagggcctccagggtcccctaacccaacgcccttgttgtaaatgaggtaactgaggctcagggaggcactgtgagccaggaatggattttcttgaaacagctctagctgcaggttctccgaggtaggtgcagggaatggtgagtgtctaaccagggctacatccagcaacatcctcaaggtcttcctgacaaccaaagacaagcctttatggaaaaggaaatgcgctcccctccatgttcagggatgaggggagcagcagcagccacactcccaccatcctcacagaattcctggacccatgcggtggctccgtgagctgggtgactccagcctcacctgcacaccccagccctgcacggggccctccttcctcccagcagcccttggtgagctaggaattgagatccctgtttgtgaaagagggaactgaggtgcagagaagccagaggtgtgccagatccttaggcaggatttagatgaagtcgccctggctccagactgaccccgaggctctgcggggagtttccaggcagcaggaagtggccttggatgctctccttccaggacagcataacccctgggccatgtgcagctccttcactgccccctggatccccagcatacccccaaagacagtggggaaacacaaggggagagcacagcatggcccctccagcccacttcagggcactcttgtatcacccgggtaccgccacactggtcccccacccagccagcatctcccagcacagcccctctccctggggaaatgctctgggtagccagtctaaaggcagaggcacctaactgctccccgcagcccaccccacccaagattcagacacaagccaggaaaggacccaagagaaaatccttcaaggtggcctgaggtcccatccctccctcagacccatgtggtcccaggccaggctgcctgggacacggtaaataccactgtgtgcaaaaatcgaagtacaaaaccacaagactaaacaaaacaaacccagagagccaaacttgtagaggtgggcagtccagaaagcagggggcagccctccccctttccttctctccctgatcctcagaatatatattgttgtaataggaagcatttttgcattgttctcttgtgggtgtcactacagacatgttctggcgtgttctccgagggatggagcatcctgttatatatttgacttcaaattgagatgttggcttcattttttttttttacccaattaatctcccaatccctagcaactgtgactctgtatttagcacaagagaaagctgagaatgtgggtcttgcctccttccagaaatatgtctggctcatcaggacatttttttaaaacttcaaaatatttttaagatattttaaacttttataaaaaaaaaatcaaccaacaagagacttttctgaggaggaacatttgtatttgaacaagatccttggtgtgtagttcagtcttgcagtatacaagcttttgtgtataaatgttttatgatatgattccctgtattttgcaggggtttttttctcttttgctttttagataaatatgtatatcaatattttaaattcatctttgctttttttagaggagtttgtaatcaccttataacatgaaaataaacatttcctttttaacatccaaaaaaaaaaaaaaaaaa

SEQ ID NO: 1915 - DNA, 4587 bp, Homo Sapiens
  NM_003047
cgccaggccgcctgccttccgcctctttccatttccccggaatctcagcccggcgcgcctggacccctgcccctctctgggtggagaagctcccggccgcttcccggtttcactccttctcagcctgggctcccagccccctctctccttttcctggactggctctcacccccttcggtccccttcctttagctcaggctccctaccccttcctttagcccacagcccagagtcccagctcctcagtcactttcctcagccaaaggtcccagccttccttcttcctttcctttgcactatccctatcctgccccttcctctatccctagggctcagtttcccacatccgtcctcccccttcccaggcccggagttccagaccttttggtctcctttcgtggtcgttcctgggtccttgccccctttccccactttggagttccagattgcaaacccagcctccctccacccccagaaaattgcttccatggaaatgcctctctaaaacatgaacttttcctagagactacgccagtctctcttcccacttgctgaccctttgctacctatgtgcccggttttactctcatttgggtaaggtcgaggctggctctggaagcagcaccatggttctgcggtctggcatctgtggcctctctccacatcggatcttcccttccttactcgtggtggttgctttggtggggctgctgcctgttctcaggagccatggcctccagctcagcccaactgccagcaccattcgaagctcagagccaccacgagaacgctcgattggggatgtcaccaccgctccaccggaggtcaccccagagagccgccctgttaatcattccgtcactgatcatggcatgaagccgcgcaaggcctttccagtcctgggcatcgactacacacacgtgcgcacccccttcgagatctccctctggatccttctggcctgcctcatgaagataggtttccatgtgatccccactatctcaagcatcgtcccggagagctgcctgctgatcgtggtggggctgctggtggggggcctgatcaagggtgtaggcgagacaccccccttcctgcagtccgacgtcttcttcctcttcctgctgccgcccatcatcctggatgcgggctacttcctgccactgcggcagttcacagaaaacctgggcaccatcctgatctttgccgtggtgggcacgctgtggaacgccttcttcctgggcggcctcatgtacgccgtgtgcctggtgggcggtgagcagatcaacaacatcggcctcctggacaacctgctcttcggcagcatcatctcggccgtggaccccgtggcggttctggctgtctttgaggaaattcacatcaatgagctgctgcacatccttgtttttggggagtccttgctcaatgacgccgtcactgtggtcctgtatcacctctttgaggagtttgccaactacgaacacgtgggcatcgtggacatcttcctcggcttcctgagcttcttcgtggtggccctgggcggggtgcttgtgggcgtggtctacggggtcatcgcagccttcacctcccgatttacctcccacatccgggtcatcgagccgctcttcgtcttcctctacagctacatggcctacttgtcagccgagctcttccacctgtcaggcatcatggcgctcatagcctcaggagtggtgatgcgcccctatgtggaggccaacatctcccacaagtcccacaccaccatcaaatacttcctgaagatgtggagcagcgtcagcgagaccctcatcttcatcttcctcggcgtctccacggtggccggctcccaccactggaactggaccttcgtcatcagcaccctgctcttctgcctcatcgcccgcgtgctgggggtgctgggcctgacctggttcatcaacaagttccgtatcgtgaagctgacccccaaggaccagttcatcatcgcctatgggggcctgcgaggggccatcgccttctctctgggctacctcctggacaagaagcacttccccatgtgtgacctgttcctcactgccatcatcactgtcatcttcttcaccgtctttgtgcagggcatgaccattcggcccctggtagacctgttggctgtgaagaaaaagcaagagacgaagcgctccatcaacgaagagatccacacacagttcctggaccaccttctgacaggcatcgaagacatctgtggccactacggtcaccaccactggaaggacaagctcaaccggtttaataagaaatatgtgaagaagtgtctgatagctggcgagcgctccaaggagccccagctcattgccttctaccacaagatggagatgaagcaggccatcgagctggtggagagcgggggcatgggcaagatcccctctgccgtctccaccgtctccatgcagaacatccaccccaagtccctgccttccgagcgcatcctgccagcactgtccaaggacaaggaggaggagatccgcaaaatcctgaggaacaacttgcagaagaccaggcagcggctgcggtcctacaacagacacacgctggtggcagacccctacgaggaagcctggaaccagatgctgctccggaggcagaaggcccggcagctggagcagaagatcaacaactacctgacggtgccagcccacaagctggactcacccaccatgtctcgggcccgcatcggctcagacccactggcctatgagccgaaggaggacctgcctgtcatcaccatcgacccggcttccccgcagtcacccgagtctgtggacctggtgaatgaagagctgaagggcaaagtcttagggttgagccgggatcctgcaaaggtggctgaggaggacgaggacgacgatgggggcatcatgatgcggagcaaggagacttcgtccccaggaaccgacgatgtcttcacccccgcgcccagtgacagccccagctcccagaggatacagcgctgcctcagtgacccaggcccacaccctgagcctggggagggagaaccgttcttccccaaggggcagtaacaccagggccagcaggcagcgcctgtcccctcacagactcttccaccagagcaggggctgctgggggctccccttgcccttcctgacccggattggccctgcccctccccctaccgcatggcagctgggcccacagcccccaccccagcacagctcctcccctgccgcctcccgggaagcatcctccccaccagagctgcctccccaatccatttggcagaactgctggggctggtgaggccggccctgcccctccctagatccaggcttctcccggacctggactagggcctcggaggctcctccctctgcctcatcctcctcctcattcagaccaatcttagtttctaaccaaagagtctctggctcagctgtggtcccacccaggaagggagggagctgaggcctcccttgagtaggccctgctttatcaggggacaaaccaggggtaccaggcacatggctgggggagggactgctgacccaccaaggtctcacactcctcctgccagctctgtcaccctggccaccacccaacctgtccttactcagagctgcgggctgagggcatctctgagtgtctctgcctggagcaggggtggtttctacggtgacagtgacgtgactcagagcttttcgaactgtgctcccacggggaccactgggcccctcaggggaagctgctaggggaaggactggccgtggctccagaatgtgctgcctttttaagttttgtttgttcacactcctatatatgattgtttgcacagagggcgctcctgtttttaaaacattttgaaaacccctggctgaacagtgctctgcctctaactccctcctcacactccagaattacccttcctcatctgtgcctgtctgtccaacccctcccccacgtctctctgcctgctgggctcttaactgttgctcgaagactgtgacatcagaagtaactcccactcctaatcaagagtctctccagcctcacagatgctggcctcttggcacctgcctagctcttgggcctgacctccagtcctgctggcctgctcttacttcccccaccctgggtttggcccctggaacctttcccttgtgtgtaccacaccctgcctgctgtggagcccattgtggaggcggtgggggggagaaggcctcccctgaggatcccctgtcccctggggctggtggattgggcagaatcctgggcccccagagacctttgcccacacacactccttccccttgtccctggggcactcccccaggattgtgcaatagtcagagtgtccctttttgcaggggactgggccatgggtcctcggcccatctgtccatcctcctctccatgcaagtgctgtttgggcaggagtcaccatgcaagggtgacatcgacaaccacgtaccaagccaccgcagctgctgccactctgctgcctgtacagaagaaactgaatctttttcatattctaataaatcaatgtgagtttttaatagaaaaaaaaaaaaaaaa

SEQ ID NO: 1916 - DNA, 1921 bp, Homo Sapiens
  NM_003057
ctgatttcaaaccactccttttcaaagatctctgagggagacattgcacctggccactgcagcccagagcaggtctggccacggccatgagcatgctgagccatcatgcccaccgtggatgacattctggagcaggttggggagtctggctggttccagaagcaagccttcctcatcttatgcctgctgtcggctgcctttgcgcccatctgtgtgggcatcgtcttcctgggtttcacacctgaccaccactgccagagtcctggggtggctgagctgagccagcgctgtggctggagccctgcggaggagctgaactatacagtgccaggcctggggcccgcgggcgaggccttccttggccagtgcaggcgctatgaagtggactggaaccagagcgccctcagctgtgtagaccccctggctagcctggccaccaacaggagccacctgccgctgggtccctgccaggatggctgggtgtatgacacgcccggctcttccatcgtcactgagttcaacctggtgtgtgctgactcctggaagctggacctctttcagtcctgtttgaatgcgggcttcttgtttggctctctcggtgttggctactttgcagacaggtttggccgtaagctgtgtctcctgggaactgtgctggtcaacgcggtgtcgggcgtgctcatggccttctcgcccaactacatgtccatgctgctcttccgcctgctgcagggcctggtcagcaagggcaactggatggctggctacaccctaatcacagaatttgttggctcgggctccagaagaacggtggcgatcatgtaccagatggccttcacggtggggctggtggcgcttaccgggctggcctacgccctgcctcactggcgctggctgcagctggcagtctccctgcccaccttcctcttcctgctctactactggtgtgtgccggagtcccctcggtggctgttatcacaaaaaagaaacactgaagcaataaagataatggaccacatcgctcaaaagaatgggaagttgcctcctgctgatttaaagatgctttccctcgaagaggatgtcaccgaaaagctgagcccttcatttgcagacctgttccgcacgccgcgcctgaggaagcgcaccttcatcctgatgtacctgtggttcacggactctgtgctctatcaggggctcatcctgcacatgggcgccaccagcgggaacctctacctggatttcctttactccgctctggtcgaaatcccgggggccttcatagccctcatcaccattgaccgcgtgggccgcatctaccccatggccatgtcaaatttgttggcgggggcagcctgcctcgtcatgatttttatctcacctgacctgcactggttaaacatcataatcatgtgtgttggccgaatgggaatcaccattgcaatacaaatgatctgcctggtgaatgctgagctgtaccccacattcgtcaggaacctcggagtgatggtgtgttcctccctgtgtgacataggtgggataatcacccccttcatagtcttcaggctgagggaggtctggcaagccttgcccctcattttgtttgcggtgttgggcctgcttgccgcgggagtgacgctacttcttccagagaccaagggggtcgctttgccagagaccatgaaggacgccgagaaccttgggagaaaagcaaagcccaaagaaaacacgatttaccttaaggtccaaacctcagaaccctcgggcacctgagagagatgttttgcggcgatgtcgtgttggagggatgaagatggagttatcctctgcagaaattcctagacgccttcacttctctgtattcttcctcatacttgcctacccccaaattaatatcagtcctaaagaaaaaaaaaaaaaaaaa

SEQ ID NO: 1917 - DNA, 2214 bp, Homo Sapiens
  NM_003059
cctgtttcccaggaacggtccccggcttcgcgccccaatttctaacagcctgcctgtcccccgggaacgttctaacatccttggggagcgccccagctacaagacactgtcctgagaacgctgtcatcacccgtagttgcaagtttcggagcggcagtgggaagcatgcgggactacgacgaggtgatcgccttcctgggcgagtgggggcccttccagcgcctcatcttcttcctgctcagcgccagcatcatccccaatggcttcaatggtatgtcagtcgtgttcctggcggggaccccggagcaccgctgtcgagtgccggacgccgcgaacctgagcagcgcctggcgcaacaacagtgtcccgctgcggctgcgggacggccgcgaggtgccccacagctgcagccgctaccggctcgccaccatcgccaacttctcggcgctcgggctggagccggggcgcgacgtggacctggggcagctggagcaggagagctgcctggatggctgggagttcagccaggacgtctacctgtccaccgtcgtgaccgagtggaatctggtgtgtgaggacaactggaaggtgcccctcaccacctccctgttcttcgtaggcgtgctcctcggctccttcgtgtccgggcagctgtcagacaggtttggcaggaagaacgttctcttcgcaaccatggctgtacagactggcttcagcttcctgcagattttctccatcagctgggagatgttcactgtgttatttgtcatcgtgggcatgggccagatctccaactatgtggtagccttcatactaggaacagaaattcttggcaagtcagttcgtattatattctctacattaggagtgtgcacattttttgcagttggctatatgctgctgccactgtttgcttacttcatcagagactggcggatgctgctgctggcgctgacggtgccgggagtgctgtgtgtcccgctgtggtggttcattcctgaatctccccgatggctgatatcccagagaagatttagagaggctgaagatatcatccaaaaagctgcaaaaatgaacaacatagctgtaccagcagtgatatttgattctgtggaggagctaaatcccctgaagcagcagaaagctttcattctggacctgttcaggactcggaatattgccataatgaccattatgtctttgctgctatggatgctgacctcagtgggttactttgctctgtctctggatgctcctaatttacatggagatgcctacctgaactgtttcctctctgccttgattgaaattccagcttacattacagcctggctgctattgcgaaccctgcccaggcgttatatcatagctgcagtactgttctggggaggaggtgtgcttctcttcattcaactggtacctgtggattattacttcttatccattggtctggtcatgctgggaaaatttgggatcacctctgctttctccatgctgtatgtcttcactgctgagctctacccaaccctggtcaggaacatggcggtgggggtcacatccacggcctccagagtgggcagcatcattgccccctactttgtttacctcggtgcttacaacagaatgctgccctacatcgtcatgggtagtctgactgtcctgattggaatcctcaccctttttttccctgaaagtttgggaatgactcttccagaaaccttagagcagatgcagaaagtgaaatggttcagatctgggaaaaaaacaagagactcaatggagacagaagaaaatcccaaggttctaataactgcattctgaaaaaatatctaccccatttggtgaagtgaaaaacagaaaaataagaccctgtggagaaattcgttgttcccactgaaatggactgactgtaacgattgacaccaaaatgaaccttgctatcaagaaatgctcgtcatacagtaaactctggatgattcttccagataatgtccttgctttacaaaccaaccatttctagagagtctccttactcattaattcaatgaaatggattggtaagatgtcttgaaaacatgttagtcaaggactggtaaaatacatataaagattaacactcatttccaatcatacaaatactatccaaataaaaataacatcattgtattaacgcaaatattaggtgacaacaaaaaaaaaaaaaaaaaaaaaaaa

SEQ ID NO: 1918 - DNA, 598 bp, Homo Sapiens
  NM_003064
cagagtcactcctgccttcaccatgaagtccagcggcctcttccccttcctggtgctgcttgccctgggaactctggcaccttgggctgtggaaggctctggaaagtccttcaaagctggagtctgtcctcctaagaaatctgcccagtgccttagatacaagaaacctgagtgccagagtgactggcagtgtccagggaagaagagatgttgtcctgacacttgtggcatcaaatgcctggatcctgttgacaccccaaacccaacaaggaggaagcctgggaagtgcccagtgacttatggccaatgtttgatgcttaacccccccaatttctgtgagatggatggccagtgcaagcgtgacttgaagtgttgcatgggcatgtgtgggaaatcctgcgtttcccctgtgaaagcttgattcctgccatatggaggaggctctggagtcctgctctgtgtggtccaggtcctttccaccctgagacttggctccaccactgatatcctcctttggggaaaggcttggcacacagcaggctttcaagaagtgccagttgatcaatgaataaataaacgagcctatttctctttgcac

SEQ ID NO: 1919 - DNA, 5703 bp, Homo Sapiens
  NM_003072
ggagaggccgccgcggtgctgagggggaggggagccggcgagcgcgcgcgcagcgggggcgcgggtggcgcgcgtgtgtgtgaagggggggcggtggccgaggcgggcgggcgcgcgcgcgaggcttcccctcgtttggcggcggcggcggcttctttgtttcgtgaagagaagcgagacgcccattctgcccccggccccgcgcggaggggcgggggaggcgccgggaagtcgacggcgccggcggctcctgcaggaggccactgtctgcagctcccgtgaagatgtccactccagacccacccctgggcggaactcctcggccaggtccttccccgggccctggcccttcccctggagccatgctgggccctagcccgggtccctcgccgggctccgcccacagcatgatggggcccagcccagggccgccctcagcaggacaccccatccccacccaggggcctggagggtaccctcaggacaacatgcaccagatgcacaagcccatggagtccatgcatgagaagggcatgtcggacgacccgcgctacaaccagatgaaaggaatggggatgcggtcagggggccatgctgggatggggcccccgcccagccccatggaccagcactcccaaggttacccctcgcccctgggtggctctgagcatgcctctagtccagttccagccagtggcccgtcttcggggccccagatgtcttccgggccaggaggtgccccgctggatggtgctgacccccaggccttggggcagcagaaccggggcccaaccccatttaaccagaaccagctgcaccagctcagagctcagatcatggcctacaagatgctggccagggggcagcccctccccgaccacctgcagatggcggtgcagggcaagcggccgatgcccgggatgcagcagcagatgccaacgctacctccaccctcggtgtccgcaacaggacccggccctggccctggccctggccccggcccgggtcccggcccggcacctccaaattacagcaggcctcatggtatgggagggcccaacatgcctcccccaggaccctcgggcgtgccccccgggatgccaggccagcctcctggagggcctcccaagccctggcctgaaggacccatggcgaatgctgctgcccccacgagcacccctcagaagctgattcccccgcagccaacgggccgcccttcccccgcgccccctgccgtcccacccgccgcctcgcccgtgatgccaccgcagacccagtcccccgggcagccggcccagcccgcgcccatggtgccactgcaccagaagcagagccgcatcacccccatccagaagccgcggggcctcgaccctgtggagatcctgcaggagcgcgagtacaggctgcaggctcgcatcgcacaccgaattcaggaacttgaaaaccttcccgggtccctggccggggatttgcgaaccaaagcgaccattgagctcaaggccctcaggctgctgaacttccagaggcagctgcgccaggaggtggtggtgtgcatgcggagggacacagcgctggagacagccctcaatgctaaggcctacaagcgcagcaagcgccagtccctgcgcgaggcccgcatcactgagaagctggagaagcagcagaagatcgagcaggagcgcaagcgccggcagaagcaccaggaatacctcaatagcattctccagcatgccaaggatttcaaggaatatcacagatccgtcacaggcaaaatccagaagctgaccaaggcagtggccacgtaccatgccaacacggagcgggagcagaagaaagagaacgagcggatcgagaaggagcgcatgcggaggctcatggctgaagatgaggaggggtaccgcaagctcatcgaccagaagaaggacaagcgcctggcctacctcttgcagcagacagacgagtacgtggctaacctcacggagctggtgcggcagcacaaggctgcccaggtcgccaaggagaaaaagaagaaaaagaaaaagaagaaggcagaaaatgcagaaggacagacgcctgccattgggccggatggcgagcctctggacgagaccagccagatgagcgacctcccggtgaaggtgatccacgtggagagtgggaagatcctcacaggcacagatgcccccaaagccgggcagctggaggcctggctcgagatgaacccggggtatgaagtagctccgaggtctgatagtgaagaaagtggctcagaagaagaggaagaggaggaggaggaagagcagccgcaggcagcacagcctcccaccctgcccgtggaggagaagaagaagattccagatccagacagcgatgacgtctctgaggtggacgcgcggcacatcattgagaatgccaagcaagatgtcgatgatgaatatggcgtgtcccaggcccttgcacgtggcctgcagtcctactatgccgtggcccatgctgtcactgagagagtggacaagcagtcagcgcttatggtcaatggtgtcctcaaacagtaccagatcaaaggtttggagtggctggtgtccctgtacaacaacaacctgaacggcatcctggccgacgagatgggcctggggaagaccatccagaccatcgcgctcatcacgtacctcatggagcacaaacgcatcaatgggcccttcctcatcatcgtgcctctctcaacgctgtccaactgggcgtacgagtttgacaagtgggccccctccgtggtgaaggtgtcttacaagggatccccagcagcaagacgggcctttgtcccccagctccggagtgggaagttcaacgtcttgctgacgacgtacgagtacatcatcaaagacaagcacatcctcgccaagatccgttggaagtacatgattgtggacgaaggtcaccgcatgaagaaccaccactgcaagctgacgcaggtgctcaacacgcactatgtggcaccccgccgcctgctgctgacgggcacaccgctgcagaacaagcttcccgagctctgggcgctgctcaacttcctgctgcccaccatcttcaagagctgcagcaccttcgagcagtggtttaacgcaccctttgccatgaccggggaaaaggtggacctgaatgaggaggaaaccattctcatcatccggcgtctccacaaagtgctgcggcccttcttgctccgacgactcaagaaggaagtcgaggcccagttgcccgaaaaggtggagtacgtcatcaagtgcgacatgtctgcgctgcagcgagtgctctaccgccacatgcaggccaagggcgtgctgctgactgatggctccgagaaggacaagaagggcaaaggcggcaccaagaccctgatgaacaccatcatgcagctgcggaagatctgcaaccacccctacatgttccagcacatcgaggagtccttttccgagcacttggggttcactggcggcattgtccaagggctggacctgtaccgagcctcgggtaaatttgagcttcttgatagaattcttcccaaactccgagcaaccaaccacaaagtgctgctgttctgccaaatgacctccctcatgaccatcatggaagattactttgcgtatcgcggctttaaatacctcaggcttgatggaaccacgaaggcggaggaccggggcatgctgctgaaaaccttcaacgagcccggctctgagtacttcatcttcctgctcagcacccgggctggggggctcggcctgaacctccagtcggcagacactgtgatcatttttgacagcgactggaatcctcaccaggacctgcaagcgcaggaccgagcccaccgcatcgggcagcagaacgaggtgcgtgtgctccgcctctgcaccgtcaacagcgtggaggagaagatcctagctgcagccaagtacaagctcaacgtggaccagaaggtgatccaggccggcatgttcgaccagaagtcctccagccatgagcggcgcgccttcctgcaggccatcctggagcacgaggagcaggatgagagcagacactgcagcacgggcagcggcagtgccagcttcgcccacactgcccctccgccagcgggcgtcaaccccgacttggaggagccacctctaaaggaggaagacgaggtgcccgacgacgagaccgtcaaccagatgatcgcccggcacgaggaggagtttgatctgttcatgcgcatggacctggaccgcaggcgcgaggaggcccgcaaccccaagcggaagccgcgcctcatggaggaggacgagctcccctcgtggatcatcaaggacgacgcggaggtggagcggctgacctgtgaggaggaggaggagaagatgttcggccgtggctcccgccaccgcaaggaggtggactacagcgactcactgacggagaagcagtggctcaaggccatcgaggagggcacgctggaggagatcgaagaggaggtccggcagaagaaatcatcacggaagcgcaagcgagacagcgacgccggctcctccaccccgaccaccagcacccgcagccgcgacaaggacgacgagagcaagaagcagaagaagcgcgggcggccgcctgccgagaaactctcccctaacccacccaacctcaccaagaagatgaagaagattgtggatgccgtgatcaagtacaaggacagcagcagtggacgtcagctcagcgaggtcttcatccagctgccctcgcgaaaggagctgcccgagtactacgagctcatccgcaagcccgtggacttcaagaagataaaggagcgcattcgcaaccacaagtaccgcagcctcaacgacctagagaaggacgtcatgctcctgtgccagaacgcacagaccttcaacctggagggctccctgatctatgaagactccatcgtcttgcagtcggtcttcaccagcgtgcggcagaaaatcgagaaggaggatgacagtgaaggcgaggagagtgaggaggaggaagagggcgaggaggaaggctccgaatccgaatctcggtccgtcaaagtgaagatcaagcttggccggaaggagaaggcacaggaccggctgaagggcggccggcggcggccgagccgagggtcccgagccaagccggtcgtgagtgacgatgacagtgaggaggaacaagaggaggaccgctcaggaagtggcagcgaagaagactgagccccgacattccagtctcgaccccgagcccctcgttccagagctgagatggcataggccttagcagtaacgggtagcagcagatgtagtttcagacttggagtaaaactgtataaacaaaagaatcttccatatttatacagcagagaagctgtaggactgtttgtgactggccctgtcctggcatcagtagcatctgtaacagcattaactgtcttaaagagagagagagagaattccgaattggggaacacacgatacctgtttttcttttccgttgctggcagtactgttgcgccgcagtttggagtcactgtagttaagtgtggatgcatgtgcgtcaccgtccactcctcctactgtattttattggacaggtcagactcgccgggggcccggcgagggtatgtcagtgtcactggatgtcaaacagtaataaattaaaccaacaacaaaacgcacagccaaaaaaaaa

SEQ ID NO: 1920 - DNA, 5780 bp, Homo Sapiens
  NM_003074
ctgggcggggccgggaagcggcagtggcggctacgcgcgcgggggtgcgcgcgggaacgaccgggaaacaccgcgagggccggggtgggccaggctgtggggacgacgggctgcgacgatggccgcagcggcgggcggcggcgggccggggacagcggtaggcgccacgggctcggggattgcggcggcagccgcaggcctagctgtttatcgacggaaggatgggggcccggccaccaagttttgggagagcccggagacggtgtcccagctggattcggtgcgggtctggctgggcaagcactacaagaagtatgttcatgcggatgctcctaccaataaaacactggctgggctggtggtgcagcttcttcagttccaggaagatgcctttgggaagcatgtcaccaacccggccttcaccaaactccctgcaaagtgtttcatggatttcaaagctggaggcgccttatgtcacattcttggggctgcttacaagtataaaaatgaacagggatggcggaggtttgacctacagaacccatctcgaatggatcgtaatgtggaaatgtttatgaacattgaaaaaacattggtgcagaacaattgtttgaccagacccaacatctacctcattccagacattgatctgaagttggctaacaaattgaaagatatcatcaaacgacatcagggaacatttacggatgagaagtcaaaagcttcccaccacatttacccatattcttcctcacaagacgatgaagaatggttgagaccggtgatgagaaaagagaagcaagtgttagtgcattggggcttttacccagacagctatgatacttgggtccatagtaatgatgttgatgctgaaattgaagatccaccaattccagaaaaaccatggaaggttcatgtgaaatggattttggacactgatattttcaatgaatggatgaatgaggaggattatgaggtggatgaaaataggaagcctgtgagttttcgtcagcggatttcaaccaagaatgaagagccagtcagaagtccagaaagaagagatagaaaagcatcagctaatgctcgaaagaggaaacattcgccttcgcctccccctccgacaccaacagaatcacggaagaagagtgggaagaaaggccaagctagcctttatgggaagcgcagaagtcagaaagaggaagatgagcaagaagatctaaccaaggatatggaagacccaacacctgtacccaatatagaagaagtagtacttcccaaaaatgtgaacctaaagaaagatagtgaaaatacacctgttaaaggaggaactgtagcggatctagatgagcaggatgaagaaacagtcacagcaggaggaaaggaagatgaagatcctgccaaaggtgatcagagtcgatcagttgaccttggggaagataatgtgacagagcagaccaatcacattattattcctagttatgcatcatggtttgattataactgtattcatgtgattgaacggcgtgctcttcctgagttcttcaatggaaaaaacaaatccaagactccagaaatatacttggcatatcgaaattttatgattgacacgtatcgtctaaacccccaagagtatttaactagcactgcttgtcggaggaacttgactggagatgtgtgtgctgtgatgagggtccatgcctttttagagcagtggggactcgttaattaccaagttgacccggaaagtagacccatggcaatgggacctcctcctactcctcattttaatgtattagctgataccccctctgggcttgtgcctctgcatcttcgatcacctcaggttcctgctgctcaacagatgctaaattttcctgagaaaaacaaggaaaaaccagttgatttgcagaactttggtctccgtactgacatttactccaagaaaacattagcaaagagtaaaggtgctagtgctggaagagaatggactgaacaggagacccttctactcctggaggccctggagatgtacaaggatgattggaacaaagtgtcggaacatgttggaagtcgtactcaggatgaatgcatcctccactttttgagacttcccattgaggacccataccttgagaattcagatgcttcccttgggcctttggcctaccagcctgtccccttcagtcagtcaggaaatccagttatgagtactgttgcttttttggcatctgtggtggaccctcgcgtggcatctgctgcagcaaaagcggctttggaggagttttctcgggtccgggaggaggtaccactggaattggttgaagctcatgtcaagaaagtacaagaagcagcacgagcctctgggaaagtggatcccacctacggtctggagagcagctgcattgcaggcacagggcccgatgagccagagaagcttgaaggagctgaagaggaaaaaatggaagccgaccctgatggtcagcagcctgaaaaggcagaaaataaagtggaaaatgaaacggatgaaggtgataaagcacaagatggagaaaatgaaaaaaatagtgaaaaggaacaggatagtgaagtgagtgaggataccaaatcagaagaaaaggagactgaagagaacaaagaactcactgatacatgtaaagaaagagaaagtgatactgggaagaagaaagtagaacatgaaatttccgaaggaaatgttgccacagccgcagcagctgctcttgcctcagcggctaccaaagccaagcacctggctgcagtggaagaaagaaagatcaagtccctggtagctctcttggttgagacacaaatgaagaaactagagatcaaacttcgacattttgaagagctggaaactatcatggacagagagaaagaagctctagaacaacagaggcagcagttgcttactgaacgccaaaacttccacatggaacagctgaagtatgctgaattacgagcacgacagcaaatggaacagcagcagcatggccagaaccctcaacaggcacaccagcactcaggaggacctggcctggccccacttggagcagcagggcaccctggcatgatgcctcatcaacagccccctccctaccctctgatgcaccaccagatgccaccacctcatccaccccagccaggtcagataccaggcccaggttccatgatgcccgggcagcacatgccaggccgcatgattcccactgttgcagccaacatccacccctctgggagtggccctacccctcctggcatgccaccaatgccaggaaacatcttaggaccccgggtacccctgacagcacctaacggcatgtatccccctccaccacagcagcagccaccgccaccaccacctgcagatggggtccctccgcctcctgctcctggcccgccagcctcagctgctccttagcctggaagatgcagggaacctccacgcccaccaccatgagctggagtggggatgacaagacttgtgttcctcaactttcttgggtttctttcaggatttttcttctcacagctccaagcacgtgtcccgtgcctccccactcctcttaccacccctctctctgacactttttgtgttgggtcctcagccaacactcaaggggaaacctgtagtgacagtgtgccctggtcatccttaaaataacctgcatctcccctgtcctggtgtgggagtaagctgacagtttctctgcaggtcctgtcaactttagcatgctatgtctttaccatttttgctctcttgcagttttttgctttgtcttatgcttctatggataatgctatataatcattatctttttatctttctgttattattgttttaaaggagagcatcctaagttaataggaaccaaaaaataatgatgggcagaagggggggaatagccacaggggacaaaccttaaggcattataagtgaccttatttctgcttttctgagctaagaatggtgctgatggtaaagtttgagacttttgccacacacaaatttgtgaaaattaaacgagatgtggaaggagaacctcagtgattttattccctagtgaggcctctgagggcctccacactgcctggcagaacataccactgaactagtatgtgctagaggagggcacaaacatccgctccttccctaggcctgctggctctggttttctatgcagatgattcattggattgggggtgagtgttttgtttttctgggggcagtgtgagctttgagggttggaatattgggaggcattccttagtttcctcaactagcctggaaagttaggagtctagggtaattacccccaatgagtctagcctactattcactgctttgtgtgcatttttttctccctctttaaaaaaccctttaaaagaaaaaaaaaagtagatagtgctaaatattttagctcatgaaacttggttaggatggctgggggtacaagtccccaaactacctcttgttacagtagccagggagtggaatttcgtcaaccggtacttttaaggttaggatgggacgggaaaagtgaagcaggatattagctccttataccttctcccttccatttctgagatctcacattccatctatcacagggttttcaaagagatgctgagggtaacaaggaactcacttggcagtcagagcatcatgctttgaggtttggggtgctcaggctgggagggtagaatgccattccagaggacaagccacaaaaatgccttaatttgagctcgtatttacccctgctgataagtgacttgagagttcccggttttttcctcttgtccttccctcccttctgtccttccatgtgtggggaaagggtgtttttggtagagcttggtttccaaagcgcctggctttctcacttcacattctcaagtggcagtttcattatttagaatgcaaggtggacatcttttggatatctttttctatatattttctaaagctttacatatgagagggtatagggaggtgtttataaaacacttgagaacttttttccttaatatcagaaagcaaaaaaataaaaccacaattgagatttgcctttcaaaccctcaggtttgcctctaaccaggtgtccctggtcaccatcagagtactggaatacgggaaccgaggagaccttggtccttttgtttttgttctggactcttgggagtggaaatgagaatgagtttattcctactggagcttagttccaatgcatttggctccagaaagaccccagtgccttttgacaatggccagggttttacctacttcctgccagtctttcccaaaggaaactcattccaaatacttcttttttcccctggagtccgagaaggaaaatggaattctggttcatactgtggtcccttgtaacctcaggtctttaatgtgatcactttcaaatttaaaagatccaggtggaaatatttttactatagtaataattctacaaaatacctgaattcttaacactgttatatttcagtataagtggtggctttttcttttcatgtctttgatctggttttattcctgtaattcagccacctgattttgtgaggggggggaataatatgtggtttttgtacaaacatgtttctcagtgtgttgttattttggaaaaaatgaggggagggagtttggcaagaatggagaaaatgaatgaagaaggcctaatctctctctttttcagtgaataaatggaacaccatttctggattctaaaaaaaaaaaaaaaaaaaaaaaa

SEQ ID NO: 1921 - DNA, 3431 bp, Homo Sapiens
  NM_003076
agcacgccttttccgctagtcgccccgctctatcccatagtctcgctgccctgagcctcccgtgccggccggccggccgggggaacaggcgggcgctcggggggcgctcggggggcggggggagttccggttccggttctttgtgcggctgcatcggcggctccgggaagatggcggcccgggcgggtttccagtctgtggctccaagcggcggcgccggagcctcaggaggggcgggcgcggctgctgccttgggcccgggcggaactccggggcctcctgtgcgaatgggcccggctccgggtcaagggctgtaccgctccccgatgcccggagcggcctatccgagaccaggtatgttgccaggcagccgaatgacacctcagggaccttccatgggaccccctggctatggggggaacccttcagtccgacctggcctggcccagtcagggatggatcagtcccgcaagagacctgcccctcagcagatccagcaggtccagcagcaggcggtccaaaatcgaaaccacaatgcaaagaaaaagaagatggctgacaaaattctacctcaaaggattcgtgaactggtaccagaatcccaggcctatatggatctcttggcttttgaaaggaaactggaccagactatcatgaggaaacggctagatatccaagaggccttgaaacgtcccatcaagcaaaaacggaagctgcgaattttcatttctaacactttcaatccggctaagtcagatgccgaggatggggaagggacggtggcttcctgggagcttcgggtagaaggacggctcctggaggattcagccttgtccaaatatgatgccactaaacaaaagaggaagttctcttccttttttaagtccttggtgattgaactggacaaagacctgtatgggccagacaaccatctggtagaatggcacaggaccgccactacccaggagaccgatggctttcaggtgaagcggccgggagacgtgaatgtacggtgtactgtcctactgatgctggattaccagcctccccagtttaaattagacccccgcctagctcgactcctgggcatccatacccagactcgtccagtgatcatccaagcactgtggcaatatattaagacacataagctccaggaccctcacgagcgggagtttgtcatctgtgacaagtacctgcagcagatctttgagtctcaacgtatgaagttttcagagatccctcagcggctccatgccttgcttatgccaccagaacctatcatcattaatcatgtcatcagtgttgacccgaatgatcagaaaaagacagcttgttatgacattgatgttgaagtggatgacaccttgaagacccagatgaattcttttctgctgtccactgccagccaacaggagattgctactctagacaacaagatccatgagacaatagaaaccatcaaccagctgaagactcagcgggagttcatgctgagctttgccagagaccctcagggtttcatcaatgactggcttcagtcccagtgcagggacctcaagacaatgactgatgtggtgggtaacccagaggaggagcgccgagctgagttctacttccagccctgggctcaggaggctgtgtgccgatacttctactccaaggtgcagcagagacgacaagaattagagcaagccctgggaatccggaatacatagggcctctcccacagccctgattcgactgcaccaattcttgatttgggccctgtgctgcctgcctcatagtatctgccttggtcttgcttggggcgttccaggggatgctgttggttcaaggacaacaccagaatgaagagggtctcacaagacacctgttatcctcttctttcaccctatctcttcccacccccagcttccctttgccccacaaagttcccatgtgcctgtaccctcccctggtctacataggacctctagatagtgttagagagagaacatgtagtggtaatgagtgcttggaatggattgggcctcaggccaggtggtcttcaaggggaccagctaactgatcctgcccttcagagacccaggagttgggagctttcgctccttctccaagactcaggcctgtgggcactctataagctagttgatcttggctctcctgataacagaatccaatttccttccttccctccacaggtttggaacaaactctcccttcacttgttgccctgtagcactacagaaaccctggttcttgggctccactgagccccaggtcagtccccagccctctgggttggcctgctgtcagtgcttctctcactccttagttggggtccacatcagtattggagttttgttctttattgctccctcccagacactccctgtggctgccctttgtgattccctcagatctgccctaatcccgggcatttgggtgggggaatcttgcctttccctttcagagccccagggatctcatctggggaactgtcattgccagcagaggctgttccttcctgctgtttggagatgtgactcattcattcactcactccaccctgcctctgcatcccttaatggagaaacgggcctaaaaccaaacgggtaaaaagccctgggccatccctgtcttcctgtcccttgtctgcccagttgacacctactggtgacttctagggcactgaggagtgaaagcgcctagggctggagaatagcgctgagttgggtttgtgactcttccctctccctgcctcacaggattgtgactccccagcccctgccctcaaagcttcagacccctcaggtagcagcaggaccttgtgatcttggccccttggatctgagatggtttttgcatctttccaggagagcctcacattcttcttccaggttgtatcacccccgagttagcatatcccaggctcgcagactcaacacagcaagggtgggagacagctgggcacaaagggggaattccgttcagcatgggctctaaacccacagaactgacaaagcccctgcttccccaccccctcctcaggctcctgcgagcacacccccacccccaaatccctccctgttctacactggggacagcagaattttctccccgtcttccccttcctgccattttccctcccttgaaaggttgacactggacaaccttggggcagctgagccctggccgcctcctggctggaaccatgagaaggaagctcagtacttcccacagtgtccctgttgataactgtttttattaactgaattgtttttttcatggaccaaacttttttttgtactgtccccttattgatgttacccagttttaataaaagaatcttctgaaggatgggtcctcctacctactgtgagagagctcttccctgagctcttcttccttcaataccattagccaaa

SEQ ID NO: 1922 - DNA, 1728 bp, Homo Sapiens
  NM_003078
gccgggccgagccgagcgccgagcagggagcgggcggccgcgctccgggccggggtcccgggggagcagatcctcagaatggcccttggtgctgcaggcgcggtgggctccgggcccaggcaccgagggggcactggatgactctccaggtgcaggaccctgccatctatgactccaggtcttcagcacccacccaccgtggtacagcgccccgggatgccgtctggagcccggatgccccaccagggggcgcccatgggccccccgggctccccgtacatgggcagccccgccgtgcgacccggcctggcccccgcgggcatggagcccgcccgcaagcgagcagcgcccccgcccgggcagagccaggcacagagccagggccagccggtgcccaccgcccccgcgcggagccgcagtgccaagaggaggaagatggctgacaaaatcctccctcaaaggattcgggagctggtccccgagtcccaggcttacatggacctcttggcatttgagaggaaactggatcaaaccatcatgcggaagcgggtggacatccaggaggctctgaagaggcccatgaagcaaaagcggaagctgcgactctatatctccaacacttttaaccctgcgaagcctgatgctgaggattccgacggcagcattgcctcctgggagctacgggtggaggggaagctcctggatgatcccagcaaacagaagcggaagttctcttctttcttcaagagtttggtcatcgagctggacaaagatctttatggccctgacaaccacctcgttgagtggcatcggacacccacgacccaggagacggacggcttccaggtgaaacggcctggggacctgagtgtgcgctgcacgctgctcctcatgctggactaccagcctccccagttcaaactggatccccgcctagcccggctgctggggctgcacacacagagccgctcagccattgtccaggccctgtggcagtatgtgaagaccaacaggctgcaggactcccatgacaaggaatacatcaatggggacaagtatttccagcagatttttgattgtccccggctgaagttttctgagattccccagcgcctcacagccctgctattgccccctgacccaattgtcatcaaccatgtcatcagcgtggacccttcagaccagaagaagacggcgtgctatgacattgacgtggaggtggaggagccattaaaggggcagatgagcagcttcctcctatccacggccaaccagcaggagatcagtgctctggacagtaagatccatgagacgattgagtccataaaccagctcaagatccagagggacttcatgctaagcttctccagagaccccaaaggctatgtccaagacctgctccgctcccagagccgggacctcaaggtgatgacagatgtagccggcaaccctgaagaggagcgccgggctgagttctaccaccagccctggtcccaggaggccgtcagtcgctacttctactgcaagatccagcagcgcaggcaggagctggagcagtcgctggttgtgcgcaacacctaggagcccaaaaataagcagcacgacggaactttcagccgtgtcccgggccccagcattttgccccgggctccagcatcactcctctgccaccttggggtgtggggctggattaaaagtcattcatctgacaaaaaaaaaaaaaaaaaa

SEQ ID NO: 1923 - DNA, 2425 bp, Homo Sapiens
  NM_003079
gctccggacgcgaggggcggggcgagcgcgggacaaagggaagcgaagccggagctgcgggcgctttttctgcccgcggtgtctcagattcattcttaaggaactgagaacttaatcttccaaaatgtcaaaaagaccatcttatgccccacctcccaccccagctcctgcaacacaaatgcccagcacaccagggtttgtgggatacaatccatacagtcatctcgcctacaacaactacaggctgggagggaacccgggcaccaacagccgggtcacggcatcctctggtatcacgattccaaaacccccaaagccaccagataagccgctgatgccctacatgaggtacagcagaaaggtctgggaccaagtaaaggcttccaaccctgacctaaagttgtgggagattggcaagattattggtggcatgtggcgagatctcactgatgaagaaaaacaagaatatttaaacgaatacgaagcagaaaagatagagtacaatgaatctatgaaggcctatcataattcccccgcgtaccttgcttacataaatgcaaaaagtcgtgcagaagctgctttagaggaagaaagtcgacagagacaatctcgcatggagaaaggagaaccgtacatgagcattcagcctgctgaagatccagatgattatgatgatggcttttcaatgaagcatacagccaccgcccgtttccagagaaaccaccgcctcatcagtgaaattcttagtgagagtgtggtgccagacgttcggtcagttgtcacaacagctagaatgcaggtcctcaaacggcaggtccagtccttaatggttcatcagcgaaaactagaagctgaacttcttcaaatagaggaacgacaccaggagaagaagaggaaattcctggaaagcacagattcatttaacaatgaacttaaaaggttgtgcggtctgaaagtagaagtggatatggagaaaattgcagctgagattgcacaggcagaggaacaggcccgcaaaaggcaggaggaaagggagaaggaggccgcagagcaagctgagcgcagtcagagcagcatcgttcctgaggaagaacaagcagctaacaaaggcgaggagaagaaagacgacgagaacattccgatggagacagaggagacacaccttgaagaaacaacagagagccaacagaatggtgaagaaggcacgtctactcctgaggacaaggagagtgggcaggagggggtcgacagtatggcagaggaaggaaccagtgatagtaacactggctcggagagcaacagtgcaacagtggaggagccaccaacagatcccataccagaagatgagaaaaaagaataagtgttgccttgttttgtgtgttctaaatactttttttaatgaaaaaatgttttttggttttaatggtgttacgtggtttgtgtattaattttttttcttgtccatatcacaccaccaaaggcttttggaccatttagcatcatgagcctaatggctcagtcagtcacctttcttaagtgttgtgaagatggctcttttctttggatcttgtttctagccctcaactgctgaaagcctcagaatttagattaattgagaaaacacccacctcttttagagaattatcctttgatgctgcagaatctactcttacaatgccttcctacagctcactggggtgcttaccaaagccatagctttaaaccttcccagtccccatcagtagcttcctgaaagtctcctctcttgtttacttctgcaaagggtagcttcttaaaaacgtgatcatgtatgagtatgtatttgttcacttacccttttttacttttaatcaatgtcagataccaagagttgtgttaagctgagtgtagtgtgtaactaactacacttggatcttactgatccagaaatagtccccatagttagagtagttacttatgaagtggttattaaagtgaacacagcacatatacattatctatactgctttttgttatgattaatactgggtatgttctggtaaatccatccttattgtatagaaaaaaaattacttttttaccaggttttccaaagacagaatagatcacaaagctcaaggaatttaatattcttgtaatggactagataattcaaactgattagcccattccagaagaaaaacagctgggaattaagttaatccacttgaaattgttttacaataatcagaacatccaaacctcaaggctcaggatcccatagaccagagcccacctttttgataaacttagtaaagtcttggagactagaagcaagatagtttgtgacacataagcttcccaaaaactagaatagatttttactgaatagtggtatatctgatggtatatgtttcttaaaggtccaaatgtaataaaaaaaaaa

SEQ ID NO: 1924 - DNA, 1561 bp, Homo Sapiens
  NM_003083
cccgtagctccgcccatcggagaagcgaccttacagcgcctgcctctttctgagcggcatgaagccacctcccaggcggcgagcggccccggcgcgctatctgggcgaggtgaccggtcccgcgacctggagcgctcgcgagaagcggcagctagtgcgactcctgcaggcgcggcagggccagccggagccggacgccaccgagctggcccgggagctgcggggccggagcgaggctgagatccgggtcttcctccagcagctcaagggccgcgtagcccgggaggccattcagaaagtgcatccgggtggccttcagggaccaaggcgccgggaggcacagcccccagcccccatagaggtctggacggatctggctgagaagataacagggccactggaagaagccctggcagtggctttctcgcaggtgctcaccatcgcggccacggaaccggtcaccctcctgcactccaagccccccaagcccacgcaggcccgtggaaagcctttgctcctgagcgcccctggaggacaggaagaccccgcccctgaaatacctagctctgcccctgctgcacctagctccgcacccaggactcctgaccctgcccctgagaaaccttctgagtcgtcggctggtccctccactgaagaagactttgctgtggactttgagaagatctacaagtacttgtcctctgtctcccgaagtggccgcagccccgagctctcagcagctgagtccgctgtggtcctcgacctgctcatgtcacttccagaggagctgccactcctgccctgcacagccctggttgagcatatgacggagacgtacctacgcctgacagccccccagcccattcccgctggagggagcctggggcctgcagcagaaggggatggggctggctccaaggcaccagaggagacccccccagccaccgagaaggccgagcacagcgaactgaaatcgccttggcaagcagctgggatctgtcccctgaacccgttcctggtgcccctggagcttctgggtcgggcagccacccctgccaggtgaggggcatggcgggcaggaggccacaccaggccccccgccctgcccctcggttctgctcggctggccctggctctttctgaggatcccgtcatgggggaaggtccttgagatgatgctcagctgtggggcgggcctctaagatgccccatactttgggggtctcagaaatggaacccccgttgtacaggggttgggtgggggttgcaggactccactcacaagcctcctgatgtcaaggacaggcggacagggctggcctcccccagtccccaagccccactgtgccttgttgtctgctggggggccatagctggcactgcccaccgtaaaggccctcgcacattttcccccttcctgtacacctcggggccagcatcctcaccttcttcaactgaccagtcgtggttactccctgctgccaggtccttccccttcccgggggtattctgtgaccatgaataaagttatcattctctttctctttcacaaaaaaaaaaa

SEQ ID NO: 1925 - DNA, 2533 bp, Homo Sapiens
  NM_003084
gtggggcgaacatggctgaaggaagccgaggtggccctacgtgtagcggggtgggtggcaggcaggacccagtctccggcagtggcggctgcaactttccagagtatgagcttcccgagctaaatacgcgcgctttccatgtgggcgcctttggggagctgtggcggggccgtctgcgcggggccggggacttgtcgctgagggagccgccggcatccgctctgcctgggagccaggcagctgactccgaccgggaggatgccgcggtggccagggatctggactgcagcctggaggcggcggctgagctgagggcggtgtgcggccttgataaactgaaatgccttgaggacggtgaggatccagaagtcattccggagaatactgacctggtgactttgggggttagaaaaaggttcttggaacatcgggaagaaaccattacaatagatcgagcctgcagacaagaaacattcgtttatgagatggagtcacatgccataggaaaaaagcctgaaaattcagcagacatgattgaagaaggggagcttatcctatctgtgaatatcttgtaccctgttatatttcataagcacaaagaacacaaaccataccaaacaatgctggtgttgggcagtcaaaaactcacacaactgagggattcaattcgatgtgtcagtgacctccagattggtggtgaattcagcaacactcctgaccaagcccctgagcacatcagcaaagacctatacaaatcagccttcttttattttgaaggaacattttataatgataaaagatacccagaatgcagagatttgagcagaactatcattgagtggtcagagtcccatgatagaggctatggaaagtttcagactgctagaatggaagatttcaccttcaatgacttgtgtattaaactgggttttccttacttatactgtcatcagggagactgtgaacatgtcattgtcattactgacataaggcttgtgcatcatgatgactgcttggataggacattgtatcccctccttatcaagaagcattggctatggaccagaaaatgttttgtttgtaaaatgtatacagccagatgggtgacgaacaatgacagttttgcaccagaggacccatgcttcttttgtgatgtttgcttccgaatgctgcactatgattcagaaggcaacaaactgggggaattccttgcttatccttatgttgatcctggaacctttaattaagaatagctacactcacaaaaataccccctcatgaaataactgttctcttggatggttaccttatttctaagaaacgccactgaggaacaggatccactttgaacagtccgctaaagctatcaaaaaaaagtccaaatcacagattttcttataatgatagtatttaaatgtttataacatagtttaattttatatttattccagatagtatttaatttagtgctttttacccattttgagttgagttgtagtactttatatattctgactttaaatcctttgctcagacacacatattctttctcccaatccatgccttccctattcattctctgtccagagttttttgctaaagatagaattattaatgatacatcaagtagtggaagtgttttgaaaattctttgaagaatgtgagagctacaccttctaccatgaggcttccaaggttgtatttaaatttgactgaatatctggatggctaagaacagacatttatcttacacatggaaaactgacgaaacctataagcctatgtgtttgacagtgaagtatgttttatggacttaaatgccacaaacagttaagtccattggcttggagatgacaagcacgagtttctggtatgtctagtgttctcattcactgattcagtcagtacacagataatcactatagagaacttaagaggctggcttatgttatacctaaatttttactttctgtatacaacaatgctaaaattgagcagattgataactgccagcaaaccatagatttaagataaatgaatgatttacccaacccgaaattccatgggctaaattttgatcctttattttcaatacgcgttccttataggtcttacatcgatatcgaaggatattttatcttattcattcatttcatactctcaaaacaccaaacttcaaaaagttaattattgtcataatgcattattccatgtgtggtgtcaatacattttagcggacaaagaagaaacatgccagttaaaacatttctgctactggattctttattaattatttgagaacgttattttgctagttcttaaggttaagtttttcatcaaagactcaggtacctattattgttccctggtgaaactgaggagaaaagttaatcaaccaggttactcccacagtttgcccgtgtgttatgtatcagttatacaggtatcccaccaagttcaagtcaaaagaaattcctaactttgtatatttctggagctatataaacccctgatttaagaaaaaaaaaaaaaa

SEQ ID NO: 1926 - DNA, 4661 bp, Homo Sapiens
  NM_003086
gcgggagtcatggatgtagatgctgaaagagagaagataacacaggagatcaaggagctggaaaggattttggatcccggctcctcgggctcccacgtggagatctcagaatcaagtctcgagtcagattctgaagcagattcactgccttctgaggacttggatcctgccgatcccccgatctcggaagaagaaaggtggggcgaagccagcaatgacgaggacgatcccaaggataaaaccctccctgaagacccagaaacctgcctgcagctgaacatggtctaccaggaggtcatccaggagaagctggctgaggccaacctgctgctggcccagaaccgggagcagcaggaggaactcatgagggatctggctgggtccaaaggcaccaaggtgaaagatggcaaaagcctgcccccaagcacatacatggggcacttcatgaagccgtatttcaaggacaaggtcacgggcgtggggccacctgccaacgaggacacacgagagaaggctgcccaggggatcaaggctttcgaggagctccttgtgaccaaatggaaaaactgggaaaaggccttgctccgaaagtcagtggtgagtgaccgcctgcagcgattgcttcagcccaagttactgaagctcgagtacttgcaccagaagcagagcaaagtctccagtgagctggagaggcaagccctggagaagcagggcagggaagccgagaaggagatccaggacatcaaccagcttccagaagaggccttgctgggaaacaggctggacagccacgactgggagaagatttccaatattaactttgaaggcagccgcagtgcagaggagatccggaagttctggcagaactcggagcaccccagcatcaacaagcaggagtggagcagggaggaggaggagcggctgcaggcgatcgcggctgcacacggccacctggagtggcagaagattgcagaggagctggggaccagccgcagcgccttccagtgcctgcagaaattccagcagcacaacaaagctctgaaacgcaaggagtggacagaggaggaggaccgcatgctcacgcagctggtgcaggagatgcgcgtcggcagccacatcccctaccgcagaattgtctactatatggaagggagagactccatgcagctgatctaccgatggaccaagagcttggatcctggtctgaagaagggttactgggccccggaggaagatgctaagttgcttcaagctgttgccaaatacggggagcaggattggtttaaaatccgggaagaggtgccaggtaggagcgatgcccagtgccgagatcggtatctcaggagattacatttcagcttgaaaaagggtcggtggaatttaaaagaagaggaacagttaattgaattaatagaaaaatatggtgtcggtcactgggcaaaaatagcttctgagctgccccatcggtctggctcccagtgtctgagcaagtggaagatcatgatggggaagaagcagggtctccggaggcggcggcggagggcccgtcacagcgtccggtggagctctaccagcagcagcggcagcagcagtggcagcagtggagggagcagcagcagcagcagcagcagcagcgaggaggacgagccagagcaggcgcaggccggggagggtgacagagcgctgctgtccccacagtacatggtcccggacatggacctgtgggttcctgccaggcagagcaccagccagccatggagaggaggggcaggggcctggctgggaggccccgctgcctccctcagccctcccaaggggtccagtgccagccagggcggcagcaaggaagcttccaccacagccgcggctcctggagaggagacgagtccggtgcaggtccctgccagggcccacggccctgtcccgaggtctgcccaggcctcccactcagcagacactcgcccggcgggcgcagagaagcaggccctggagggtgggaggcgtctgctgacagtgcctgtggagaccgtgctgagggtgctcagggccaacacggctgctcggagctgcacacagaaagagcagctgaggcagccacccctgcccacctcatccccaggggtcagctctggtgacagcgtggcccgatcccatgtgcagtggctacggcacagagccacccagagtgggcagcggcgctggagacacgctctgcaccggaggctcctgaaccgcaggctgctgctggctgtgaccccttgggtaggggacgttgtcgtgccctgcacacaggcttcccagagacccgccgtagtgcagactcaagcggatggcctcagggagcagctgcagcaggcccgcctggccagcacccctgtgtttaccctgtttacccagctgttccacatcgatactgccggctgcttggaggtcgtccgagagaggaaggccctgccacccaggctgccccaggctggtgctcgggacccaccagttcatcttctgcaggcatcctcaagtgcccagagcaccccaggccacctcttcccaaacgtgccggctcaagaagcctcaaagagtgccagccacaaagggagccgaagactggcgtccagccgggtggagcgcaccctaccccaggcgtccctgctggcttcaaccggcccccggcccaagcccaagactgtgtcggagctgcttcaggagaagcggcttcaggaggcccgtgccagggaggccacccggggcccggtggtgctcccgtcccagctgctggtctcctcgtctgtgatcctccagccccctctaccacacaccccacacggccgcccagccccgggtcccaccgtcttaaatgtaccgctctctgggcctggggcccccgcggcagccaaacctggcacttctggctcctggcaggaggctgggacttcagccaaggacaagagactctccaccatgcaagccctgcccctcgctcctgtcttctcagaggccgagggcacagcccctgctgcttcccaagcccctgccctgggccccggccagatctctgtgagctgccccgagagtggtctcggacagtctcaggcccccgctgcatcccggaagcagggcctgcctgaggcgccaccctttctccccgcagcccccagccccaccccactgcccgtccagcccctcagcctgacgcacataggagggccacatgtggcgaccagtgtccccctgcctgtcacctgggtgctcacagcccaggggcttctccctgttcctgtaccagctgtggtgagccttcccaggccagcagggacccctggccccgcagggctgctggccactctgctgcctcccctgactgagactcgggcggcccagggccccagggccccagcgttgagcagctcttggcagcccccagccaatatgaacagggaaccggagccttcctgcaggacagacaccccagctcctcccacacacgccctctcccaaagtcctgcagaagcggatggcagtgtggcctttgtccctggagaggcccaggtggccagggagatacctgagcccaggacgtcctcccacgctgaccctcctgaagcagaacccccttggtccgggaggctgccagccttcggtggtgtcatcccagcaactgagccaagggggacgccggggtccccctcagggacacaggagcccagggggcctctgggcctggagaagctgcccctgcgccagcctgggcctgagaagggggccctggacctggagaagccgcccctaccccagcctgggcctgagaagggggccctggacctgggcctgctgtcccaggagggcgaggcggccacacagcagtggctggggggccagcggggggtgcgtgtgcctcttctgggcagcagactgccctatcagcccccagccctgtgcagcctgcgagctctgtccggtctcctactccacaagaaggccctggagcacaaggccacctccctggtggtggggggcgaggctgagcggccggccggagcactgcaagcctcactggggctggtgcgggggcagctccaggacaacccggcctacctcctgttgcgggcgcggttcctggcagccttcaccctccctgcgctcctggccaccctggccccccaaggcgtccgcaccaccctctcagtaccttcgagggtgggctctgagagtgaggatgaagacctcctgagtgagctggaacttgcagacagggacgggcagccgggctgcacgacagccacatgccccattcagggagccccagactctggtaaatgctctgcttcctcctgcctggatacttctaatgaccctgacgacctggacgtgctcagaacccggcatgccaggcacacccggaagcggaggcggctggtgtgagcagcaggacaagcactttctcagaagcccgtggccctgctgacgagagacagcccacccccagcctgcaagagaggcagccagaggccaggtatctgctggccgctgactgaccaggtccgcagtgaacagaggcgggcctgccgactgactgtgtggcatggagcatggctgttccccaagtgcacacctgaacacttggaggaataaagttctgtttttaattgtggaaaaaaaaaaaa

SEQ ID NO: 1927 - DNA, 1940 bp, Homo Sapiens
  NM_003089
gcggttcggcgcggaaagcgggaggtggaggggcggcttggggcaagcgcgcgcgcgcagtgcagaagccagccccccgcggctgaggtactcaaggtgcccaaaggcggggtagtgacctcgcgcgtgcgctgtgcccgcggcagcgccgggtcctagtgtgtgggttgttgttggcaccgcacggcgcgtgcgcagtgaggacggcggagggatttgcggccgggacccaccccctgctccagtcgctatcggaggccgcgcgggtggctgagcagcggcctggtgcgctcgcttagcgggcgacggaatcagacggacgtggacgcccccggagtggaagccgaagcaggagttgttgttgctgaggggctgccgcagccgccgcgagcctccggacagacgccagagcgaggagggcgctacgcgacttggcaagatgacccagttcctgccgcccaaccttctggccctctttgccccccgtgaccctattccatacctgccacccctggagaaactgccacatgaaaaacaccacaatcaaccttattgtggcattgcgccgtacattcgagagtttgaggaccctcgagatgcccctcctccaactcgtgctgaaacccgagaggagcgcatggagaggaaaagacgggaaaagattgagcggcgacagcaagaagtggagacagagcttaaaatgtgggaccctcacaatgatcccaatgctcagggggatgccttcaagactctcttcgtggcgagagtgaattatgacacaacagaatccaagctccggagagagtttgaggtgtacggacctatcaaaagaatacacatggtctacagtaagcggtcaggaaagccccgtggctatgccttcatcgagtacgaacacgagcgagacatgcactccgcttacaaacacgcagatggcaagaagattgatggcaggagggtccttgtggacgtggagaggggccgaaccgtgaagggctggaggccccggcggctaggaggaggcctcggtggtaccagaagaggaggggctgatgtgaacatccggcattcaggccgcgatgacacctcccgctacgatgagaggcccggcccctccccgcttccgcacagggaccgggaccgggaccgtgagcgggagcgcagagagcggagccgggagcgagacaaggagcgagaacggcgacgctcccgctcccgggaccggcggaggcgctcacggagtcgcgacaaggaggagcggaggcgctccagggagcggagcaaggacaaggaccgggaccggaagcggcgaagcagccggagtcgggagcgggcccggcgggagcgggagcgcaaggaggagctgcgtggcggcggtggcgacatggcggagccctccgaggcgggtgacgcgccccctgatgatgggcctccaggggagctcgggcctgacggccctgacggtccagaggaaaagggccgggatcgtgaccgggagcgacggcggagccaccggagcgagcgcgagcggcgccgggaccgggatcgtgaccgtgaccgtgaccgcgagcacaaacggggggagcggggcagtgagcggggcagggatgaggcccgaggtgggggcggtggccaggacaacgggctggagggtctgggcaacgacagccgagacatgtacatggagtctgagggcggcgacggctacctggctccggagaatgggtatttgatggaggctgcgccggagtgaagaggtcgtcctctccatctgctgtgtttggacgcgttcctgcccagccccttgctgtcatcccctcccccaaccttggccacttgagtttgtcctccaagggtaggtgtctcatttgttctggccccttggatttaaaaataaaattaatttcctgttgatagtgggcaaaaaaaaaaaaaaaaaa

SEQ ID NO: 1928 - DNA, 1068 bp, Homo Sapiens
  NM_003090
gcgcggggcacgctgggacgtctcgctggcgggaggccacgggctttccacagcgcgggggaacgggaggctgcaggatggtcaagctgacggcggagctgatcgagcaggcggcgcagtacaccaacgcggtgcgcgaccgggagctggacctccgggggtataaaattcccgtcattgaaaatctaggtgctacgttagaccagtttgatgctattgatttttctgacaatgagatcaggaaactggatggttttcctttgttgagaagactgaaaacattgttagtgaacaacaacagaatatgccgtataggtgagggacttgatcaggctctgccctgtctgacagaactcattctcaccaataatagtctcgtggaactgggtgatctggaccctctggcatctctcaaatcgctgacttacctaagtatcctaagaaatccggtaaccaataagaagcattacagattgtatgtgatttataaagttccgcaagtcagagtactggatttccagaaagtgaaactaaaagagcgtcaggaagcagagaaaatgttcaagggcaaacggggtgcacagcttgcaaaggatattgccaggagaagcaaaacttttaatccaggtgctggtttgccaactgacaaaaagaaaggtgggccatctccaggggatgtagaagcaatcaagaatgccatagcaaatgcttcaactctggctgaagtggagaggctgaaggggttgctgcagtctggtcagatccctggcagagaacgcagatcagggcccactgatgatggtgaagaagagatggaagaagacacagtcacaaacgggtcctgagcagtgaggcagatgtataataataggccctcttggaacaagtcttgcttttcgaacatggtataatagccttgtttgtgttagcaaagtggaatctatcagcattgttgaaatgcttaagactgctgctgataattttgtaatataagttttgaaatctaaatgtcaattttctacaaattataaaaataaactccactcactatgctaccaaaaaaaaaaa

SEQ ID NO: 1929 - DNA, 1153 bp, Homo Sapiens
  NM_003091
aactccagggctagtgagctggaccggaagtaggtttctacccgaccgcattttacgtggtgctgcatttccggtagcggcggcgggaaatcggctgtgggagagaggctaggcctctgaggaggcgaatccggcgggtatcagagccatcagaaccgccaccatgacggtgggcaagagcagcaagatgctgcagcatattgattacaggatgaggtgcatcctgcaggacggccggatcttcattggcaccttcaaggcttttgacaagcacatgaatttgatcctctgtgactgtgatgagttcagaaagatcaagccaaagaactccaaacaagcagaaagggaagagaagcgagtcctcggtctggtgctgctgcgaggggagaatctggtctcaatgacagtagagggacctcctcccaaagatactggtattgctcgagttccacttgctggagctgccgggggcccagggatcggcagggctgctggcagaggaatcccagctggggttcccatgccccaggctcctgcaggacttgctgggccagtccgtggggttggcgggccatcccaacaggtgatgaccccacaaggaagaggtactgttgcagccgctgcagctgctgccacagccagtattgccggggctccaacccagtacccacctggccgtgggggtcctcccccacctatgggccgaggagcaccccctccaggcatgatgggcccacctcctggtatgagacctcctatgggtcccccaatggggatcccccctggaagagggactccaatgggcatgccccctccgggaatgcggcctcctccccctgggatgcgaggccttctttgacccttggccacagagtatggaagtagctccgcagaggcgtgggctcgattcctcagggccacgttaccacagacctgtttgtttcttatgctgttgttcgtggagtctcatgggattgtctggtttcccttacagggccccctcccccgggaatgcgcccaccaaggccctagactcatcttggccctcctcagctccctgcctgtttcccgtaaggctgtacatagtccttttatctccttgtggcctatgaaactggtttataataaactcttaagagaacattataattgc

SEQ ID NO: 1930 - DNA, 1231 bp, Homo Sapiens
  NM_003093
agtacctgacattccaggcgcgagccacggcgccggctcctgttggttttagtatctgtcttgttccactagaatctcaaccccacaaggacaagaatttttatctgttttgttcactgctgttttttcagcatttatagcagctccaggcgcgtagcagagaatcattaaatatttatagaaagattaaatacgctcttccggaagcaccgacaaacaagattaaatgagcttggattgaacctcgtagcggcccgtagtactcctccttcccgccatcctatagatgaaaggaagaaaaggaaaagccccgcccctcgctcggctgctggaggcgagggcttcggaagtcttcatgctagtctcgtggggttccgcggtgtcgtcgctggctgtgcgcgtcatttccgggcgtcacgtaacggagtggccaacggcctgcagagcaacatgcccaagttttattgtgactactgcgatacatacctcacccatgactctccatctgtgagaaagacacactgcagtggaaggaaacacaaagagaatgtgaaagactattatcagaaatggatggaagagcaggctcagagcctgattgacaaaacaacggctgcatttcaacaaggaaagatacctcctactccattctctgctcctcctcctgcaggggcgatgataccacctccccccagccttccgggtcctcctcgccctggtatgatgccagcaccccatatggggggccctcccatgatgccaatgatgggccctcctcctcctgggatgatgccagtgggacctgctcctggaatgaggccgcccatgggaggccatatgccaatgatgcctgggcccccaatgatgagacctcctgcccgtcccatgatggtgcccactcggcccggaatgactcgaccagacagataaggatagaggggaggccttattgtatcggttttatattacctgttctgcttcaccaggagatcatgctgctgtgatactgagttttctaaacagcataaggaagacttgctcccctgtcctatgaaagagaatagttttggaggggagaagtgggacaaaaaagatgcagttttcctttgtattgggaaatgtgaaaataaaattgtcaactctttcagttaaaagtgtgttccctttttcctcctctctgtgttctctgtgtattataaaagaaatgaaacattccaaaaaaaaaaaaaaa

SEQ ID NO: 1931 - DNA, 806 bp, Homo Sapiens
  NM_003095
gggaggtgaaaggtcatagtcctgtttggcggccatttctcttgaaactgcggctcgggacctgcggtacctgctgtagtcacgagggacgggcggcggcctggtcggcagagagtagcctgcaacattcggccgtggttacgatgagtttacccctcaatcccaaacctttcctcaatggactaacaggaaagccagtgatggtgaaacttaagtggggaatggagtacaagggctatctggtatctgtagatggctacatgaacatgcagcttgcaaatacagaagaatacatagatggagctttgtctggacatctgggtgaagttttaataaggtgtaataatgtcctttatatcagaggtgtggaagaagaggaagaagatggggaaatgagagaatagcatcttttgtgggggattttttttatatatatttctagacaataaagatttgtttgtttttcaacttgacttgtgaactatttgtattcagatatttacaagcaaagctgaaatgatgaaccaattgggaaagattactcactgaactaatgctttaaaagccactgaatttcatttaagttgcttttcttttgtaagcccaatattcttttttttcccataaaggataattatttatatgctttagatatttttatgaaggtgaatttcagaccttttcttgtaaaattatctattagctgagaccttttaaatgcaactttttcttttaaagttatttttgagctacttttaacgtataaaattaaacattttcttggtattaataaaaaaaaaaaaaaa

SEQ ID NO: 1932 - DNA, 606 bp, Homo Sapiens
  NM_003096
agacgcaagacgccgggcctacagcgggagcgtgaggaaagccgtgcgttgcgttccaaggcatctgtgagcccgcggagtatacaccatgagcaaagctcaccctcccgagttgaaaaaatttatggacaagaagttatcattgaaattaaatggtggcagacatgtccaaggaatattgcggggatttgatccctttatgaaccttgtgatagatgaatgtgtggagatggcgactagtggacaacagaacaatattggaatggtggtaatacgaggaaatagtatcatcatgttagaagccttggaacgagtataaataatggctgttcagcagagaaacccatgtcctctctccatagggcctgttttactatgatgtaaaaattaggtcatgtacattttcatattagactttttgttaaataaacttttgtaatagtcaaaaatgctttctcagatgttctgaatatagaatatcagctctcattccagttttttctaacatgaattttcctggttgacattgatttcaaagggttttatgcattaaagtgaaagaatcttattaaatgcgaaaaaaaaaaaaaaaaaaaaaaaaaaaaa

SEQ ID NO: 1933 - DNA, 2345 bp, Homo Sapiens
  NM_003098
cccttctgacccaccccgctaggtagtcccacacggcggccctcggctcccgggccccgccccggcctcctgcatttgcccgaggccccctccccagcactggccacaccccagggtagccccgcccccagagctcctcccccagcggccggggtagggtggcggctggcccagccgggcccccgctgccctctgccctgggcgcttggtcggagcgggctgggcaaagcgggacagggcgagcgcggcggcccgggggctcggaggcgaagatggcgtccggcaggcgcgccccgcgcaccgggctgctggagctgcgcgccggggcgggctcgggggccggcggcgagcgatggcagcgggtgctgctgagtctggcggaggacgtgctgaccgtgagccccgccgacggcgaccctggtcccgagcccggcgctccgcgggagcaggagcccgcgcagctcaacggcgccgcggagccgggcgccgggcccccgcagctgccagaggcgctactgctccagcggcgccgcgtgacggtgcgcaaggccgacgccggtgggctgggcatcagcatcaaaggcggccgggagaacaagatgcctattctcatttccaagatcttcaagggattggcagctgaccagacagaggccctttttgtgggggatgccatcctgtctgtgaatggggaagacttgtcctctgctacccatgatgaggcggtgcaggtcctcaagaagacaggcaaggaggtggtgctggaggtcaagtatatgaaggacgtctcaccgtatttcaagaactctactggtgggacctcggtcggctgggactcacctcctgcctcaccccttcagcggcagccttcctcccctggccccacaccccggaacttcagcgaggccaaacacatgtccttgaagatggcatatgtctcgaagaggtgcacccccaatgacccggagcccaggtatctggagatctgctcggcagatggtcaagacaccctcttcctgagggccaaggatgaggctagtgcgaggtcgtgggcgactgccatccaagcccaggtcaatactctgacgccgcgggtcaaggatgagctgcaggcactgttggcagccaccagcacagctgggagccaggacatcaagcagattggctggctaactgagcagctgcccagtgggggcacagcccccaccctggccctgctaactgaaaaggaactgctcctctacttgtctctccccgagacccgcgaggccctgagccggccagcccgtactgccccactcatcgccaccagactggtgcactcaggcccctccaagggctcagtgccctacgatgcagagctctcttttgccctgcgcacgggcacgcgtcacggtgtggacactcacctgttcagcgtggagtcaccgcaggagctggctgcctggacccgccagcttgtggatggctgtcaccgggccgccgagggtgtgcaggaggtgtctacagcctgcacgtggaatgggcgtccctgcagcctgtctgtgcacatcgacaagggcttcacactgtgggcggctgagccaggtgcagcccgagctgtgctcctgcgacagcccttcgagaagctgcagatgtcttcagatgacggtgccagtctccttttcctggattttggaggtgctgaaggcgagatccagctggacctgcactcgtgtcccaaaaccatagtcttcatcatccactccttcctgtcggccaaagtcacccgcctcgggctgttggcctagaagtcgccggatgcactagccctgaagaggggtgtccatgacatggcctgagctgggcctccaccgactgcctgctcacccctgggctgagggaagggagaggagaggaacaagggcctccgaaaccccaaccctgagggagactggattggtcttggggcccaggacccagacgcaggacagagtggactctgcctgtgatggggtggccttcctgctgcccccctccaccagtgccttttgcagagagatattttgtgtacacagaagccattccgagtctgggacctgcccctgtgcggatcctgaccccagccaacagctgagctgccgggcctcctcgaggcccctaagccacccccagaggtcccatctgaagctggagtaccctggggtcagcagcaagagaaagaagaggagattttctgtttgtttttcccctcagccctgccaccgtggggagtctggtttttctcttcatcctgtctctctcctccttactcttggataaataaacagcctgtgagcacacaggcagcccggcccagtgaaaaa

SEQ ID NO: 1934 - DNA, 8221 bp, Homo Sapiens
  NM_003099
agttgttgttgcggcttccgccgcgggtggaagaagatggcgtcgggtggtggtggctgtagcgcttcggagagactgcctccgcccttccccggcctggagccggagtccgagggggcggccgggggatcagaacccgaggctggggacagcgacaccgagggggaggacattttcaccggcgccgcggtggtcagtaaacatcagtctccaaagataactacatcccttcttcccatcaacaatggctccaaagaaaatgggatccatgaagaacaagaccaagagccacaggatctctttgcagatgccacagtggagctatccttggacagcacacaaaataatcagaagaaggtgctagccaaaacactcatttctcttcctcctcaggaagccacaaattcttcgaagccccagccaacctatgaggagctagaggaagaagaacaggaggatcaatttgatttgacagtcggtataactgatcctgagaagataggggatggtatgaatgcatatgtagcctacaaagttacaacacagacaagcttaccattgttcagaagcaaacagtttgcagtaaaaagaagatttagtgactttctgggtctttatgagaagctttccgagaagcactctcagaatggcttcattgtccctccgcccccggagaagagcctcatagggatgacaaaagtgaaagttgggaaggaagattcttcttctgcagaatttcttgaaaaacggagggccgctttagaaaggtaccttcagaggattgtaaatcatcctaccatgttacaggaccctgacgtcagagagttcttggaaaaagaagagctgccacgtgccgtgggtacccagacattgagtggtgctggtctcctcaagatgttcaacaaagccacagatgccgtcagcaaaatgaccatcaagatgaatgaatcagacatttggtttgaggagaagctccaggaggtagagtgtgaggagcagcgcttacggaaactgcatgctgttgtagaaactctagtcaaccataggaaagagctagcgctgaacacagcccagtttgcaaagagtctagccatgcttgggagctctgaggacaacacggcattgtcacgggcactctcccagctggctgaggtggaagaaaaaattgagcagctccaccaggaacaggccaacaatgacttcttcctccttgctgagctcctgagtgactacattcgcctcctggccatagtccgcgctgccttcgaccagcgcatgaagacatggcagcgctggcaggatgcccaagccacactgcagaagaagcgggaggccgaggctcggctgctgtgggccaacaagcctgataagctgcagcaggccaaggacgagatcctcgagtgggagtctcgggtgactcaatatgaaagggacttcgagaggatttcaacagtggtccgaaaagaagtgatacggtttgagaaagagaaatccaaggacttcaagaaccacgtgatcaagtaccttgagacactcctttactcacagcagcagctggcaaagtactgggaagccttccttcctgaggcaaaggccatctcctaatggaccaaggaccccagagcccacctgtgtgacgctgcctttttatacactgtcctcctccaccttgatggacccctagtgatgcatcctgcctaggctggacttaaccccttcctccctgtccccacgaccaactgtccccagttactctaaccgttatttcatttagcttccatatatattttcttacctaagagaatagtttcctgctttaagcaaaagacctacaataggtggtggaattatgggatggggtggagtattgatataaatatataaatacaaatgtatatttttcaggatgtggtttaggaactgggaataacgttttctgttactcctgatggtgccatgaaaaggttatgtaataaaatattttaaaatcaggtcacatgactcagaatgttggtggtttttgcttaggctggggagcagttgggaatcaggtctggaatactcctaaccaagaagttgcccaggtatagtaagtttttctctaccgttcacaagttttgtgctgctgcttccctctggaaatggggtttctttctctccgcctacctcagctacctgttctgagggtctcaatctgtttcgtattcccacttctttagggaaggagttttaaaaacatctcttaaaataagaggagcaaaatctattaaaacctattctcctgcaaaggaggcagagactttctctctctcttttttttttttttttggtgtccctatcattaagcaagagcctttctcttttattcttcctgcttccctaagctgctcagggttctctgagtcttgccctctgatggcaagtcttatatataactaaacctatttttgtcacccatcaaaacacatcctcagtagactgtgtgaaggtgtgaaggtctgataatgacttgatgctttgtctccatagacatgaaagccatgccctctgcctctagatagggtgatccaagagctcctgaaccttaggaggttcaaagaagctctactgtctgtgcccaggaggtagcctgccagcaagagccctcaggagttgcacacacagccaaagggtgttcacacagatctctgccggtctagccaggggaggccagagtctcgtcagtcaaggatgggcttcccccttagctgtgtccacagctgctcaagctatactggtcagagtgggctttgaagctcctttgtgagctcgagctgctgactgccactatgggagccttgccacctccagcccctccatcccaaagacgctcctgccactggggccccaggtcctgctgtatcagttctctttggtggggggctaaggtttggggcgaggcaacctgagacaagaaaacgcagtaaacattctgattccctgtacacagatgcagcaccaggggaagggccagtggtgcaagtatttctttttaacaggtgaagtttttggaaaaagtcactctccctacccctcagtatccttaccatcaactttggttttatccttccagtctttattatatgcttgcttttacatagttgtaataatatacacataaagtattttgtatcctgcttttatcattcaacattgtacatgttataagcattttactatattgttatatatcttcacaaagttgatctgtaaagctgtgtaatttgaaggcatccatagggtgactgtaccataattttgattcatcccttgttgttggattcttggtcaggggttgtttgttttgttttattggtaactttaaaattttgaatacaatttcagatttacagaaaagttgcaggaatatcacaaagaactcctatatatcttttatccagatttactgagtgtttacattttatcccatttgccttatctatatttcatgttgcattttcttaatcatttgagaataatttgcacagataccccattatgcccaaaacagtatgcatttccctaagaacaggacattctcttctaagagaagaagagaattactttaagcattattcagtatttttttaagtattattatcaaaatcaggaagtttaacagtgatttaatactgttatctaacccatgattcatatttaaattttgccatttatcccaataatgtcctttgtagccattcttttaccttgtgcaggatcatgttacatttgtaaacgtgtgtctctcaatactgcagattcctcaactttcttttgtctttcattaccatgacatttttgaagaatacaggctattttgtcgaatgttcctcagtttggatttgtgtgatggttccgcatgactaggtgagggttttgcattctgggtgggaatatcacagaagcagtgtgtcgtcagtgcgtcgtaatcagcatataatgtcagttggtcccattaatgttgttaactctgttcaccgcttaggttggtgtctgccagatttcattttaaatttacgatttcctctttgtaatttacaagtaatttgtggggagatactttgagactatataagtattttgttcctcattcaccagttatatagtatcagttgattagtcttgtcccagttattactgtcatgattgaccaacatgatttcctaactccataatgccttctacatttattggttgacattctacatacaaagaaaaacatcctttctcaccatttatttattcacttgtttatcaatatggatgcagggattcctgttttactcagagttgcaagccattgctttgattttatcttgattctcaaattgtcccagatttatagcggcctcttgtgtgtttgtagcttgctcccatcatgttttgagtactttcttaccttctggcataacaagatgttccaggctcatcttgaatgttccctaccctagccctggaatcagccatttctccagggagtcttggttccttataatggagaatggtatttatttatttttatttgatttgattattattactatttttgagacagagtctcgctcttgtcgcccaggctggattgcaatggcacaatctcagctcactgcaacctccacctaccaggttcaagcaattctcctgcctcagccttccaagtagctgggattacaggtgcctgcccccacacccagctaatttttgcatttttggtagaaatgggggttttaccatgttggggaggctggtctcgaactcctgacctcaggtgatctgcccacctcaacctcccaaagtgctgggattacaggtgtgagccaccatacccagccagagaatgttatttagaaaccaagatctgggtgccaaatgtgctgcttgttactggaatgtcattgcctctaggctctcaccatacagtgcaaagagatgatagatagatagatagatagatagatagatagatagatagatgatagatatagatagatagatagattgattgatttgtagaaacaagataggttagagatacctgacataaatagatactaaaaatcatgaattcacactgatgctttgagaccagccctgtaggtttattccagtctgcccccttttccatgttgttaactctttcctccagagagacaaagatttcaggttgctttgttaagttccatctaatgatcattctgacgtaagtctgtttttcttatttccttggaatgatgtctcctctggtttcagaacttcctcctctgcttcctgtatcctgaggctggcggggccagttgtctttagggcttgtgcatttttgtaaagagcttgcacgtgtggaaatcaagtaggccagtagtgggttaggggtactgagccagaagcctctacaaggaataacaggagcacaaaggaagaaggtggtattccagctggggacccaggagggaggactttgtggagaacctgatgcttgaactgagtctaaaaggtgtaaaagtgtttgttgcttctgcctccctgtctgtctggcagggtgaggtaggcgcatctagggaaatgtcaagtggcttggtgtagggtaaagtcagtgaggcccatggagaaaaacgagcaggagccacatcacatgggtgtctgataggacctgggaggcgctttccacattaccattgtcgcttcgtgatctggacacaccagaaggcgtgagactggaggcaggaagagcagccaggcttatccctaccctcaggagagctgaaaagggcaggtatggtggggccagagctcaggagagtttcggaaccactgagatcggtccttgatttgatgagaggcttgaggggagagggaggtagctaggatgccccgcaagcttctggcccagacactgggcagacaatgaaaccctttgtaacacatgaggcaataggtttggggcagatgggaggggaagcagtggtgggggcagtgagtgctgaaggtgttttaagaagcggctctgggccaggcacagtggcttatgcctgtattcctagcattttgggaggccgaggtgggagaatcacttgagcccaagaatttgagaccagcctggggaatatagtgagaccctgtccctacaaaaataaaaacaactagctgggtgtgtggtggtgcatgcctgtaggcccagctacgcgggaacatcacctgagcccaggaggttgaggttgcagtgagctacagttgcgccactgcactccagcctaggtgacagagcaagatcttgtctcaaaaaaaaaagcagctctggatgggaagggaggccagttgctttaagtaggggagatagagttaaaggaggctttgttttatttaaaggtgggacaaacttaagcatgttaataaaattcagagaagagaaagagaatgactatcagagccatgtttggaagaaaatggggtccagagcacaggaaggggacctgtgttcagagggtgcctcactgctgaggccacaggaaagaatctgtaggtggaggggaggccgaagaggggaagtttcatgcttgataattaaaattttctgagataggaatgtcatatttacctatttaagccaagtttttttagataaaaggtatggaacctgctttccccttggctagttcagcgtttgggctccggagtgctgaagatgaggactggacttcgagctggtgtgatcccagtattcagtgtcagtactcagtgacaaaataaatgagagaaacgggaataagaattgtcgcctacacaaaaataccagcaactgttaactcttcccagaagattttcattctgaatgctcctgtagctaggaaccctaaaaagtctttgaagcaactcaagttttaaaaaaggggaggaactcctggaaatctcaggatggggccaagatgtggctggagagtgtgtggtgatggagggcgtgtcttttgccgagcacactcagggcccacgggaagcccatagacttcaaggacatcaagccccaaggtggtgggattttccccaccagtacttggcagcctagggggaaggggagggcgggagaagataatggggatccctggctccaaacataggaggacacatctgtgctacagtgcgcacatgcctggatgtacactctgtctttggagacactggctaagattctctgctccatgtttggacagggtcgtgcctgatctgagataaatggacaagaacaactgaagcctgtcttctggtgcatgtgtcacctgccgataactgcatcttgtgataaagttgggtgatttacagtctccaccaaatgctaaactctggggtcttacgcctttataactccatgggccccagcaaaggttcaggctcaaaacaggtgtcaaatagataactgttgaatgattgttccccagttgcaggctctgccacctggcgttcatactgtctgtgaaaggacccagctcacctttccctctttatctcccagtccttcccaacagcgccgacacctcatggaaactgattgcaaatgtgctacttctcacttctgtgtggcccgaggaggctgggttaatgctgggcttggtaccttaagcaccctttctcccttccccatcttcattctcagaattacacctgtctgaagcaggcattttccaatgccctagatgggaatataagtgtaaggagatgtgaagcatttgcctgtgtgtcagaacattcactgaggatcctcataggcacttctagaaaccaaatccttgaagatgactaaccagaaatgcccgtcatagcactgtttacagttgcaaaaactgaagccaattgaaatgtccatcaggaggggattaaatgaattatggtacagttacaccgttgaatattttacagccattgaagatgatatatagctatattcattgacaaggaaaactcatattttttagtgaaaaaagcaggttatagaattgcatgatattcacatttatataaaactttatatatgggaaggatgttgattgaattgttaataactatggtcacctctagagatggaagtttgcattacctttaatttttaataccattttgtattgcttaaaatttgtatgtattatcgttaaaataagaaaaatcaaataaagctattttcattatgggaaaacaa

SEQ ID NO: 1935 - DNA, 5811 bp, Homo Sapiens
  NM_003112
agctgctacgccacagcccagcggcggccattcgcggaaaaagaggcagagcctgtgccagctacagcctcctccgagccaccgcgggcgggcgggaccggcctctcctcccgcctcgcccccacccccacccacctctatcccagtgtctccgtctgagggtttgtcctgttaatgcgggatgagcgatcagaagaaggaggaggaggaggaggcggcagcggcagcggcgatggctacagaaggagggaaaacctctgagccagagaataacaataaaaaacccaaaacctcaggctcccaggactctcagccctctcctctggctttactggcagctacttgcagcaaaatagggactcctggtgaaaatcaagcaactggacaacaacaaattattatagatccaagtcaaggattggtgcaacttcaaaatcaaccacaacagctagaactggtaacaacgcaacttgctggaaacgcttggcaacttgttgcctccactcctcctgcttcaaaagagaataacgtttctcaaccagcctctagttcgtctagttcttccagcagtaataacgggagtgcatctcctacaaaaactaaatcaggtaattcttccacccctggtcaatttcaagtcatacaagtacaaaatccaagtggtagtgtacagtaccaagtaattccacaacttcagacagtggaaggtcaacaaattcaaatcaatccaactagtagttcatctctacaggatttgcagggtcaaattcagctcatttctgcaggtaataatcaagctatactcacagctgctaacaggacagcttctgggaatattcttgctcaaaacctggcaaatcagacagttccggtccaaattagacctggtgtttcaataccactgcagttacagactcttcctggtactcaggctcaagttgtaacaaccctaccaattaacattggaggagtgactctagctttgccagtgataaacaacgtggctgccggaggagggactgggcaggttggccagcctgctgctactgctgatagtgggacttccaatgggaatcaattagtttccacacccaccaacaccactacttctgccagtactatgccagaatctccctcctcctccactacctgcacaaccactgcttcaacgtctttgacaagcagtgacacattagtgagctcagcagatactggccagtatgcaagcacatcagccagtagttctgaacgcaccattgaagaatctcaaacacctgctgctactgagtctgaagcccagagctccagtcagcttcagcctaatggaatgcagaatgcacaggatcaatcaaattctcttcagcaggtgcaaattgtaggccaacctatcttacagcagatccagatccaacagcctcagcaacagatcattcaggctattccaccacagtcgtttcaactccagtcagggcagacgattcagaccatccagcagcagcctttacagaatgttcaacttcaagcagtaaatccgactcaggtgcttatcagggctccaactttaacaccttcagggcaaatcagttggcaaactgtacaggttcagaatattcagagtctttcaaatttgcaagttcagaatgctgggttatcccaacaattaaccatcaccccagtgtcttcaagtggtggcacaactcttgctcagattgctcctgtggctgttgctggtgccccaataactttgaatactgcccagcttgcatcagtgcctaaccttcagacagtgagcgttgccaacctgggtgctgcaggtgttcaagtgcagggagttcccgttacaatcactagtgttgcaggtcagcagcaaggacaagatggagtaaaagtccagcaagctactatagctcctgtaactgtagcagttggaggaattgctaatgccacgataggtgctgttagtcctgaccaactcacacaagtgcatttgcagcaaggccagcagacttctgatcaagaggtacaacctggcaagaggcttcgaagagttgcctgttcctgtcctaattgtagggaaggagaaggaagaggcagtaatgaaccaggaaaaaagaagcagcatatctgtcatattgaaggatgtggtaaagtttatggcaaaacatctcatttacgagcacatcttcgctggcatactggagaaagaccttttatatgcaactggatgttttgtggcaaaagattcacacggagtgatgagctccagagacatagaagaacccatacaggtgaaaagagatttgaatgcccggaatgttctaaaaggtttatgcggagtgatcatctctccaaacatgtcaaaacgcaccagaataaaaaaggtggtgggacagctcttgccattgttacctcgggagaactggactcatctgttacagaggtgcttggctccccaagaattgtcacagttgcagccatttctcaagattcgaatccagcaactcccaatgtttcaaccaacatggaagaattctgaaaagttatttataacagagacctctagtgctgcacttgtttacacacctttgaaaatctggaaatgggctggtcaagtggattacagagtaggaaattatgttttcattcttggcttctttaagtattccagggtttggggtcaacacgtgaagtgttgaattttaaaaaatacaaaaagcagactgatgtactggaaacagaaaagtatttcctccatactataagttgtagttgtttggaaatatatcacataacctttatacagaatcttcccatctcttaatatcatgtgttaacatgtttaaaaagaccttagtagtttgcaggctggaccttaattggacttattttctttgaaagtactttgttataaattcagtcagtaataatttacgtgtattctttttctctatagcacagaaaacagatagttaactgatgatagggataatactgtatttccttagcttgatttttggaaaatcaaccgaaaatagtttggccgtcttttctaaatgttagaaattcttcaacagttgaattaggtaagttccaaaacagtaatctgagatgcatctcagatctttattaccactacattatagtagtgtgtatgcagacaatcagtgaagtccaattactttctccatttggagacacaagaggaacatagagttaaatcttaggttaaattttaggttgacaccttaggaaaatgctgggaaaaaaatggttaaaacaaaactcatcatagcttcagaaaaataaaatgaggcatcttaacatgcaatgttctaaagttaggattgattatattcctaaccctaggttgaaccacaaaatttcatttaaaatgtttatatttggaaatatttgcatagagtgtaaattgttctgtagtttcatattttgtaaatatgagttatgttgacaatgtgcagaattctttatgctttgatgtggtagccaaagaaagaattacacttttttccaaggccagcagaaaattctcttttaactacattgtaattcttgttttcctctactaaaaattggccagtcccattttatttctagtgctatgtaagaaggtaattaggaattataacacagtaatgtttttatgttacatcaataactgaattttccctaaaaattagcctaatatataatagatatattatgaagcaaaacttttatttttgaaaaggcagaataattttcagtgaagtaagtgactaaagaaaaaaactatattattgtttatgcaagggtcttacaggaaagggtctttttttttttttttttgagatggagtctcgctctcttgcccaggctggagtgcaatggcacgatctcagcttactgcaaccgccgcctcccaggttcaagcgattctcctgtcttagcctcctgagtagctgggattaacaggcgcctgccaccatgcctggctaatttttgtatttttagtagagacagggtttcgccatgttggccaggctggtttcaaactcctgacctcaggtgatctgcccacctcggcctcccagagtgctgggattacaggcatgagccaccatgcccggctaggaaagggtcttactaggaaagatggccaaaagtttcatatgaaaaaaattggattataaaccagtaacttaaatattaataaggatattttatgttttaaaaaagtatttacacagaatcataatcagtgaaattgaccatttgaaaactaaaagtttttacctacctgctcaatttattaacatcattgctttggggactgtttgaatataggtacgtgttttcttgtgcattctctataatttcaggaaaagtactaatgcgaattctcttccaaaattgtgatgtttcttgtatttttgatgaaggagaaatactgtaatgatcactgtttacactatgtacactttaggccagccctttgtagcgttatataaaactgaaggtcttttgtgctttcagtttgtataaaaaagctttgagattaaaggaaaaaaaaaatttttacactgtggttataaatttcaagtttcttaaagcttttgtagacttgtaacagagtctttaaatttaagttggattttgtaaattgttttgtatattttatttaatgtactcttaacaactgatgtatctggctttaaaacatcagaattggtttgttgttttgtttggtacagaggagcatttggtagtgttcattttaattttattatataggagctgaaacatcaaatatatattttatctatcattatgctacacaatcagtgctataaatttttttatgcaaagaaactttcttaatgttttaatcatgtttcctcagagtgacactttttgttgttgttaataccaagtatgaacactctgcatcattattccatgaaccagttctaatgcaaacctatgtatgtccattagaaatggaagttattttttaatcaacaatgaggcctattataaatttatcagatgaatctagatagctttatagcatataaaatatgttaatttgtgttagcaggtgcacatttcaccactgaaattagaaatattttgacagtctgttctgcataccattctgagtctacttttctgtctttagaagaatcgtaaatttcagtgtcctttatttgactcagtgggatatagctgttataagtaatagggcacagatgtgcagtagagtcttgtttaatggcatttcactgttcattccctttaccaccgttataaaacttttctttattgtaattatcagtgcaaagctatgtatttatcatggtaaaactccagtgttagaatagttttttcttacagtatactttctttggttaggtttgtgtatgtgttgctgattacattagaacttgatgttaagtcatttatcacactctcatgagagcagtaataaaagtgtgtaatctaggagaaaaagttaatttgtcaaacttagataagcatgatgtttaggtcctatttttcaattttataactgttttattgcaacaatatttgtatttaagtctccattttaatgccttgtggtgtttttttatgcatgtcactaagttgtcatcccacataaattgatgtgcagcatagggtattaaatctacataatgattttaaaacagaaatagttgatggtaaaatgtaaatgttttgcaaaaattccttataaaaagttttgtagtaacatttcacttgtaaattttttttgtaaaaaaaaaaaaa

SEQ ID NO: 1936 - DNA, 3096 bp, Homo Sapiens
  NM_003119
aggcgcggctttcaggccaacatggccgtgctgctgctgctgctccgtgccctccgccggggtccaggcccgggtcctcggccgctgtggggcccaggcccggcctggagtccagggttccccgccaggcccgggagggggcggccgtacatggccagcaggcctccgggggacctcgccgaggctggaggccgagctctgcagagcttacaattgagactgctaacccctacctttgaagggatcaacggattgttgttgaaacaacatttagttcagaatccagtcagactctggcaacttttaggtggtactttctattttaacacctcaaggttgaagcagaagaataaggagaaggataagtcgaaggggaaggcgcctgaagaggacgaagaggagaggagacgccgtgagcgggacgaccagatgtaccgagagcggctgcgcaccttgctggtcatcgcggttgtcatgagcctcctgaatgctctcagcaccagcggaggcagcatttcctggaacgactttgtccacgagatgctggccaagggcgaggtgcagcgcgtccaggtggtgcctgagagcgacgtggtggaagtctacctgcaccctggagccgtggtgtttgggcggcctcggctagccttgatgtaccgaatgcaggttgcaaatattgacaagtttgaagagaagcttcgagcagctgaagatgagctgaatatcgaggccaaggacaggatcccagtttcctacaagcgaacaggattctttggaaatgccctgtactctgtggggatgacggcagtgggcctggccatcctgtggtatgttttccgtctggccgggatgactggaagggaaggtggattcagtgcttttaatcagcttaaaatggctcgtttcaccattgtggatgggaagatggggaaaggagtcagcttcaaagacgtggcaggaatgcacgaagccaaactggaagtccgcgagtttgtggattatctgaagagcccagaacgcttcctccagcttggcgccaaggtcccaaagggcgcactgctgctcggcccccccggctgtgggaagacgctgctggccaaggcggtggccacggaggctcaggtgcccttcctggcgatggccggcccagagttcgtggaggtcattggaggcctcggcgctgcccgtgtgcggagcctctttaaggaagcccgagcccgggccccctgcatcgtctacatcgatgagatcgacgcggtgggcaagaagcgctccaccaccatgtccggcttctccaacacggaggaggagcagacgctcaaccagcttctggtagaaatggatggaatgggtaccacagaccatgtcatcgtcctggcgtccacgaaccgagctgacattttggacggtgctctgatgaggccaggccgactggaccggcacgtcttcattgatctccccacgctgcaggagaggcgggagatttttgagcagcacctgaagagcctgaagctgacccagtccagcaccttttactcccagcgtctggcagagctgacaccaggattcagtggggctgacatcgccaacatctgcaatgaggctgcgctgcacgcggcgcgggagggacacacttccgtgcacactctcaacttcgagtacgccgtggagcgcgtcctcgcagggactgccaaaaagagcaagatcctgtccaaggaagaacagaaagtggttgcgtttcatgagtcgggccacgccttggtgggctggatgctggagcacacggaggccgtgatgaaggtctccataacccctcggacaaacgccgccctgggctttgctcagatgctccccagagaccagcacctcttcaccaaggagcagctgtttgagcggatgtgcatggccctgggaggacgggcctcggaagcactgtccttcaacgaggtcacttctggggcacaggacgacctgaggaaggtcacccgcatcgcctactccatggtgaagcagtttgggatggcacctggcatcgggcccatctccttccctgaggcgcaggagggcctcatgggcatcgggcggcgccccttcagccaaggcctgcagcagatgatggaccatgaagcaagactgctggtggccaaggcctacagacacaccgagaaggtgctgcaggacaacctggacaagttgcaggcgctggcaaacgcccttctggaaaaggaagtgataaactatgaggacattgaggctctcattggcccgccgccccatgggccgaagaaaatgatcgcaccgcagaggtggatcgacgcccagagggagaaacaggacttgggcgaggaggagaccgaagagacccagcagcctccacttggaggcgaagagccgacttggcccaagtagttgggaggtgttggctgcacgtgcgggtggtccgggaagtgagggctcactcagccaccctgagttgcttttcagctgaggtttgcacttcctctcgcggccctcagtagtccctgcacagtgacttctgagatctgttgattgatgacccttttcatgattttaagtttctctgcagaaactactgacggagtcctgtgtttgtgagtcgtttcccctatggggaaggttatcagtgcttcccgagtgagcatggaacacttcgagttcccagggttatagacagtcgttcccagtgtggctgaggccacccagaggcagcagagcattcagactccaaacagacccctgttcatgccgacgcttgcacgaccgccccagttcctgtggctccctcggaatgctaaggggatcggacatgaaaggaccctgtgagccgattgtcctatctccagcggccctgtcatccagctcactcatcaatggggccagtcaggcccaggcactgggctccggaggactcaccactgccccctgctgccatgtggactggtgcaagttgaggacttcttgctggtctagtcacgcatgcagtgttggggatgccttggtttttactgctctgagaattgttgagatactttactaataaactgtgtagttggaaaatctaaaaaaaaaaaaaaa

SEQ ID NO: 1937 - DNA, 1423 bp, Homo Sapiens
  NM_003120
gactatctcccagcggcaggcccttcgataaaatcaggaacttgtgctggccctgcaatgtcaagggagggggctcacccagggctcctgtagctcagggggcaggcctgagccctgcacccgccccacgaccgtccagcccctgacggggcaccccatcctgaggggctctgcattggcccccaccgaggcaggggatctgaccgactcggagcccggctggatgttacaggcgtgcaaaatggaagggtttcccctcgtcccccctccatcagaagacctggtgccctatgacacggatctataccaacgccaaacgcacgagtattacccctatctcagcagtgatggggagagccatagcgaccattactgggacttccacccccaccacgtgcacagcgagttcgagagcttcgccgagaacaacttcacggagctccagagcgtgcagcccccgcagctgcagcagctctaccgccacatggagctggagcagatgcacgtcctcgatacccccatggtgccaccccatcccagtcttggccaccaggtctcctacctgccccggatgtgcctccagtacccatccctgtccccagcccagcccagctcagatgaggaggagggcgagcggcagagccccccactggaggtgtctgacggcgaggcggatggcctggagcccgggcctgggctcctgcctggggagacaggcagcaagaagaagatccgcctgtaccagttcctgttggacctgctccgcagcggcgacatgaaggacagcatctggtgggtggacaaggacaagggcaccttccagttctcgtccaagcacaaggaggcgctggcgcaccgctggggcatccagaagggcaaccgcaagaagatgacctaccagaagatggcgcgcgcgctgcgcaactacggcaagacgggcgaggtcaagaaggtgaagaagaagctcacctaccagttcagcggcgaagtgctgggccgcgggggcctggccgagcggcgccacccgccccactgagcccgcagcccccgccgggccccgccaggcctccccgctggccatagcattaagccctcgcccggcccggacacagggaggacgctcccggggcccagaggcaggactgtggcgggccgggcctcgcctcacccgccccctccccccactccaggccccctccacatcccgcttcgcctccctccaggactccaccccggctcccggacgccagctgggcgtcagaccccaccggggcaaccttgcagaggacgacccggggtactgccttgggagtctcaagtccgtatgtaaatcagatctcccctctcacccctcccacccattaacctcctcccaaaaaacaagtaaagttattctcaatccatcaaaaaaaaaaaaaaaaaa

SEQ ID NO: 1938 - DNA, 1493 bp, Homo Sapiens
  NM_003121
ggcaaacagcccgcccggcaccaccatgctcgccctggaggctgcacagctcgacgggccacacttcagctgtctgtacccagatggcgtcttctatgacctggacagctgcaagcattccagctaccctgattcagagggggctcctgactccctgtgggactggactgtggccccacctgtcccagccaccccctatgaagccttcgacccggcagcagccgcttttagccacccccaggctgcccagctctgctacgaaccccccacctacagccctgcagggaacctcgaactggcccccagcctggaggccccggggcctggcctccccgcataccccacggagaacttcgctagccagaccctggttcccccggcatatgccccgtaccccagccctgtgctatcagaggaggaagacttaccgttggacagccctgccctggaggtctcggacagcgagtcggatgaggccctcgtggctggccccgaggggaagggatccgaggcagggactcgcaagaagctgcgcctgtaccagttcctgctggggctactgacgcgcggggacatgcgtgagtgcgtgtggtgggtggagccaggcgccggcgtcttccagttctcctccaagcacaaggaactcctggcgcgccgctggggccagcagaaggggaaccgcaagcgcatgacctaccagaagctggcgcgcgccctccgaaactacgccaagaccggcgagatccgcaaggtcaagcgcaagctcacctaccagttcgacagcgcgctgctgcctgcagtccgccgggcctgagcacacccgaggctcccacctgcggagccgctgggggacctcacgtcccagccaggatccccctggaagaaaaagggcgtccccacactctaggtgataggacttacgcatccccaccttttggggtaaggggagtgctgccctgccataatccccaagcccagcccgggcctgtctgggattccccacttgtgcctggggtccctctgggatttctttgtcatgtacagactccctgggatcctcatgttttgggtgacaggacctatggaccactatactcggggaggcagggtagcagttcttccagaatcccaagagcttctctgggattttcttgtgatatctgattccccagtgaggcctgggacgtttttaagatcgctgtgtgtctgtaaaccctgaatctcatctggggtgggggccctgctggcaaccctgagccctgtccaaggttccctcttgtcagatctgagatttcctagttatgtctggggccctctgggagctgttatcatctcagatctcttcgcccatctatggctgtgttgtcacatctgtcccctcatttttgagatcccccaattctctggaactattctgctgcccctttttatgtgtctggagttccccaatcacatctagggctcctccaagaaaaaaaaaaaaaaaaaaaaaa

SEQ ID NO: 1939 - DNA, 8017 bp, Homo Sapiens
  NM_003126
tatgtcttctaaagataatgtcgattgtgtatggctgatgggattctaggaccaagcaagaggtttttttttttcccccacatacttaacgtttctatatttctatttgaattcgactggacagttccatttgaattatttctctctctctctctctctgacacattttatcttgccaggttctaaacctttaggaaaaatggagcaatttccaaaggaaaccgttgtggagagcagtgggccaaaggttttggaaacagcagaagagatccaggagaggcgtcaggaagtgttgactcggtatcaaagtttcaaggagcgggtcgctgagaggggtcagaagcttgaggattcctatcacttacaagttttcaagcgagatgcagatgatctggggaagtggatcatggagaaagtcaatatcttaaccgataagagctatgaagacccaactaatatacaggggaaatatcagaagcatcaatcccttgaagcagaggtgcaaacaaaatcaagactcatgtctgaactggaaaaaacaagggaagaacgatttaccatgggtcattctgcccacgaagaaacgaaggcccatatagaggagctacgccacctgtgggacctgctgttagagctgaccctggagaagggtgaccagttgctgcgggccctgaagttccagcagtatgtacaggagtgtgctgacatcttagagtggattggagacaaggaggctatagcgacatcagtggagctaggtgaagactgggagcgcaccgaagttctgcataagaaatttgaagacttccaagtggagctggtagctaaagaagggagagttgttgaagtgaaccaatatgccaatgagtgtgccgaggaaaaccatcctgacctacccttaattcagtctaagcaaaatgaggtgaatgctgcctgggagcgccttcgtggtttggctctccagagacagaaagctctgtccaatgctgcaaacttacaacgattcaaaagggatgtgactgaagccatccagtggatcaaggagaaggaacctgtactcacctctgaggactatggcaaagaccttgttgcctctgaaggactgtttcacagtcacaagggacttgagagaaatcttgctgtcatgagtgacaaggtgaaggagttatgtgctaaagcagagaagctgacactttcccatccttcagatgcacctcagatccaggagatgaaagaagatctggtctccagctgggagcatattcgtgccctggccaccagcagatatgaaaaactgcaggctacttattggtaccatcgattttcatctgactttgatgaactctcaggctggatgaacgagaagactgctgcgatcaatgctgatgagctgccaacagatgtggctggtggagaagttctgctggacaggcatcagcagcataagcatgagattgactcttacgatgaccgatttcaatctgctgatgagactggtcaagacctcgtgaatgccaatcatgaagcctctgatgaagttcgggaaaagatggaaatacttgacaacaactggactgccctgctggaactgtgggacgagcgtcatcgtcagtatgagcagtgcttggactttcatctcttctacagagacagtgagcaagtggacagttggatgagtagacaagaggccttcctggaaaacgaggatctgggaaactcactgggcagtgcagaagcccttcttcagaagcatgaagactttgaggaagcctttactgcccaggaagagaagatcataactgtagacaagactgcaaccaaattgattggtgatgaccattatgattcagagaacatcaaggctatccgtgacgggctgttagcccggcgggatgccctacgtgaaaaggctgccactagacgtagattgctgaaggagtcattgcttctgcaaaaactgtatgaggactcagatgacctaaagaactggatcaacaagaagaaaaagttggcagatgatgaagattacaaggacatacagaacttgaagagcagggttcaaaagcagcaagtctttgaaaaggagttggcagttaataagacccagctggaaaacatacagaaaactggccaagagatgattgagggtggtcactatgcctctgacaatgtgaccactcgtctgagtgaagttgccagcctctgggaggagttgctggaggctacaaaacagaaagggacccagttgcatgaggccaaccagcagctgcaatttgaaaataatgcagaagatttgcagcgctggctggaggatgttgagtggcaagtcacctctgaggattatgggaaaggcctggccgaggtacagaatcgactcaggaaacacggcctcctggagtcggctgtggctgctcgtcaggatcaggtggatatccttacagacctggctgcatattttgaagaaataggccatcctgattctaaggatataagggcaaggcaagagtccttggtatgccgatttgaagctctgaaagagccactggccacccgaaagaagaagctcttagaccttctccatctgcagctgatttgtagagacacagaggatgaggaggcctggatccaagagactgaaccctcagctacttccacctaccttggaaaggacctgattgcttccaaaaagcttctgaataggcatagagtcatcctggagaacattgccagccatgaaccacgcattcaagagataacagaaaggggaaacaaaatggtagaggaaggacactttgctgcagaagatgtggcctctagggtcaagagtttgaaccagaatatggagtctctccgtgctcgagctgctaggcgacaaaatgatcttgaagccaatgtccagttccagcagtacctggctgacctgcatgaagcagaaacatggatcagagagaaggaacctattgtagataatactaactatggtgctgatgaagaagcagctggggctcttctaaagaagcatgaggcctttctattagatctcaattcatttggagacagtatgaaagctctgcggaatcaggcaaacgcctgccagcaacaacaggctgcaccagtggagggagttgctggagaacaaagggtcatggctttatatgacttccaggcccgcagcccccgagaagtcaccatgaagaaaggtgatgtcttaacgctgctcagttccatcaataaggactggtggaaggtggaagctgctgatcatcagggcattgtcccagctgtctatgtcagaagactggcccacgatgagttcccgatgctcccacagcggcgacgagaagagccaggaaacatcacccagcgccaggagcagattgagaaccaataccgctccctcttggatcgggcagaagaacgcagacgtcgtctattgcaacgttataatgaatttttattggcctatgaggcaggagacatgctggaatggattcaagagaaaaaggcagaaaacactggagtggaactagatgatgtttgggagctgcagaaaaagtttgatgagttccaaaaggatttgaataccaatgagcctcggctaagggatatcaacaaggtagctgatgatctactatttgaaggacttctaacaccagaaggagctcaaatccggcaggaattgaattcccgctggggttctttgcagaggcttgcagatgaacagcggcagctgctgggcagtgcccatgctgttgaagtgtttcacagagaagcagatgacacgaaggagcagattgagaagaaatgccaggccctcagtgctgcagaccctggctcagatctgttcagtgttcaggctcttcagcgacggcatgagggctttgaaagggacctcgtacccctgggagataaggtgaccatactgggggagacagcagagcggctcagtgagtcccatccagatgccactgaggacctgcagagacagaaaatggagctgaatgaggcctgggaagacctgcaggggcgtacaaaggatcgtaaggagagcctaaatgaggcccagaaattctacctgttcctcagcaaggccagggatctgcagaactggatcagtagcattggtggcatggtatcatcacaggagctggccgaagacttaactggcatagagatcttgctggagagacatcaggagcaccgtgctgacatggaggcagaggctcccaccttccaggccttagaggacttcagtgcagaacttatcgacagtgggcaccatgctagccctgaaattgaaaaaaagcttcaagctgtcaagctagagagagatgatttggagaaggcttgggaaaaacgcaagaagatcctagaccagtgcctggagttgcagatgttccaggggaactgtgatcaagttgagagctggatggtggcacgtgagaattccctgaggtcagatgacaaaagttccttagacagtctggaggctttgatgaagaaacgggacgatttggacaaagcaatcactgcccaggaagggaagatcactgacctagaacattttgctgagagcctcattgctgatgaacactatgccaaagaagagattgctacgcggctccaacgtgtactagacaggtggaaggctctcaaagcacaactgattgatgagcggacaaagcttggagactatgccaacctaaaacaattctaccgagaccttgaggagctggaagaatggatcagtgagatgctgcccacagcctgtgatgaatcctacaaagacgccactaacattcagaggaaatacctgaaacaccagacctttgcacatgaagtcgatggccgatctgagcaggtgcatggcgtcatcaacctggggaactccctgattgagtgtagcgcttgtgatggcaatgaagaggccatgaaggagcaactggaacagctgaaggaacattgggatcatctgcttgagagaacaaatgacaaagggaagaagctcaatgaggccagtcgtcaacagaggttcaacacaagcatccgggactttgagttctggctctcagaggcagagacattgctggccatgaaagatcaggccagggacttggcttcagcaggaaacctactcaagaagcatcagctattggagagagagatgttggctcgagaggatgcactcaaggacctgaatacattggctgaagatttgctctccagcgggactttcaacgttgatcagattgtgaagaaaaaagataatgtcaacaagcgtttcctgaatgtccaagaattggcagctgcacaccacgaaaaattgaaagaggcctatgccttgttccagttcttccaggatctagatgatgaggaatcctggatagaggagaagttgatacgagtgagctcccaggactatgggagagatcttcagggggttcagaacttgctgaagaagcacaaacgcctagagggggagctggtggcccatgagcctgccatccagaatgtgctggatatggcagagaagctgaaagacaaggctgctgtggggcaagaggagatccagttgcggctggctcagtttgttgaacactgggagaagctcaaagagttggccaaggcccgaggacttaagttggaagaatccctagaatacttgcaattcatgcagaatgctgaggaagaggaagcttggatcaatgaaaagaatgctttggctgtccgaggagattgtggagatacattagctgctactcagagcttgctaatgaagcatgaagctttggaaaatgactttgctgtccatgagacccgagtacaaaatgtgtgtgcacaaggagaagacatcctaaataaggtgttgcaggaggaaagtcagaacaaagagatttcttccaagatagaggctctgaatgaaaagaccccttctctggctaaggcaatagctgcttggaagttgcaattggaagacgattatgcctttcaggaattcaactggaaggctgatgtggtagaggcttggatagctgataaggaaacaagcctaaagaccaatggcaatggtgcagaccttggtgacttcctcactcttctggcaaaacaggacactctggatgccagtctgcagagtttccagcaagagagacttcccgagatcactgacctgaaggacaaactgatttctgctcaacacaaccagtctaaagccattgaagagcgttatgccgctctgctgaagcgctgggaacagttgctggaagcctcggcagtccacagacagaaattgctggagaaacagctgcctctacagaaggctgaggacctgttcgtggaatttgcacataaggcttcagctttgaacaactggtgtgaaaagatggaagaaaacttgtcagagcctgtgcactgtgtctccctgaatgaaattcggcagctgcagaaagaccatgaggacttcttggcctccctggctagggctcaagcagactttaaatgtttgctggagctagaccagcagattaaggccttaggtgtgccttccagcccttatacctggttaacagtggaggtgctggaaaggacctggaagcacctatctgacatcattgaggaacgggagcaggagctgcaaaaggaagaggcaagacaggtcaagaactttgagatgtgtcaggagtttgaacagaatgccagtaccttccttcaatggatcctggaaaccagggcttactttctggatggatcattgctcaaagaaacaggaactctggaatctcagctggaagcaaataaaagaaaacagaaggagatccaggcgatgaagcgtcaactaaccaagattgtggacctgggggacaacttggaagacgctctgatccttgatatcaaatacagcaccattggattggctcagcagtgggaccagctctaccagcttgggttgcggatgcaacacaacctggagcaacagatccaggccaaggacatcaaaggtgtgagtgaagagactctaaaggaatttagcacaatctataaacactttgatgagaatttgacagggcgcctgactcacaaagagttccggtcctgcctgagaggactcaattactacttgcccatggtggaggaggatgaacatgagcccaagtttgagaagttcctggatgctgtggatccagggaggaagggctatgtctcactggaggactatactgctttcctgattgacaaggagtcagaaaacatcaagtccagtgatgaaatagagaatgccttccaagccctggcagagggcaagtcatatattaccaaagaagacatgaagcaggcccttaccccagagcaagtgtcattctgtgccacacatatgcagcaatatatggacccacggggtcgaagccatctctctggctatgactacgttggcttcaccaattcctactttggcaactaataagcagctcctcgtggatcgtagaaaatcttagtgtcgtgggaaatttactggggggcaaagagtacaggcaaatgtggaagataaagatggcctcgtgtgtgtgtgtgtgtgtgtgtgtgtgtgtgtgtgcttgtgtttgtgtgcatattacatttattgtaggatcttaaaaaatctcaagggtgggagatagaaaggttaatagagttggaggagtggaagctattttgtatgcaactagtcactgctgaggggtgtcaaagtttctatttttatttgttctgttttgcacgtctttatcattttgctttattccgattatagaataaagtaattctttttaaaaatattttttggggcaaagttaagtaaaatgttgagcttctatatttctgggaactgtactcatataagagtgggcagctaattttactgtaaagaagggccatggtatagtagataaataaaatccaaggcaattttcaaacaatttttttaaactttggaatgtgtttaaatttaaatttgaaaataaagatatttgattttctgggg

SEQ ID NO: 1940 - DNA, 7892 bp, Homo Sapiens
  NM_003127
tataaaagaggcggggcgcgcgcgtcgccgccactacccgctgcggagtgaacggtgtggagcggaggccgcggaggctcctcggtccttcagcacccctcggcccgacgcacccacgcccctcaccccccgagagccgaaaatggacccaagtggggtcaaagtgctggaaacagcagaggacatccaggagaggcggcagcaggtcctagaccgataccaccgcttcaaggaactctcaacccttaggcgtcagaagctggaagattcctatcgattccagttctttcaaagagatgctgaagagctggagaaatggatacaggaaaaacttcagattgcatctgatgagaattataaagacccaaccaacttgcagggaaagcttcagaagcatcaagcatttgaagctgaagtgcaggccaactcaggagccattgttaagctggatgaaactggaaacctgatgatctcagaagggcattttgcatctgaaaccatacggacccgtttgatggagctgcaccgccagtgggaattacttttggagaagatgcgagaaaaaggaatcaaactgctgcaggcccagaagttggtgcagtacttacgagaatgtgaggacgtgatggactggatcaatgacaaggaagcaattgttacttctgaagagctgggccaggatctggagcatgtagaggttttacagaagaaatttgaagagtttcaaacagatatggctgctcatgaagaaagagttaatgaagtgaaccagtttgctgccaaactcatacaggagcagcaccctgaggaggaactgatcaagactaagcaggatgaagtcaatgcagcctggcagcggctgaagggcctggctctgcagaggcaggggaagctctttggggcagcagaagttcagcgctttaacagggatgtggatgagactatcagttggattaaggaaaaggagcagttaatggcctctgatgattttggccgagacctggcaagtgttcaggctctgcttcggaagcacgagggtctggagagagatcttgctgctctagaagacaaggtcaaagccctgtgtgctgaggctgaccgcctgcaacagtcccaccctctgagtgcaacacagattcaagtgaagcgagaggaactgattacaaactgggagcagatccgcaccttggcggcagagagacatgcacggctcaatgattcatacaggcttcaacgcttccttgctgacttccgtgacctcaccagctgggtgactgagatgaaagccctcatcaatgcagatgagcttgccagtgatgtggctggggctgaagccctgctagatagacaccaagagcacaagggtgaaattgatgcccatgaagacagcttcaaatctgcagatgaatctggacaggcactgcttgctgctggtcactatgcctcagatgaagtgagggagaagctgaccgtcctttccgaggagagagcggcgctgctggagctgtgggagctgcgcaggcagcagtacgagcagtgcatggacctgcagctcttctaccgggacactgagcaggtggacaactggatgagcaagcaggaggcgttcctgttgaatgaagacttgggagattccttggatagtgtggaagcgcttcttaagaagcacgaagactttgagaaatcccttagtgcccaggaggaaaagattacagcattagatgaatttgcaaccaagctaattcagaacaaccactatgcaatggaagatgtggccactcgccgagatgctctgttgagccgccgcaatgcccttcacgagagagccatgcgtcgccgggcccagctagccgattctttccatctgcagcagtttttccgtgattctgatgagctcaagagttgggtcaatgagaagatgaaaactgccacagatgaagcttataaagatccatccaacctacaaggaaaagtacagaagcatcaggcttttgaggctgagctctcagcaaaccagagccgaattgatgccttggagaaagctggccaaaagctgattgatgtcaaccactatgccaaggatgaagtggcagctcgtatgaatgaggtgatcagtttgtggaagaaactgctagaggccactgaactgaaaggaataaagcttcgtgaagccaaccagcaacagcaatttaatcgcaatgttgaggatattgaattgtggctatatgaagtagaaggtcacttggcttcggatgattacggcaaagatcttaccaatgtgcagaacctccagaagaaacatgccctgctagaggcagatgtggctgctcaccaggaccgaattgatggcatcaccattcaggcccgccagttccaagatgctggccattttgatgcagaaaacatcaagaagaaacaggaagccctcgtggctcgctatgaggcactcaaggagcccatggttgcccggaagcagaagctggccgattctctgcggttgcagcagctcttccgggatgttgaggatgaggagacgtggattcgagagaaagagcccattgccgcatctaccaacagaggtaaggatttaattggggtccagaatctgctaaagaaacatcaagccttacaagcagaaattgctggacatgaaccacgcatcaaagcagttacacagaaggggaatgccatggtggaggaaggccattttgctgcagaggatgtgaaggccaagcttcacgagctgaaccaaaagtgggaggcactgaaagccaaagcttcccagcgtcggcaggacctggaggactctctgcaggcccagcagtactttgctgatgctaacgaggctgaatcctggatgcgggagaaggaacccattgtgggcagcactgactatggcaaggacgaagactctgctgaggctctactgaagaaacacgaagctttgatgtcagatctcagtgcctacggcagcagcatccaggctttgcgagaacaagcacagtcctgccggcaacaagtggcccccacggatgatgagactgggaaggagctggtcttggctctctacgactatcaggagaagagtccccgagaggtcaccatgaagaagggagatatccttaccttactcaacagcaccaacaaggattggtggaaagtggaagtgaacgatcgtcagggttttgtgccggctgcgtacgtgaagaaattggaccccgcccagtcagcctcccgggagaatctcctggaggagcaaggcagcatagcactgcggcaggagcagattgacaatcagacacgcataactaaggaggccggcagtgtatctctgcgtatgaagcaggtggaagaactatatcattctctgctggaactgggtgagaagcgtaaaggcatgttggagaagagttgcaagaagtttatgttgttccgtgaagcgaatgaactacagcaatggatcaatgagaaggaagccgctctgacaagtgaggaggtcggagcagacttggagcaggttgaggtgctccagaagaagtttgatgacttccagaaggacctgaaggccaatgagtcacggttgaaggacattaacaaggtagctgaagacctggagtctgaaggtctcatggcagaggaggtgcaggctgtgcaacaacaggaagtgtatggcatgatgcccagggatgaaactgattccaagacagcctccccgtggaagtctgctcgtctgatggttcacaccgtggccacctttaattccatcaaggagctgaatgagcgctggcggtccctacagcagctggccgaggaacggagccagctcttgggcagcgcccatgaagtacagaggttccacagagatgctgatgaaaccaaagaatggattgaagagaagaatcaagctctaaacacagacaattatggacatgatctcgccagtgtccaggccctgcaacgcaagcatgagggcttcgagagggaccttgcggctctcggtgacaaggtaaactcccttggtgaaacagcagagcgcctgatccagtcccatcccgagtcagcagaagacctgcaggaaaagtgcacagagttaaaccaggcctggagcagcctggggaaacgtgcagatcagcgcaaggcaaagttgggtgactcccacgacctgcagcgcttccttagcgatttccgggacctcatgtcttggatcaatggaatacgggggttggtgtcctcagatgagctagccaaggatgtcaccggagctgaggcattgctggagcgacaccaggaacaccggacagaaatcgatgccagggctggcactttccaggcatttgagcagtttggacagcagctgttggctcacggacactatgccagccctgagatcaagcagaaacttgatattcttgaccaggagcgtgcagacctggagaaggcctgggttcagcgcaggatgatgctggatcagtgccttgaactgcagctgttccatcgggactgtgagcaagctgagaactggatggctgcccgggaggccttcttgaataccgaagacaaaggagactcactggacagcgtagaggctctgatcaaaaaacatgaagactttgacaaagcgattaacgtccaggaagagaagattgctgctctgcaggcctttgccgaccagctcatcgctgccggccattatgccaagggagacatttctagccggcgcaatgaggtcttggacaggtggcgacgtctgaaagcccagatgattgagaaaaggtcaaagctaggagaatctcaaaccctccaacagttcagccgggatgtggatgagattgaggcttggatcagtgaaaaattgcaaacagcgagtgatgagtcgtacaaggatcccaccaacatccagagcaagcaccagaagcaccaggcttttgaagcagagctgcatgccaacgctgaccggatccgtggggttatcgacatgggcaactccctcattgaacgtggagcctgtgccggcagtgaggatgctgtcaaggcccgcctggctgccttagctgaccagtggcagttcttggtgcaaaagtcagcggaaaagagccagaaactgaaagaagccaacaagcagcagaacttcaacacagggatcaaggactttgacttctggctgtctgaggtggaggccctgctggcatccgaagattatggcaaagacctggcttctgtgaacaacctgctgaaaaagcatcaactgctggaagcagatatatctgcccatgaggatcgcctgaaggacctgaacagccaggcagacagcctgatgaccagcagtgccttcgacacctcccaagtaaaggacaagagggacaccatcaacgggcgcttccagaagatcaagagcatggcggcctcccggcgagccaagctgaatgaatcccatcgcctgcaccagttcttccgggacatggatgacgaggagtcctggatcaaggagaagaagctgctggtgggctcagaggactacggccgggacctaaccggcgtgcagaacctgaggaagaagcacaagcggctggaagcagaactggctgcgcatgagccggctattcagggtgtcctggacactggcaagaagctgtccgatgacaacaccatcgggaaagaggagatccagcagcggctggcgcagtttgtggagcactggaaagagctgaagcagctggcagctgcccggggtcagcggctggaagagtccttggaatatcagcagtttgtagccaatgtggaagaggaagaagcctggatcaatgagaaaatgaccctggtggccagcgaagattatggcgacactcttgccgccatccagggcttactgaagaaacatgaagcttttgagacagacttcaccgtccacaaggatcgcgtgaatgatgtctgcaccaatggacaagacctcattaagaagaacaatcaccatgaggagaacatctcttcaaagatgaagggcctgaacgggaaagtgtcagacctggagaaagctgcagcccagagaaaggcgaagctggatgagaactcggccttccttcagttcaactggaaggcggacgtggtggagtcctggatcggtgaaaaggagaacagcttgaagacagatgattatggccgagacctgtcttctgtgcagacgctcctcaccaaacaggaaacttttgacgctgggctgcaggccttccagcaggaaggcattgccaacatcactgccctcaaagatcagcttctcgccgccaaacacgttcagtccaaggccatcgaggcccggcacgcctccctcatgaagaggtggagccagcttctggccaactcagccgcccgcaagaagaagcttctggaggctcagagtcacttccgcaaggtggaggacctcttcctgaccttcgccaaaaaggcttctgccttcaacagctggtttgaaaatgcagaggaggacttaacagaccccgtgcgctgcaactccttggaagaaatcaaagctttgcgcgaggcccacgacgccttccgctcctccctcagctctgcccaggctgacttcaaccagctggccgagctggaccgccagatcaagagcttccgcgtagcctccaacccctacacctggtttaccatggaggccctggaggagacctggaggaacctacagaaaatcatcaaggagagggagctggagctgcagaaggaacagcggcggcaggaggagaacgacaagctgcgccaggagtttgcccagcacgccaacgccttccaccagtggatccaagagaccaggacatacctcctcgatgggtcctgtatggtggaagagtcggggaccctcgaatcccagcttgaagctaccaaacgcaagcaccaggaaatccgagccatgagaagtcagctcaaaaagatcgaggacctgggggccgccatggaggaggccctcatcctggacaacaagtacacggagcacagcaccgtgggcctcgcccagcagtgggaccagctggaccagctgggcatgcgcatgcagcacaacctggagcagcagatccaggccaggaacacaacaggtgtgactgaggaggccctcaaagaattcagcatgatgtttaaacactttgacaaggacaagtctggcaggctgaaccatcaggagttcaaatcttgcctgcgctccctgggctatgacctgcccatggtggaggaaggggaacctgaccctgagttcgaggcaatcctggacacggtggatccgaacagagatggccatgtctccttgcaagaatacatggctttcatgatcagccgcgaaactgagaacgtcaagtccagcgaggagattgagagcgccttccgggccctcagctcagagggaaagccttacgtgaccaaggaggagctctaccagaacctgacccgggaacaagccgactactgcgtctcccacatgaagccctacgtggacggcaagggccgcgagctccccaccgcgttcgactacgtggagttcacccgctcgcttttcgtgaactgagccactccctgggtcacccacccctcgctgcttgccctgcgtcgccttgctgcatgtccgctcctctgtgtgctctcactttccactgtaaccttaagcctgcttagcttggaataagacttaggagaaaatggtgcttcactaacccgcttccggtccagtcacaatcatcatgtcactgtggggacccagatctgtgtcttgaagcagctgccctcattccgacttcagaaaatcgaagcagctggctcctccccttgttctctctcccaccctcccccaaatctgttttcatgtaaaagacaaataaatgatgacttcccccaaagct

SEQ ID NO: 1941 - DNA, 10238 bp, Homo Sapiens
  NM_003128
ggattcctccagtccctccctcggccgcctctcctcccggagcgagcgcgcagccctgcgcagcagcgcccactggtcccgtcctgtgagccccggccccagccgcggacagacccgcggagtcgcctcccggcccacccgcccggccgccgaggagcgggaggaggacgggaccccggcgcccccaccccatccccgggagaactctaagaaggagctgatgtggaggagcagctgagacagttcaagatgacgaccacagtagccacagactatgacaacattgagatccagcagcagtacagtgatgtcaacaaccgctgggatgtcgacgactgggacaatgagaacagctctgcgcggctttttgagcggtcccgcatcaaggctctggcagatgagcgtgaagccgtgcagaagaagaccttcaccaagtgggtcaattcccaccttgcccgtgtgtcctgccggatcacagacctgtacactgaccttcgagatggacggatgctcatcaagctgctggaggtcctctctggagagaggctgcctaaacccaccaagggacgaatgcgcatccactgcttagagaatgtggacaaggcccttcagttcctgaaggagcagagagtccatcttgagaacatggggtcccatgacatcgtggatggaaaccaccggctgacccttggcctcatctggaccatcatcctgcgcttccagatccaggatatcagtgtggaaactgaagacaacaaagagaagaaatctgccaaggatgcattgctgttgtggtgccagatgaagacagctgggtaccccaatgtcaacattcacaatttcaccactagctggagggacggcatggccttcaatgcactgatacacaaacaccggcctgacctgatagattttgacaaactaaagaaatctaacgcacactacaacctgcagaatgcatttaatctggcagaacagcacctcggcctcactaaactgttggaccccgaagacatcagcgtggaccatcctgatgagaagtccataatcacttatgtggtgacttattaccactacttctctaagatgaaggccttagctgttgaaggaaaacgaattggaaaggtgcttgacaatgctattgaaacagaaaaaatgattgaaaagtatgaatcacttgcctctgaccttctggaatggattgaacaaaccatcatcattctgaacaatcgcaaatttgccaattcactggtcggggttcaacagcagcttcaggcattcaacacttaccgcactgtggagaaaccacccaaatttactgagaaggggaacttggaagtgctgctcttcaccattcagagcaagatgagggccaacaaccagaaggtctacatgccccgggaggggaagctcatctctgacatcaacaaggcctgggaaagactggaaaaagcggaacacgaaagagaactggctttgcggaatgagctcataagacaggagaaactggaacagctcgcccgcagatttgatcgcaaggcagctatgagggagacttggctgagcgaaaaccagcgtctggtgtctcaggacaactttgggtttgaccttcctgcagttgaggccgccacaaaaaagcacgaggccattgagacagacattgccgcatacgaggagcgtgtgcaggctgtggtagccgtggccagggagctcgaggccgagaattaccacgacatcaagcgcatcacagcgaggaaggacaatgtcatccggctctgggaatacctactggaactgctcagggcccggagacagcggctcgagatgaacctggggctgcagaagatattccaggaaatgctctacattatggactggatggatgaaatgaaggtgctagtattgtctcaagactatggcaaacacttacttggtgtggaagacctgttacagaagcacaccctggttgaagcagacattggcatccaggcagagcgggtgagaggtgtcaatgcctccgcccagaagttcgcaacagacggggaaggttacaagccctgtgacccccaggtgatccgagaccgcgtggcccacatggagttctgttatcaagagctttgccagctggcggctgagcgcagggcccgtctggaagagtcccgccgcctctggaagttcttctgggagatggcagaagaggaaggctggatacgggagaaggagaagatcctgtcctcggacgattacgggaaagacctgaccagcgtcatgcgcctgctcagcaagcaccgggcgttcgaggacgagatgagcggccgcagtggccactttgagcaggccatcaaggaaggcgaagacatgatcgcggaggagcacttcgggtcggagaagatccgtgagaggatcatttacatccgggagcagtgggccaacctagagcagctctcggccattcggaagaagcgcctggaggaggcctccctgctgcaccagttccaggcagatgctgatgacattgatgcctggatgctggacatcctcaagattgtctccagcagcgacgtgggccacgatgagtattccacacagtctctggtcaagaaacacaaggacgtggcggaagagatcgccaattacaggcccacccttgacacgctgcacgaacaagccagcgccctcccccaggagcatgccgagtctccagacgtgaggggcaggctgtcgggcatcgaggagcggtataaggaggtggcagagctgacgcggctgcggaagcaggcactccaggacactctggccctgtacaagatgttcagcgaggctgatgcctgtgagctctggatcgacgagaaggagcagtggctcaacaacatgcagatcccagagaagctggaggatctggaggtcatccagcacagatttgagagcctagaaccagaaatgaacaaccaggcttcccgggttgcagtggtgaaccagattgcacgccagctgatgcacagcggccacccaagtgagaaggaaatcaaagcccagcaggacaaactcaacacaaggtggagccagttcagagaactggttgacaggaagaaggatgccctcctgtctgccctgagcatccagaactaccacctcgagtgcaatgaaaccaaatcctggattcgggaaaagaccaaggtcatcgagtccacccaggacctgggcaatgacctggctggcgtcatggccctgcagcgcaagctgaccggcatggagcgggacttggtggccattgaggcaaagctgagtgacctgcagaaggaggcggagaagctggagtccgagcaccccgaccaggcccaggccatcctgtctcggctggccgagatcagcgacgtgtgggaggagatgaagaccaccctgaaaaaccgagaggcctccctgggagaggccagcaagctgcagcagttcctacgggacttggacgacttccagtcctggctctctaggacccagacagcgatcgcctcggaggacatgccaaacaccctgaccgaggctgagaagctgctcacgcagcacgagaacatcaagaacgagatcgacaactacgaggaggactaccagaagatgagggacatgggcgagatggtcacccaggggcagaccgatgcccagtacatgtttctgcggcagcggctgcaggccctggacactggatggaacgagctccacaagatgtgggagaacagacaaaatctcctatcccagtcacatgcctaccagcagttcctcagagacacgaagcaagccgaagcctttcttaacaaccaggagtatgttctggctcacactgaaatgcctaccaccttggaaggagctgaagcagcaattaaaaagcaagaggacttcatgaccaccatggacgccaatgaggagaagatcaatgctgtggtggagactggccggaggctggtgagcgatgggaacatcaactcagatcgcatccaggagaaggtggactctattgatgacagacataggaagaatcgtgagacagccagtgaacttttgatgaggttgaaggacaacagggatctacagaaattcctgcaagattgtcaagagctgtctctctggatcaatgagaagatgctcacagcccaggacatgtcttacgatgaagccagaaatctgcacagtaaatggttgaagcatcaagcatttatggcagaacttgcatccaacaaagaatggcttgacaaaatcgagaaggaaggaatgcagctcatttcagaaaagcctgagacggaagctgtggtgaaggagaaactcactggtttacataaaatgtgggaagtccttgaatccactacccagacaaaggcccagcggctctttgatgcaaacaaggccgaacttttcacccagagctgtgcagatctagacaaatggctgcacggcctggagagtcagattcagtctgatgactatggcaaagacctgaccagtgtcaatatcctgctgaaaaagcaacagatgctggagaatcagatggaagtgcggaagaaggagatcgaagagctccaaagccaagcccaggccctgagtcaggaagggaagagcaccgacgaggtagacagcaagcgcctcaccgtgcagaccaagttcatggagttgctggagcccttgaacgagaggaagcataacctgctggcctccaaagagatccatcagttcaacagggatgtggaggacgagatcttgtgggttggagagaggatgcctttggcaacttccacggatcatggccacaacctccagactgtgcagctgttaataaagaaaaatcagaccctccagaaagaaatccaggggcaccagcctcgcattgacgacatctttgagaggagccaaaacatcgtcactgacagcagcagcctcagcgctgaggccatcagacagaggcttgccgacctgaagcagctgtggggtctcctcattgaggagacagagaaacgccacaggcggctggaggaggcgcacagggcccagcagtactactttgacgctgctgaggccgaagcctggatgagcgagcaggagctgtacatgatgtcagaggagaaggccaaggatgagcagagtgctgtctccatgttgaagaagcaccagatcttagaacaagctgtggaggactatgcagagaccgtgcatcagctctccaagaccagccgggccctggtggccgacagccatcctgaaagtgagcgcattagcatgcggcagtccaaagtggataaactgtacgctggtctgaaagaccttgctgaagagagaagaggcaagctggatgagagacacaggttattccagctcaaccgggaggtggacgacctggagcagtggatcgctgagagggaggtggtcgcagggtcccatgaactgggacaggactatgagcatgtcacgatgttacaagaacgattccgggagtttgcccgagacaccgggaacattgggcaggagcgcgtggacacggtcaatcacctggcagatgagctcatcaactctggacattcagatgccgccaccatcgctgaatggaaggatggcctcaatgaagcctgggccgacctcctggagctcattgacacaagaacacagattcttgccgcttcctatgaactgcacaagttttaccacgatgccaaggagatctttgggcgtatacaggacaaacacaagaaactccctgaggagcttgggagagatcagaacacagtggagaccttacagagaatgcacactacatttgagcatgacatccaggctctgggcacacaggtgaggcagctgcaggaggatgcagcccgcctccaggcggcctatgcgggtgacaaggccgacgatatccagaagcgcgagaacgaggtcctggaagcctggaagtccctcctggacgcctgtgagagccgcagggtgcggctggtggacacaggggacaagttccgcttcttcagcatggtgcgcgacctcatgctctggatggaggatgtcatccggcagatcgaggcccaggagaagccaagggatgtatcatctgttgaactcttaatgaataatcatcaaggcatcaaagctgaaattgatgcacgtaatgacagtttcacaacctgcattgaacttgggaaatccctgttggcgagaaaacactatgcatctgaggagatcaaggaaaaattactgcagttgacggaaaagaggaaagaaatgatcgacaagtgggaagaccgatgggaatggttaagactgattctggaggtccatcagttctcaagagacgccagtgtggccgaggcctggctgcttggacaggagccgtacctatccagccgagagataggccagagcgtggacgaggtggagaagctcatcaagcgccacgaggcatttgaaaagtctgcagcaacctgggatgagaggttctctgccctggaaaggctgactacattggagttactggaagtgcgcagacagcaagaggaagaggagaggaagaggcggccgccttctcccgagccgagcacgaaggtttcagaggaagccgagtcccagcagcagtgggatacttcaaaaggagaacaagtttcccaaaacggtttgccagctgaacagggatctccacggatggcagaaacggtggacacaagcgaaatggtcaacggcgctacagaacaaaggacgagctctaaagagtccagccccatcccctccccgacctctgatcgtaaagccaagactgccctcccagcccagagtgccgccaccttaccagccagaacccaggagacaccttcggcccagatggaaggcttcctcaatcggaaacacgagtgggaggcccacaataagaaagcctcaagcaggtcctggcacaatgtttattgtgtcataaataaccaagaaatgggtttctacaaagatgcaaagactgctgcttctggaattccctaccacagcgaggtccctgtgagtttgaaagaagctgtctgcgaagtggcccttgattacaaaaagaagaaacacgtattcaagctaagactaaatgatggcaatgagtacctcttccaagccaaagacgatgaggaaatgaacacatggatccaggctatctcttccgccatctcctctgataaacacgaggtgtctgccagcacccagagcacgccagcatccagccgcgcgcagaccctccccaccagcgtcgtcaccatcaccagcgagtccagtcccggcaagcgggaaaaggacaaagagaaagacaaagagaagcggttcagcctttttggcaaaaagaaatgaactcctttccttcacctcctgcccttctcttaccttttcagtgaaattccagcatgcaagctcagaaccaacacattactctctgtgcctaatgttcctcaatgtggttgatttttttttttttttaatttatagagcatttcggggggggtgggggaaacacacctaaacactttatctccaagttacaaaagtttgaggtgcagagggaaggccagattttttttttaatgaaattatatagattagatctcagtatttaaactgttcctcaattttgtgaggctgtgttggaaataacccgcctctagtgctgttggtatgcaaggcagcggtgcttaatcaatatttcctgtgctcaccagaggcaaaatgtaccaatatcctgacaccattctctctccatttacttctggtggttaccctgactcttgactcttagaagtgcccgagatggggctaacctttattaaacagatcgcatattatgatcttgctgcagccacagtgcagctccacattaactctacagaccaaaccatttgtatctggcatcacttactaacacacgacatgcggcttttctgcatcaactgctatgacggttaagaatgtcagtatacaagaaggaatagaaaactgatactgttttaaataatctgtaatttcaattttttttttttgctgaaatacattatattgtacgtttgagataattctagtacaaagtataataaaactagatgtataataaaccctttaaatcattggtaagtgtacaagtggtggaactgaagcatttactggacaaagtaatgttactctaatggttacttgctcgtgcgttgccacactgtgttataatttgcttcatttccttgctatttgatacatagtgtgcatttctctgtcactgtaactattgtaatgacaaattttcatcttactgcacaatcaaaatgacattgataggaatgaactccagaggctgggcctgaacagggaggtggtcgctcaggcctggtgctcagtcgtacgacctgtacctctcaacttttgccctatctgttaaatatatgctatgtcattaaatgcttttaaatctagcacggtgactagttgttgttcttcctctgctgcgtgtgcatgcccagtagggaaactgcaaagggagaaatgacaaacaagaaacattttacaaccagtctgggctcacttttgcattttttatgcatgtctggtgcacaagctttgaaaactacagcaaacagtaataaatgtgactgttttgtagttatacattcaggctttatcttttatttatgaaaaagttaccagagcacttgtgaaacctgaactctgagataggggttggcaaatttgttctgtaaagggacagagatagtaaatattttaggctttgtaggccgtaactgtctctgttgctcaattctgctgttgcgtaatacaaaggcagccattgacggtatgtgaatgcctgggcatggctgtgttccagtaaaactatttaaggacataaatttgaatttcatataactttgacatgccatacaatattttgattttcttaatgatttcaaaatgtaaagtctattttatacagatcagaccaaaaagaagaaaaaaaaaaaacaggcaagaggttaggtttggcccatgggccatagtttgctgacttcagcatagagtcgtgggttatttacaagtgacatacttttcctgggttatctgggtatgttgactccatgccacttgcataaagcagcaatggatattagtattatggatgtccagtaagttattccacaaagaccatgcctaaggtggcatcagccctgggctccacagctgcgtggcatcaaagctttctcttaactctcttacctctaggcaaactgagacctcaccatcctctcccctgcttcccacgacagtcctttgcccttgccatgctcagggttggaatcaagttgttctattctcaacagaccaaaatgtttagttaaggcaaagtatcttggaaacaattgtgattaattacagtcttgtactcttgacaaagctgtgcagatggcaataagttcataccagcaatcctggagtcccataataaatacgtacatgtggaacatcgtgcacataatttcaacagttcgcagatctgtagttatgaagccagggtttggtggtatttgctctctcttggtgcatttgataaggatccactgaggcctgaatgtggaagatgatgggcagcgagaggagcgtcagaagaccccagtcaagacgtgttcgccatcagaggttacaggccgcacagcctgatgagcttcaagcctggcagggtaaatagtttttgggttttttgttttttttttattcttccactatcatgttttttgaggattttgcatatttcttgttgccataatgctgtgctattttaccctgattttcagtgatacaatatgggtgacaatactggcccctccataaatctgaagagtaagaagtagtgaaaataaggcttaggatatgaaatggcgttgtcacttgaatcaaggccactttttgtcctacttgagcatctcaagttgggatgcatcttctgatggcacttccggaactggctgtggtttttttgggtgtaccgagagtgccagtgactgtgcttcttacaattcctggcatcttgagtaggtgaaacactgtatcagactgggtgatgggcacattgtcatttcaccaagttcctggaactgttagaattgcttgtgtatggggatcctatgttagttcccctggatacattgttttatcagtcggaattcttaaataaagacatacttcccttcaaaaaaaaaaaaaaaaaa

SEQ ID NO: 1942 - DNA, 2030 bp, Homo Sapiens
  NM_003130
ggcggagaggcctggcgcacagggcgagggcggctgcggcgcagtctgcagcatggcgtacccggggcatcctggcgccggcggcgggtactacccaggcgggtatggaggggctcccggagggcctgcgtttcccggacaaactcaggatccgctgtatggttactttgctgctgtagctggacaggatgggcagatagatgctgatgaattgcagagatgtctgacacagtctggcattgctggaggatacaaaccttttaacctggagacttgccggcttatggtttcaatgctggatagagatatgtctggcacaatgggtttcaatgaatttaaagaactctgggctgtactgaatggctggagacaacactttatcagttttgacactgacaggagtggaacagtagacccacaagaattgcagaaggccctgacaacaatgggatttaggttgagtccccaggctgtgaattcaattgcaaaacgatacagcaccaatggaaagatcaccttcgacgactacatcgcctgctgcgtcaaactgagggctcttacagacagctttcgaagacgggatactgctcagcaaggtgttgtgaatttcccatatgatgatttcattcaatgtgtcatgagtgtttaaatcaagaggaagctgcatgaatgtaatcaacattccaactggagctctcctttgcttgtcctctttgccttcggtaatatgtataaacttacatcacgactttctcttaacagctgttgtaaagtttattactttatgtacaactgaagttttgttttagttttgataataaattctttggaactttaataagatctagtctgttacaccatttagaactttcctgagccattatcagtcatgccttattttcttgctaaaactctatgtaaatttaagtatgcaaaatgtttaagtcacattatttatttttcattgtgagacactaaaaactgttaatcagactacagctgttatctttcctctcctacaaagaatactccacacataaaaacttaggtaaatgacatagacgcacttgggtgaaataaaacaacaaaaaaggtaatccagtaatccacgtcaggattcaccttagaagtttagcacacgcccttcaaaacctgttgaataatttgattggcaaatactatctgtcaccaagtccctttttgtcatctatttaaacctttgttaactctccttaaaaatcttgtacattataagcttaactatataaaaagaaaattgatagaaaaagactaagggaatatatggaaatattaacaatgtttattttggatgaatggaattctagatgactttaattttctttatatcagtatttttcagattttctatatgctttccttttaaaatcagattttagtttttaaaatactgatacatccattttgatataccatgtattcacactttaaaaaatacacatagcagagtatcggaaagtatgtaccaaaacattgatctggctaccactgggagtcaggatcatgagttcatcttcttccttcttactgcttttccaaacattctccagtaagcaggtactacatttataatggaaggaattttttaaaaaattttaagctgtacactttcaagtaagatctgaattctaatgctggcttgtgcctcttactatgtggtttggtcattatagataatgcccagtttcagtttccccatctttgaaaaggagataatatgttatctcttgggagtagttctgaatatgaagtgtgttgatacaagaagcactgacaatgtttctgtttcttaaatttaaaactggcctggtttgccttttttatcaagagagcttaacagataaaaaatgaaattagtctattttctacttgccagcagagtatctgtcttattttaggatgcagtgtgaaacttaccattcaactgaacaactagttgtcaactaatgaaaataaaacattttctctaagaaaaaaaaaaaaaaaaaaaa

SEQ ID NO: 1943 - DNA, 1273 bp, Homo Sapiens
  NM_003132
gcgggcggcgggcggagctggtcccgttgtgctgcggcgccgcgcggcctgcagtcccgggcccgcgccccgcgccgcccgcccgcccgccatggagcccggccccgacggccccgccgcctccggccccgccgccatccgcgagggctggttccgcgagacctgcagcctgtggcccggccaggccctgtcactgcaggtggagcagctgctccaccaccggcgctcgcgctaccaggacatcctcgtcttccgcagtaagacctatggcaacgtgctggtgttggacggtgtcatccagtgcacggagagagacgagttctcctaccaggagatgatcgccaacctgcctctctgcagccaccccaacccgcgaaaggtgctgatcatcgggggcggagatggaggtgtcctgcgggaggtggtgaagcacccctccgtggagtccgtggtccagtgtgagatcgacgaggatgtcatccaagtctccaagaagttcctgccaggcatggccattggctactctagctcgaagctgaccctacatgtgggtgacggttttgagttcatgaaacagaatcaggatgccttcgacgtgatcatcactgactcctcagaccccatgggccccgccgaaagtctcttcaaggagtcctattaccagctcatgaagacagccctcaaggaagatggtgtcctctgctgccagggcgagtgccagtggctgcacctggacctcatcaaggagatgcggcagttctgccagtccctgttccccgtggtggcctatgcctactgcaccatccccacctaccccagcggccagatcggcttcatgctgtgcagcaagaacccgagcacgaacttccaggagccggtgcagccgctgacacagcagcaggtggcgcagatgcagctgaagtactacaactccgacgtgcaccgcgccgcctttgtgctgcccgagtttgcccgcaaggccctgaatgatgtgagctgagcccaggcgccaccactgatgccacccaggacctcggaccttggagcctgcggggtgcctcggcccctccagccccgggccggacctcctgctggctctcgcccaccaaccaagtgttacaagccccagaatgctgcccggcctgccctgctgggcggactgtctgtgtgtctgtctctctggcgttccacctccaagcctataccagctgtgtacagcgccatctctctgccttctgttgcccctcactcaccaaacacgtgtatttatagc

SEQ ID NO: 1944 - DNA, 1126 bp, Homo Sapiens
  NM_003134
ccagcctaggccgaacttccggctctcactgctaggggcttaagcggagggagtcgagccagcgtcgccgcgatggtgttgttggagagcgagcagttcctgacggagctgaccagacttttccagaagtgccggacgtcgggcagcgtctatatcaccttgaagaagtatgacggtcgaaccaaacccattccaaagaagggtactgtggagggctttgagcccgcagacaacaagtgtctgttaagagctaccgatgggaagaagaagatcagcactgtggtgagctccaaggaagtgaataagtttcagatggcttattcaaacctccttagagctaacatggatgggctgaagaagagagacaaaaagaacaaaactaagaagaccaaagcagcagcagcagcagcagcagcagcacctgccgcagcagcaacagcaccaacaacagcagcaacaacagcagcaacagcagcacagtaaagggcatacatttcctgctttcaccaattaaccactgaattgctattttttccttttggccagatagctaggtttctggttcccccacagtaggtgttttcacataagattagggtccttttggaaagaatagttgcagtgtttataggatagttgtggtaagaatctagtttattttgcatttggctaattggtctgtgctgcatggttatatactcctggattatagattaaaagtctctgtagacatctctgtgaagagcaagctatcattaaacatgtctgtttatcagcactgtctctttattcctttcccaacccattttaatagttctggcaataactactaaatctagaatgatgtgattaatgaataggctttagctctataatatcttctaggttattagaattgaaacctgacagttttataaaaagtcatgttatctcatgagctgcttcccacctggctgtataattttatcatcatggttccccagtttcgatgagttctcacagtcaaatgagagtttgtttaaccaccttaggagaaacatactacaaagtcatcaagaataaaggttccaaagtaattatgatttttggtttctttatgccctttggtttggatattttcatgtgc

SEQ ID NO: 1945 - DNA, 1502 bp, Homo Sapiens
  NM_003135
tagagatcctggcgccgagcgacaggtgccggaacaaacaggcgatgagaaatcgcggacgcggaaccatttcttgggcaggacttccggcggaaaagcgggctgtctcggaaactcagagccgggttcctcccgggtttctgccgggtttctccctgcggctcctgggttgttgagactcttgtgaagatggcttgcgctgccgcgcggtccccggccgaccaggacaggtttatttgtatctatcctgcttatttaaataataagaagaccatcgcagagggaaggcgaatccccataagtaaggctgttgaaaatcctacagctacagagattcaagatgtatgttcagcagttggacttaacgtatttcttgagaaaaataaaatgtactctagagaatggaatcgtgatgtccaatacagaggcagagtccgggtccagctcaaacaggaagatgggagcctctgccttgtacagttcccatcacgtaagtcagtaatgttgtatgcagcagaaatgatacctaaactaaaaacaaggacacaaaaaacaggaggtgctgaccaaagtcttcaacaaggagagggaagtaaaaaagggaaaggaaagaaaaagaagtaacctagtatcagcatcaagtatgtggtactactgtaagagacatgaatggagacttctaatttgtatcggagggaaacagaagctttttgtttgcatcatttaactgaactgtgaacccttgtgcctctcatctttatcatcggagttgacagtgaaacaaatttacatcagaagtttgcatctcgcgtatatgccgtataaaagaatttttttgtctttcaatgcagttttttggaagaaaatatttttaaatggacaatggactgtacaataagttacttgaaataagttgtttcagataaatttcaattagatttaaaataaacattttgtccaccttttaagttaatgaaataaaatttgaaactgacttttgcagcttttgcttatatactaatgctaggagaggagggataattaagaataaaatatgtagtgaaagtttccatagtgtgaggctaaaactagaagaaactgtggtaggtccttttgtgggtgggggacaggggagtctgtaaaaagccagtctgtagatgatattttaatatattattgtaatcgaatcgttcagttgttttttgacatggaaagtcctggattttaagctttaaatttgcttattttgtaggtttaagaacatgattttcatgggagttgtaaaattaactgtgctttagcaccttgaggtacactttccttcaacaaatgaaattggattggtgctccagaatttcagagcggtttctgaaagtagtgattttgagctatcccaattcctgttcttcctgaggcctggtttagctcttccttgaattctgcaagctatctcatattttcagtaaattccatttttttaaaaaaaaaaaaaaaaaaaaaaa

SEQ ID NO: 1946 - DNA, 2298 bp, Homo Sapiens
  NM_003136
gagccgcgtagaaggaacgcggcggtgtgccccggaagcggaagtagattctcctatagaaaggctggactacgcggagtggtgacgtttcctcattgggcggaaggttcgctggcactccgttggtcttccagctggtgggagttgacgacgtggtgctgggcgttgggaccctactttatctagttcgggaagttgggttgtggggtcatacctgtctgtctgctcccagctttcttgggtttcttccgacggcgtggggcctcgctaaggaattcccggcccctcagggccacggctttagcggtgtcttttgcgagttcttcgtaagtacatcttaaagctgtcaagatggttctagcagaccttggaagaaaaataacatcagcattacgctcgttgagcaatgccaccattatcaatgaagaggtattgaatgctatgctaaaagaagtctgtaccgctttgttggaagcagatgttaatattaaactagtgaagcaactaagagaaaatgttaagtctgctattgatcttgaagagatggcatctggtcttaacaaaagaaaaatgattcagcatgctgtatttaaagaacttgtgaagcttgtagaccctggagttaaggcatggacacccactaaaggaaaacaaaatgtgattatgtttgttggattgcaagggagtggtaaaacaacaacatgttcaaagctagcatattattaccagaggaaaggttggaagacctgtttaatatgtgcagacacattcagagcaggggcttttgaccaactaaaacagaatgctaccaaagcaagaattccattttatggaagctatacagaaatggatcctgtcatcattgcttctgaaggagtagagaaatttaaaaatgaaaattttgaaattattattgttgatacaagtggccgccacaaacaagaagactctttgtttgaagaaatgcttcaagttgctaatgctatacaacctgataacattgtttatgtgatggatgcctccattgggcaggcttgtgaagcccaggctaaggcttttaaagataaagtagatgtagcctcagtaatagtgacaaaacttgatggccatgcaaaaggaggtggtgcactcagtgcagtcgctgccacaaaaagtccgattattttcattggtacaggggaacatatagatgactttgaacctttcaaaacacagccttttattagcaaacttcttggtatgggcgacattgaaggactgatagataaagtcaacgagttgaagttggatgacaatgaagcacttatagagaagttgaaacatggtcagtttacgttgcgagacatgtatgagcaatttcaaaatatcatgaaaatgggccccttcagtcagatcttggggatgatccctggttttgggacagattttatgagcaaaggaaatgaacaggagtcaatggcaaggctaaagaaattaatgacaataatggatagtatgaatgatcaagaactagacagtacggatggtgccaaagtttttagtaaacaaccaggaagaatccaaagagtagcaagaggatcgggtgtatcaacaagagatgttcaagaacttttgacacaatataccaagtttgcacagatggtaaaaaagatgggaggtatcaaaggacttttcaaaggtggcgacatgtctaagaatgtgagccagtcacagatggcaaaattgaaccaacaaatggccaaaatgatggatcctagggttcttcatcacatgggtggtatggcaggacttcagtcaatgatgaggcagtttcaacagggtgctgctggcaacatgaaaggcatgatgggattcaataatatgtaaagaaaatgccttaatataaactgactcagttgaatacctaatttgctgagacctcagcgtttcccttctttttgcgaattggggggaaagtgtatttttcttgcttatcatgcactctttccttttcttctcgcccgcttttcccctccttttctttttccttccttctttcctccctttaatataagggagaaatacatggtttttgtggaaatcattatatgtttgctttagattttcttctgttttcaccatcataacacttaagttaaatcatgatgtaaaattttagtacttaaaggtttttaattatctcgaaggccaagcattgcatttgtaaacagtcctggtcagtagttaaataatgtttcaattaaagtgctgtaaaataaacttcaaagtggttataagttaaaaaaaaaaaaaaaaaaa

SEQ ID NO: 1947 - DNA, 4380 bp, Homo Sapiens
  NM_003137
atcgtggggcgggggtggggcgggactgagggcggagtgtgagcgggctcggttttgggccgcggcgggagcgggagtcgccgccactcgagtgcgcaggcgcctggcgattaccggtctcaccatggagcggaaagtgcttgcgctccaggcccgaaagaaaaggaccaaggccaagaaggacaaagcccaaaggaaatctgaaactcagcaccgaggctctgctccccactctgagagtgatctaccagagcaggaagaggagattctgggatctgatgatgatgagcaagaagatcctaatgattattgtaaaggaggttatcatcttgtgaaaattggagatctattcaatgggagataccatgtgatccgaaagttaggctggggacacttttcaacagtatggttatcatgggatattcaggggaagaaatttgtggcaatgaaagtagttaaaagtgctgaacattacactgaaacagcactagatgaaatccggttgctgaagtcagttcgcaattcagaccctaatgatccaaatagagaaatggttgttcaactactagatgactttaaaatatcaggagttaatggaacacatatctgcatggtatttgaagttttggggcatcatctgctcaagtggatcatcaaatccaattatcaggggcttccactgccttgtgtcaaaaaaattattcagcaagtgttacagggtcttgattatttacataccaagtgccgtatcatccacactgacattaaaccagagaacatcttattgtcagtgaatgagcagtacattcggaggctggctgcagaagcaacagaatggcagcgatctggagctcctccgccttccggatctgcagtcagtactgctccccagcctaaaccagctgacaaaatgtcaaagaataagaagaagaaattgaagaagaagcagaagcgccaggcagaattactagagaagcgaatgcaggaaattgaggaaatggagaaagagtcgggccctgggcaaaaaagaccaaacaagcaagaagaatcagagagtcctgttgaaagacccttgaaagagaacccacctaataaaatgacccaagaaaaacttgaagagtcaagtaccattggccaggatcaaacgcttatggaacgtgatacagagggtggtgcagcagaaattaattgcaatggagtgattgaagtcattaattatactcagaacagtaataatgaaacattgagacataaagaggatctacataatgctaatgactgtgatgtccaaaatttgaatcaggaatctagtttcctaagctcccaaaatggagacagcagcacatctcaagaaacagactcttgtacacctataacatctgaggtgtcagacaccatggtgtgccagtcttcctcaactgtaggtcagtcattcagtgaacaacacattagccaacttcaagaaagcattcgggcagagataccctgtgaagatgaacaagagcaagaacataacggaccactggacaacaaaggaaaatccacggctggaaattttcttgttaatccccttgagccaaaaaatgcagaaaagctcaaggtgaagattgctgaccttggaaatgcttgttgggtgcacaaacatttcactgaagatattcaaacaaggcaatatcgttccttggaagttctaatcggatctggctataatacccctgctgacatttggagcacggcatgcatggcctttgaactggccacaggtgactatttgtttgaacctcattcaggggaagagtacactcgagatgaagatcacattgcattgatcatagaacttctggggaaggtgcctcgcaagctcattgtggcaggaaaatattccaaggaatttttcaccaaaaaaggtgacctgaaacatatcacgaagctgaaaccttggggcctttttgaggttctagtggagaagtatgagtggtcgcaggaagaggcagctggcttcacagatttcttactgcccatgttggagctgatccctgagaagagagccactgccgccgagtgtctccggcacccttggcttaactcctaagcccctgcccagcaccacagcagagatcacacactgaccctccgcccttccccttcaagcattttcctcttcccttttcagggtgaagctcttccttcaagagtttctagatcttgttttttttttaatccaacatgttcatttgggtttgcttacttgaccctgtggagatccccacagccattgggcatcctaggtgaatttggccttggttgggctctgccaaagactaatggactaaaatgtgaaacagcctcttgccctgtacctttccttcccattaggacatcctttaaattataagcatcctttttgaaaagagctatgaaggtgtatgagcccatccttttattcattgactctaagagtcaaattttctagtgcatatcctattgccagcataaggatgaggagggggaaagggtcttaattctatgtacagcagagacattaaacttgctgtgtccgggctgcatcatcttcctggactgtttctgttgttctctgtgttcacattttttcctgcaacttttaagctactgtcttttttaaatagctatatgaacaccaaatttgggtaccattttatcactgttcaaagcactgtcaaattcctttcatcctttaatagttaagatctttgaatcttcagtctgatttttaatgtaagcaaaaacagaaccattgaatagtaatttcttgagaacctcaggtgttctataaacagtcctttcctgtatgtcttctattaccctaagaccagagttattttggttggttgttttgttttattttttgtttttgtatccatggctggcactttactcattgcacttgagtttattgccccataactaaaggatcaggatgatggtagaacggagatctgggtttcagagctttcccatttaagaaaaatagatcttgagattctgattcttttccaaacagtcccctgctttcatgtacagctttttctttaccttacccaaaattctggccttgaagcagttttcctctatggctttgcctttctgattttctcagaggctcgagtctttaatataaccccaaatgaaagaaccaaggggaggggtgggatggcacttttttttgttggtcttgttttgttttgttttttggttggttggttcgttattttttaagattagccattctctgctgctatttccctacataatgtcaatttttaaccataattttgacatgattgagatgtacttgaggcttttttgttttaattgagaaaagactttgcaattttttttttaggatgagcctctcctagacttgacctagaatattacatattcctccagtaagtaatactgaagagcaaaagagaggcaggattggggtcacagccgcttcttcagcatggaccaagtgggccttggggattgcagcgttctcgaagtggctgtaggactcgaatttacagaaagccacagaggtgcaacttgaggctctgctagcaagccaccagtgaggctattgggtaaccacctttctatacaggagattggaatctactttgtcatttatccaccacagtgacaaaggaaaagtggtgccgttatgcaatccatttaactcataaacatattactctgagtaactggccagccattcatcggatccttcattgggtactcctgaaatcagacatgttcctgtagaaagaattttaagttaggctttctatgcacctatcaagaatcaagagaatagattgtatcaaacaacggcagggaaatccttcagcaattctaatccactttgggttttcagctgtttttacatctaaagcaatagactagaactgaattatcttctacatagtaaaatcacaattgtggaattacaggaattctggtgatattaaggtgaaataacaaaacacaaaaggccctattttaacagttgatgtgacagtaagttttaatagaacctgtaacttcattttggaaatgcttctccaccaaataagggctttttcccctatttaaggagccagatggattgaaagatgtggaaataggcagctgtagatcttgatcttccaggtaccccatgtacctttattgagcttaattataatactgtcaaattgccacgatctcactaaaggatttctatttgctgtcagttaaaaataaagccctaaatacatttttattctttctactgagggcattgtctgttttctttgtaaatgccgtacaataaacaaattatttaataacctaaaaaaaaaaaaaaaaaaa

SEQ ID NO: 1948 - DNA, 1673 bp, Homo Sapiens
  NM_003142
ggagcgctttaggctggccggcggcgctgggaggtggagtcgttgctgttgctgtttgtgagcctgtggcgcggcttctgtgggccggaaccttaaagatagccgcaatggctgaaaatggtgataatgaaaagatggctgccctggaggccaaaatctgtcatcaaattgagtattattttggcgacttcaatttgccacgggacaagtttctaaaggaacagataaaactggatgaaggctgggtacctttggagataatgataaaattcaacaggttgaaccgtctaacaacagactttaatgtaattgtggaagcattgagcaaatccaaggcagaactcatggaaatcagtgaagataaaactaaaatcagaaggtctccaagcaaacccctacctgaagtgactgatgagtataaaaatgatgtaaaaaacagatctgtttatattaaaggcttcccaactgatgcaactcttgatgacataaaagaatggttagaagataaaggtcaagtactaaatattcagatgagaagaacattgcataaagcatttaagggatcaatttttgttgtgtttgatagcattgaatctgctaagaaatttgtagagacccctggccagaagtacaaagaaacagacctgctaatacttttcaaggacgattactttgccaaaaaaaatgaagaaagaaaacaaaataaagtggaagctaaattaagagctaaacaggagcaagaagcaaaacaaaagttagaagaagatgctgaaatgaaatctctagaagaaaagattggatgcttgctgaaattttcgggtgatttagatgatcagacctgtagagaagatttacacatacttttctcaaatcatggtgaaataaaatggatagacttcgtcagaggagcaaaagaggggataattctatttaaagaaaaagccaaggaagcattgggtaaagccaaagatgcaaataatggtaacctacaattaaggaacaaagaagtgacttgggaagtactagaaggagaggtggaaaaagaagcactgaagaaaataatagaagaccaacaagaatccctaaacaaatggaagtcaaaaggtcgtagatttaaaggaaaaggaaagggtaataaagctgcccagcctgggtctggtaaaggaaaagtacagtttcagggcaagaaaacgaaatttgctagtgatgatgaacatgatgaacatgatgaaaatggtgcaactggacctgtgaaaagagcaagagaagaaacagacaaagaagaacctgcatccaaacaacagaaaacagaaaatggtgctggagaccagtagtttagtaaaccaattttttattcattttaaataggttttaaacgacttttgtttgcggggcttttaaaaggaaaaccgaattaggtccacttcaatgtccacctgtgagaaaggaaaaatttttttgttgtttaacttgtctttttgttatgcaaatgagatttctttgaatgtattgttctgtttgtgttatttcagatgattcaaatatcaaaaggaagattcttccattaaattgcctttgtaatatgagaatgtattagtacaaactaactaataaaatatatactatatgaaaagagcaaaaaccaaaaaaaaaaaaaaaaaaaaaaaaaaaaa

SEQ ID NO: 1949 - DNA, 628 bp, Homo Sapiens
  NM_003143
cctgcgtggctgggctgctcgggttagatcgtcaggaaaagcctaaagattagactgtaagaaaagaaaatagaagccatgtttcgaagacctgtattacaggtacttcgtcagtttgtaagacatgagtccgaaacaactaccagtttggttcttgaaagatccctgaatcgtgtgcacttacttgggcgagtgggtcaggaccctgtcttgagacaggtggaaggaaaaaatccagtcacaatattttctctagcaactaatgagatgtggcgatcaggggatagtgaagtttaccaactgggtgatgtcagtcaaaagacaacatggcacagaatatcagtattccggccaggcctcagagacgtggcatatcaatatgtgaaaaaggggtctcgaatttatttggaagggaaaatagactatggtgaatacatggataaaaataatgtgaggcgacaagcaacaacaatcatagctgataatattatatttctgagtgaccagacgaaagagaaggagtagaaaggatgattcttctttggccatcatttggtacagtctcatttccaagtcatgtataatctttatggcttccaaggacaagaattaaaatactcttttacgt

SEQ ID NO: 1950 - DNA, 2825 bp, Homo Sapiens
  NM_003146
gtacggcttccggtggcgggacgcggggccgcgcacgcgggaaaagcttccccggtgtccccccatccccctccccgcgccccccccgcgtccccccagcgcgcccacctctcgcgccggggccctcgcgaggccgcagcctgaggagattcccaacctgctgagcatccgcacacccactcaggagttggggcccagctcccagtttacttggtttcccttgtgcagcctggggctctgcccaggccaccacaggcaggggtcgacatggcagagacactggagttcaacgacgtctatcaggaggtgaaaggttccatgaatgatggtcgactgaggttgagccgtcagggcatcatcttcaagaatagcaagacaggcaaagtggacaacatccaggctggggagttaacagaaggtatctggcgccgtgttgctctgggccatggacttaaactgcttacaaagaatggccatgtctacaagtatgatggcttccgagaatcggagtttgagaaactctctgatttcttcaaaactcactatcgccttgagctaatggagaaggacctttgtgtgaagggctggaactgggggacagtgaaatttggtgggcagctgctttcctttgacattggtgaccagccagtctttgagatacccctcagcaatgtgtcccagtgcaccacaggcaagaatgaggtgacactggaattccaccaaaacgatgacgcagaggtgtctctcatggaggtgcgcttctacgtcccacccacccaggaggatggtgtggaccctgttgaggcctttgcccagaatgtgttgtcaaaggcggatgtaatccaggccacgggagatgccatctgcatcttccgggagctgcagtgtctgactcctcgtggtcgttatgacattcggatctaccccacctttctgcacctgcatggcaagacctttgactacaagatcccctacaccacagtactgcgtctgtttttgttaccccacaaggaccagcgccagatgttctttgtgatcagcctggatcccccaatcaagcaaggccaaactcgctaccacttcctgatcctcctcttctccaaggacgaggacatttcgttgactctgaacatgaacgaggaagaagtggagaagcgctttgagggtcggctcaccaagaacatgtcaggatccctctatgagatggtcagccgggtcatgaaagcactggtaaaccgcaagatcacagtgccaggcaacttccaagggcactcaggggcccagtgcattacctgttcctacaaggcaagctcaggactgctctacccgctggagcggggcttcatctacgtccacaagccacctgtgcacatccgcttcgatgagatctcctttgtcaactttgctcgtggtaccactactactcgttcctttgactttgaaattgagaccaagcagggcactcagtataccttcagcagcattgagagggaggagtacgggaaactgtttgattttgtcaacgcgaaaaagctcaacatcaaaaaccgaggattgaaagagggcatgaacccaagctacgatgaatatgctgactctgatgaggaccagcatgatgcctacttggagaggatgaaggaggaaggcaagatccgggaggagaatgccaatgacagcagcgatgactcaggagaagaaaccgatgagtcattcaacccaggtgaagaggaggaagatgtggcagaggagtttgacagcaacgcctctgccagctcctccagtaatgagggtgacagtgaccgggatgagaagaagcggaaacagctcaaaaaggccaagatggccaaggaccgcaagagccgcaagaagcctgtggaggtgaagaagggcaaagaccccaatgcccccaagaggcccatgtctgcatacatgctgtggctcaatgccagccgagagaagatcaagtcagaccatcctggcatcagcatcacggatctttccaagaaggcaggcgagatctggaagggaatgtccaaagagaagaaagaggagtgggatcgcaaggctgaggatgccaggagggactatgaaaaagccatgaaagaatatgaagggggccgaggcgagtcttctaagagggacaagtcaaagaagaagaagaaagtaaaggtaaagatggaaaagaaatccacgccctctaggggctcatcatccaagtcgtcctcaaggcagctaagcgagagcttcaagagcaaagagtttgtgtctagtgatgagagctcttcgggagagaacaagagcaaaaagaagaggaggaggagcgaggactctgaagaagaagaactagccagtactccccccagctcagaggactcagcgtcaggatccgatgagtagaaacggaggaaggttctctttgcgcttgccttctcacaccccccgactccccacccatattttggtaccagtttctcctcatgaaatgcagtccctggattctgtgccatctgaacatgctctcctgttggtgtgtatgtcactagggcagtggggagacgtcttaactctgctgcttcccaaggatggctgtttataatttggggagagatagggtgggaggcagggcaatgcaggatccaaatcctcatcttactttcccgaccttaaggatgtagctgctgcttgtcctgttcaagttgctggagcaggggtcatgtgaggccaggcctgtagctcctacctggggcctatttctactttcattttgtatttctggtctgtgaaaatgatttaataaagggaactgactttggaaaccaaaaaaa

SEQ ID NO: 1951 - DNA, 2761 bp, Homo Sapiens
  NM_003151
agaggacgcccggtgaaggggctccagcctggcagtttctgcgtgttagcatttctagaatagagtgggtgggaactgacccaagtaaagtcccagagactcgaacactgacgcacaggaaagcctcaagtgggaggagaaatgcaaatcccctactgatgatggcgtcagcggctttctcctagggactgtgaggggcgcttctgactttggacttgagcactgcctgggacctgtgctgagagagcgctagcatgtctcagtggaatcaagtccaacagttagaaatcaagtttttggagcaggtggatcaattctatgatgacaactttcccatggaaattcggcatctgttggcccaatggattgaaaatcaagactgggaggcagcttctaacaatgaaaccatggcaacgattcttcttcaaaacttgttaatacaactggatgaacagttaggtcgtgtttccaaagagaaaaacctactcttgatacacaatctaaaaagaattaggaaggtccttcagggaaaatttcatggaaatccaatgcatgtagctgtggttatttcaaactgtttaagggaagagaggagaatattggctgcagccaacatgcctgtccaggggcctctagagaaatccttacaaagttcttcagtttcagaaagacagaggaatgtggagcacaaagtggctgccattaaaaacagtgtgcagatgacagaacaagataccaaatacttagaagatctgcaagacgaatttgactacaggtataaaacaattcagacaatggatcagagtgacaagaatagtgccatggtgaatcaggaagttttgacactgcaggaaatgcttaacagcctcgatttcaagagaaaggaggctctcagtaaaatgacccaaatcatccatgagacagacctgttaatgaacaccatgctcatagaagagctgcaagactggaagcggcggcagcaaatcgcctgcatcgggggtccactccacaatgggctcgaccagcttcagaactgctttacactattggcagaaagtcttttccaactgagaaggcaattggagaaactagaggagcaatctaccaaaatgacatatgaaggtgatcccattccaatgcaaagaactcacatgctagaaagagtcaccttcttgatctacaaccttttcaagaactcatttgtggttgagcgacagccatgtatgccaacccaccctcagaggccgttggtacttaaaaccctaattcagttcactgtaaaactaaggctactaataaaattgccagaactaaactatcaggtaaaggttaaggcatcaattgacaagaatgtttcaactctaagcaaccgaagatttgtactttgtggaactaatgtcaaagccatgtctattgaagaatcttccaatgggagtctctcagtagaatttcgacatttgcaaccaaaggaaatgaagtccagtgctggaggtaaaggaaatgagggctgtcacatggtgactgaagaacttcattccataacgtttgaaacacagatctgcctctatggcctgaccatagatttggagaccagctcattgcctgtggtgatgatttccaatgtcagtcagttacctaatgcttgggcatccatcatttggtacaacgtgtcaaccaacgattcccagaacttggttttctttaataatcctccacctgccacattgagtcaactactggaggtgatgagctggcagttttcatcgtacgttggtcgtggtcttaactcagatcaactccatatgctggcagagaagcttacagtccaatctagctacagtgatggtcacctcacctgggccaagttctgcaaggaacatttacctggtaaatcatttaccttttggacatggcttgaagcaatattggatctaattaagaaacacattcttcccctttggattgatgggtatgtcatgggctttgttagcaaagagaaggaacggctgttgctaaaggataaaatgcctggcacctttttattaagattcagtgaaagccatctcggaggaataactttcacctgggtggaccattctgaaagtggggaagtgagattccactctgtagaaccctacaataaaggccggttgtctgctctgccattcgctgacatcctgcgagactacaaagttattatggctgaaaacattcctgaaaaccctctgaagtacctatatcctgacattcccaaagacaaagccttcggtaaacactacagctctcagccttgcgaagtttcaagaccaacagaaaggggtgacaaaggttatgttccttctgtttttatccccatctcaacaatccgaagtgattcaacagagccacattctccatcagaccttcttcccatgtctccaagtgtgtatgcggtgttgagagaaaacctgagtcccacaacaattgaaactgcaatgaagtctccttattctgctgaatgacaggataaactctgacgcaccaagaaaggaagcaaatgaaaaagtttaaagactgttctttgcccaataaccacattttatttcttcagctttgtaaataccaggttctaggaaatgtttgacatctgaagctctcttcacactcccgtggcactcctcaattgggagtgttgtgactgaaatgcttgaaaccaaagcttcagataaacttgcaagataagacaactttaagaaaccagtgttaataacaatattaacag

SEQ ID NO: 1952 - DNA, 4031 bp, Homo Sapiens
  NM_003153
agagctccagggagggacctgggtagaaggagaagccggaaacagcgggctggggcagccactgcttacactgaagagggaggacgggagaggagtgtgtgtgtgtgtgtgtgtgtgtgtgtgtatgtatgtgtgtgctttatcttatttttctttttggtggtggtggtggaaggggggaggtgctagcagggccagccttgaactcgctggacagagctacagacctatggggcctggaagtgcccgctgagaaagggagaagacagcagaggggttgccgaggcaacctccaagtcccagatcatgtctctgtggggtctggtctccaagatgcccccagaaaaagtgcagcggctctatgtcgactttccccaacacctgcggcatcttctgggtgactggctggagagccagccctgggagttcctggtcggctccgacgccttctgctgcaacttggctagtgccctactttcagacactgtccagcaccttcaggcctcggtgggagagcagggggaggggagcaccatcttgcaacacatcagcacccttgagagcatatatcagagggaccccctgaagctggtggccactttcagacaaatacttcaaggagagaaaaaagctgttatggaacagttccgccacttgccaatgcctttccactggaagcaggaagaactcaagtttaagacaggcttgcggaggctgcagcaccgagtaggggagatccaccttctccgagaagccctgcagaagggggctgaggctggccaagtgtctctgcacagcttgatagaaactcctgctaatgggactgggccaagtgaggccctggccatgctactgcaggagaccactggagagctagaggcagccaaagccctagtgctgaagaggatccagatttggaaacggcagcagcagctggcagggaatggcgcaccgtttgaggagagcctggccccactccaggagaggtgtgaaagcctggtggacatttattcccagctacagcaggaggtaggggcggctggtggggagcttgagcccaagacccgggcatcgctgactggccggctggatgaagtcctgagaaccctcgtcaccagttgcttcctggtggagaagcagcccccccaggtactgaagactcagaccaagttccaggctggagttcgattcctgttgggcttgaggttcctgggggccccagccaagcctccgctggtcagggccgacatggtgacagagaagcaggcgcgggagctgagtgtgcctcagggtcctggggctggagcagaaagcactggagaaatcatcaacaacactgtgcccttggagaacagcattcctgggaactgctgctctgccctgttcaagaacctgcttctcaagaagatcaagcggtgtgagcggaagggcactgagtctgtcacagaggagaagtgcgctgtgctcttctctgccagcttcacacttggccccggcaaactccccatccagctccaggccctgtctctgcccctggtggtcatcgtccatggcaaccaagacaacaatgccaaagccactatcctgtgggacaatgccttctctgagatggaccgcgtgccctttgtggtggctgagcgggtgccctgggagaagatgtgtgaaactctgaacctgaagttcatggctgaggtggggaccaaccgggggctgctcccagagcacttcctcttcctggcccagaagatcttcaatgacaacagcctcagtatggaggccttccagcaccgttctgtgtcctggtcgcagttcaacaaggagatcctgctgggccgtggcttcaccttttggcagtggtttgatggtgtcctggacctcaccaaacgctgtctccggagctactggtctgaccggctgatcattggcttcatcagcaaacagtacgttactagccttcttctcaatgagcccgacggaacctttctcctccgcttcagcgactcagagattgggggcatcaccattgcccatgtcatccggggccaggatggctctccacagatagagaacatccagccattctctgccaaagacctgtccattcgctcactgggggaccgaatccgggatcttgctcagctcaaaaatctctatcccaagaagcccaaggatgaggctttccggagccactacaagcctgaacagatgggtaaggatggcaggggttatgtcccagctaccatcaagatgaccgtggaaagggaccaaccacttcctaccccagagctccagatgcctaccatggtgccttcttatgaccttggaatggcccctgattcctccatgagcatgcagcttggcccagatatggtgccccaggtgtacccaccacactctcactccatccccccgtatcaaggcctctccccagaagaatcagtcaacgtgttgtcagccttccaggagcctcacctgcagatgccccccagcctgggccagatgagcctgccctttgaccagcctcacccccagggcctgctgccgtgccagcctcaggagcatgctgtgtccagccctgaccccctgctctgctcagatgtgaccatggtggaagacagctgcctgagccagccagtgacagcgtttcctcagggcacttggattggtgaagacatattccctcctctgctgcctcccactgaacaggacctcactaagcttctcctggaggggcaaggggagtcggggggagggtccttgggggcacagcccctcctgcagccctcccactatgggcaatctgggatctcaatgtcccacatggacctaagggccaaccccagttggtgatcccagctggagggagaacccaaagagacagctcttctactacccccacagacctgctctggacacttgctcatgccctgccaagcagcagatggggagggtgccctcctatccccacctactcctgggtcaggaggaaaagactaacaggagaatgcacagtgggtggagccaatccactccttcctttctatcattcccctgcccacctccttccagcactgactggaagggaagttcaggctctgagacacaccccaacatgcctgcacctgcagcgcgcacacgcacgcacacacacatacagagctctctgagggtgatggggctgagcaggaggggggctgggtaagagcacaggttagggcatggaaggcttctccgcccattctgacccagggcctaggacggataggcaggaacatacagacacatttacactagaggccagggatagaggatattgggtctcagccctaggggaatgggaagcagctcaagggaccctgggtgggagcataggaggggtctggacatgtggttactagtacaggttttgccctgattaaaaaatctcccaaagccccaaattcctgttagccaggtggaggcttctgatacgtgtatgagactatgcaaaagtacaagggctgagattcttcgtgtatagctgtgtgaacgtgtatgtacctaggatatgttaaatgtatagctggcaccttagttgcatgaccacatagaacatgtgtctatctgcttttgcctacgtgacaacacaaatttgggagggtgagacactgcacagaagacagcagcaagtgtgctggcctctctgacatatgctaacccccaaatactctgaatttggagtctgactgtgcccaagtgggtccaagtggctgtgacatctacgtatggctccacacctccaatgctgcctgggagccagggtgagagtctgggtccaggcctggccatgtggccctccagtgtatgagagggccctgcctgctgcatcttttctgttgccccatccaccgccagcttcccttcactcccctatcccattctccctctcaaggcaggggtcatagatcctaagccataaaataaattttattccaaaataacaaaataaataatctactgtacacaatctgaaaagaaaaaaaaaaaaaaaa

SEQ ID NO: 1953 - DNA, 3479 bp, Homo Sapiens
  NM_003162
gcggccgccatggacgagcaggcgggtcccggcgtcttcttcagcaacaaccacccgggcgccggcggtgccaaggggctcgggcctctggcggaggctgccgcggccggcgacggggcggctgcggcgggggcggcccgagcccagtacagtctcccggggatcctgcacttcctgcagcacgagtgggcccgcttcgaggtggagagagcccagtgggaggtggagcgggcggagctgcaggcccagattgccttcctgcagggagaaaggaagggccaagaaaatttgaagaaggatcttgtgaggaggatcaaaatgttggagtatgctcttaaacaggaaagagccaaataccacaagttgaaatacgggacagaattgaatcagggagatatgaagcctccaagctatgattctgatgaaggtaatgaaacagaagtgcagccacaacaaaacagccagttaatgtggaaacaaggtcgacaactactcagacagtatctacaggaggtgggttatacagatactattctagatgtgaaatctaaacgagtgcgagctttgttgggcttttcaagtgatgtcacggacagggaagatgacaaaaatcaggactcagttgtaaatggcacagaggctgaagttaaagagacagcaatgattgcaaaatctgagttaacagattctgcctccgtgctggataatttcaaattccttgaaagtgcagctgcagatttcagtgatgaagatgaagatgatgatgttgatggaagagagaaaagcgtcattgatacttcaacaattgttaggaaaaaagcattgcctgacagcggtgaagatcgagatacaaaagaagctctaaaggagtttgacttcttggttacatcagaggaaggagacaatgaatctagaagtgcaggcgatggaacagactgggaaaaggaagaccagtgtctcatgcctgaagcctggaatgtggaccagggagtaattaccaaactcaaggaacaatacaaaaaggagagaaaggggaaaaagggggtgaagaggcccaataggtcaaaactacaagatatgcttgctaatttgagagatgttgatgaacttccttcattgcagccatctgtgggttcaccttccagacccagcagctccaggcttcctgaacatgaaattaatagggcagatgaagtggaagcattgacatttcctccttcttctggaaagtcattcatcatgggagcagatgaagcccttgaaagtgaactgggacttggagaactagcaggccttacggtggccaatgaagcagactcactaacttatgatatagcaaacaataaagatgcattgaggaagacatggaaccctaagtttacattgagaagtcactttgatggcatccgagcccttgctttccatcccattgagcctgttttgataacagcatcagaggatcacacattaaaaatgtggaatttacagaaaacagccccagccaaaaagagcacttctcttgatgtagaacctatctatacattcagagcccataaaggtccagtgctttgtgtggtaatgagcagcaatggtgagcagtgttacagtggtggtactgatggactgatccagggctggaataccactaatcccaacatcgacccctatgattcttatgatccttctgttttacgaggccctctgctaggccacacggatgcagtctggggtttggcttatagtgcagcacatcagcgtttgttgtcctgttcagcagatggcactctgcgtttatggaatacaactgaggttgctccagcactaagtgtatttaatgatactaaagaactgggaatccctgcctctgtggatctagtgagcagtgacccgagccatatggtagcatcattcagcaagggatatacaagcatttttaacatggaaacacaacaacgcattctcactttagaatccaatgtagatacaacagccaactcttcctgccaaataaatagagtcatcagtcatcctactcttccgatcagcatcactgctcatgaagacaggcacatcaaattctatgataacaatacaggcaaactgatccactcgatggtagcccacctagaagctgttacaagtttagcagttgatcccaatggcctttacttgatgtctggcagtcatgactgttcaatacgtttatggaatctagaaagtaagacgtgtatccaagaattcacagctcatcgaaaaaagtttgaagaatcgattcatgatgtagctttccacccatccaaatgctatatagccagtgctggagctgacgcactggctaaagtctttgtatgacgcaatgcatcatcttcaccttctagctgtttataagtaatcaactgcacacaagagatacagaagacgagggcaagaatcatctcgtcctgcccttttgttctgctgaaggagcacagagaacatttgttgaagtatagttttgcaattcatatactgttttctaaaactaaggtttgttcaggttgctgcaagctcagctgaatctgtgagcctgaggtctgtttcaaatttctccccaataggcgcctttatttctgaggtggttctaattcgctaggcaggcctgagcgaatacaagtttagcttgtccctgttgagtaagtagggcatgctacaatggataatttaaaagcttgatagctgggactgaatagaagaaaacgggaaacttagaccaagttctcccctgagaaatcttgttaaaacacattaagtagtcaaaatagtaatctttatcatatctgccatattaacccctttgtgtataatgaccaggcagtgttaaactgagtttttaatttgactctcctttcagctgttcacataaagcacctggcaaagcattttacctgttagggggagaaaaatgcaataatatgttaaatatattattattcagaaatgctagacaaatagtttgcaagcagatttctatattgtattacagttttgaaaacagatttggtatcattctaaagtttagctatcaagcactcaccattgtgaagaatagttgatcgactctgcttttactaacagatttaacttattcaggtttgaaattctgtttatttttaagggtaaacagggcatatctctttaataatttctattttaaaattcactttattcatgtgacatttatagtaccagagtgattatttcataccaatgaaatcttacttttcagtgactgaaaagatagaatttatttgctaataatcatttatcaacacccacctaatcatgcttcagatgatctgtgctctttcttctttgtcacgttcaagttatctgacatctaccaagaacagttcataattattaatagcccaaagagtatggttaacttcacgcagctgcttttgcagaagcactaataaaaacaaatattttgtacccta

SEQ ID NO: 1954 - DNA, 1794 bp, Homo Sapiens
  NM_003164
gggggtggggttacgtgtaggtgacgtggccgcttccagtctttggtcgggtttcggcggcttcagtgctcggggaggaggcagtgacggccggtgagattggaagtggcggcggcggcaggcggcagaggggagtccgaggttatgcgtctcaatgatcccgcggaaacgctacgggtctaagaacacggatcagggtgtctacctgggtctctcaaagacacaggtcctgtcccctgcaactgctggcagtagcagcagcgacatcgcccctctgccccccccagtgaccctcgtccctccccctcccgacaccatgtcctgccgggatcggacccaggagtttctgtctgcctgcaagtcgctgcagacccgtcagaatggaatccagacaaataagccagctttgcgtgctgtccgacaacgcagtgaattcaccctcatggccaagcgcattgggaaagaccttagcaacacatttgccaagctggagaagctgacaatcttggcaaagcgcaagtccctctttgatgataaagcagtggaaattgaagagctaacatatatcatcaaacaggacatcaatagcctcaacaaacaaattgctcagctccaggatttcgtgagagccaagggcagccagagtggccggcacctgcagacccactccaacaccattgtggtctccttgcagtcgaaactggcttctatgtccaatgacttcaaatcggttttagaagtgaggacagagaacctgaagcagcagaggagccggagagagcagttctcccgggcacctgtgtcagccctgccccttgcccctaaccacctgggcggtggtgctgtggttctgggggcagagtcccatgcctccaaggatgtcgccatcgacatgatggactctcggaccagccagcagctgcagctcattgacgagcaggattcctacatccagagtcgggcagacaccatgcagaacattgagtcgacaattgttgagttgggctccatctttcagcagttggcacacatggttaaggaacaggaggaaaccattcagaggatcgacgagaacgtgctaggagcccagctggacgttgaggccgcccattcagagatcctcaagtacttccagtctgtcacctccaaccggtggctcatggtcaaaatcttcctcatcctcattgtcttcttcatcatctttgtggtcttccttgcttgaaccctctctactctgaggcactctgttggggtttgggaccctcctgggaaggcaagtggccagtgctgccactgagcctgtgcagggtacttgggagaaaggccctgtttccctggaactgctaagaatgaccactgcccctgatcccccaccccttgcctctggccaccctgtcctccccccaccaccctcaggcctatgaaacacacagggttctagatttgaactctgctgtgaagtgactggaagggagcagaggccagctgggggccagtgggggaggttgtttccactaggagatttttataaaccctctccagcctctcccaaaggaagcgttggcagcaaagggagatgatgcccttacccaccttcctgtgagtgaagagaggaagcagccccagggaccaattttcccaattgacctctttcttcctctttcaccatgtgaggcagggagccctgagcccttcagctgcctgcacaacccctgacattggctgctggtgactcaatctgccaaatgtgctgcagctcgttttctcccaattacagcaagactgtcagcctca

SEQ ID NO: 1955 - DNA, 1499 bp, Homo Sapiens
  NM_003168
tatttacttcctgcgggtgcacaggctgtggtcgtctatctccctgttgttcttcccatcggcgaagatggccctggagacggtgccgaaggacctgcggcatctgcgggcctgtttgctgtgttcgctggtcaagactatagaccagtttgaatatgatggttgtgacaattgtgatgcatatctacaaatgaagggtaaccgagagatggtatatgactgcactagctcttcctttgatggaatcattgcgatgatgagtccagaggacagctgggtctccaagtggcagcgagtcagtaactttaagccaggtgtatatgcggtgtcagtcactggtcgcctgccccaaggaatcgtgcgggagctgaaaagtcgaggagtggcctacaaatccagagacacagctataaagacctagcaagatgcaaggctgccagcatctttgctctccacctcctgcctctgcttatttcttgttctggaactaaatgaacagaacttcaaatacttcctaccctccaattcagactcagctgactgttgagagagcagcacatcattttatcattttatcttctttggactacaggtggggtgggagggatttgggttggtggattaacagatggaattgaggagagagtaggatgctgattttcctacccgtggcccaggtctgtgccttccccatgccaaggactctaggtcaaatgtcaataaatatgaacctcgagaaagttctgaaggccatgacacctgccttgcctccctcttccattctcttaggcacagtaatagcttatttgccctataagaaccttcccagagcagcagaggcccttctactccctcttgactgtctcagcctctgggattgcagcctttgtagtgtgcttccttgcttcctatcagagggtgctgatccagaggctcagtaaccccatcaacttggtggccctggtgtctcacacttgtatccttctgccctcgagacctggcacagcagtatcccttgaagaaatcctgaggctttgtagagtgctccttgaccatgtttaataattcttccctcccctgcttgtctattttcttctcttcacggctcttcctataccttaggccagtctcaagcactcactggagacccttgggccttgggcgaccattgagtcctagtctcccttgtttgtgcccctgtaggaggtaggtccttttctcctccggcctagtaggggaccttgggtaacatcccatttttcggccaaggtgagttgttttaggataaaaaaatttaccacaaattctcatttaaatttccacagaaatcctgttcgtatccccattttgatttccctaagttccttgttctccctctaaaaagagaatgattgcaccctgcctgtttacctcaggattgttgtgattgtagaaacgaagctatgtgaaaattatataagtattataaaggtgaaatacttttgctctcaaaaaaaaaa

SEQ ID NO: 1956 - DNA, 3798 bp, Homo Sapiens
  NM_003169
gtgcagaggtggcagttccgggcgccggggaggtgtagagaacagattcggaaactggggaggtctagcatgtggcgtaggagggggtcctcactccgcttcgcgattgccaaaacgagcctgccggaagcgccctaaggggttttcttctcccagggaaccagcggggaaactgaggctcggggtggagcgcaggattgtgggacgcgccaaggctgctgtctttcccagcagcagcggaagatgtcggacagcgaggacagcaacttttccgaggaggaggacagcgagcgcagcagtgacggcgaggaggccgaggtagacgaagagcggcggagtgcagcgggcagtgagaaagaagaagagcctgaggacgaagaggaggaggaagaggaggaggaatacgatgaggaagaggaggaagaagatgatgaccgaccccccaagaaaccccgccatggaggcttcattctggacgaggctgatgttgacgatgagtatgaggacgaggaccagtgggaggatggagcagaggacattctagagaaagaagagattgaagcctccaatatcgataatgttgtcctggatgaagatcgttctggggctcgccgcctgcaaaacctctggagggaccagcgagaagaagaactgggcgagtattacatgaagaaatacgccaagtcatctgtgggagagacggtgtatggaggatctgatgagctctcagacgacatcacccagcagcagctgctcccaggagtcaaggatcccaatctgtggactgtcaaatgtaagattggggaggaacgggccacggccatttccttgatgcgcaagttcattgcctaccagttcacagacacgcccctgcagatcaagtcagtagtggcaccagagcatgtgaagggctacatctacgtggaggcctacaagcagacccacgtgaagcaggccattgagggggtgggcaacctgcggcttggctactggaaccagcagatggtgcccatcaaggagatgacagacgtgctcaaagtggtgaaggaggtggccaacctgaaaccaaagtcctgggtccgcctcaagcggggcatctacaaggatgacattgctcaggtggactacgtggagcccagccagaacaccatctccctgaagatgatcccacgcatcgactacgatcgcatcaaggcccgcatgagcttgaaagactggtttgccaaaaggaagaagtttaagcggcctccacagaggctgtttgatgctgagaagatcaggtccctggggggtgatgttgcctctgatggtgacttcctcatctttgaggggaaccgttacagccggaagggctttctgttcaagagcttcgccatgtctgctgtgatcacggagggtgtgaagccaacactctctgagctggaaaagtttgaggaccagccagagggcattgacctggaggtggtgactgagagcacagggaaggagcgggagcacaacttccaacctggggacaacgtggaggtctgtgagggtgagctcatcaacctgcagggcaagatcctcagcgtggatggcaacaagatcaccatcatgcccaagcatgaggacctcaaggacatgttggagttcccagcccaggaacttagaaaatacttcaagatgggggaccacgtgaaggtgattgctggccgattcgagggcgacacaggcctcattgtgcgggtggaggagaatttcgttatcctgttctctgacctcaccatgcatgagctgaaggtgctcccccgggacctgcagctctgctcagagacagcatcaggtgtggatgttgggggccagcatgaatggggcgagctggtgcagctggatccccagactgtgggtgtcatcgtgcgactagaacgggagaccttccaggtgctgaacatgtacgggaaggtggtgactgtcagacatcaggctgtgacccggaagaaggacaaccgctttgctgtggccttggactcagagcagaacaacatccatgtgaaagacatcgttaaggtcattgatggcccccactcaggccgagaaggggagattcgccatctcttccgaagcttcgccttcctacattgcaagaaactggtggagaacgggggcatgtttgtctgcaagacccgccacctggtgctggctgggggctcaaagccccgtgatgtgaccaacttcaccgtgggtggctttgcgcctatgagtccccggatcagcagccccatgcaccccagtgctggaggtcagcgtggcggctttggtagcccaggtggcggcagtggtggcatgagcaggggccggggccggagggacaacgaactcatcggccagaccgtgcgcatctcccaggggccctacaaaggctacatcggtgtggtgaaagatgccacagagtccacggcccgtgtggagctgcactccacctgccagaccatctctgtggaccgtcagcggctcaccacggtgggctcacggcgcccgggcggcatgacctcgacctatgggaggacgcccatgtatggctcccagacgcccatgtatggctctggctcccgaacacccatgtacggctcacagacacccctccaggatggtagccgcaccccacactacggctcacagacgcccctgcatgatggcagccgcactcctgcccagagtggggcctgggaccccaacaaccccaacacgccgtcacgggctgaggaagaatatgagtatgctttcgatgatgagcccaccccgtccccgcaggcctatgggggaacccccaatccccaaacacctggctacccagacccctcgtccccacaggtcaacccacaatacaacccgcagacgccagggacgccggccatgtacaacacagaccagttctctccctatgctgccccctccccacaaggttcctaccagcccagccccagcccccagagctaccaccaggtggcgccaagcccagcaggctaccagaatacccactccccagccagctaccaccctacaccgtcgcccatggcctatcaggctagccccagcccgagccccgttggctacagtcctatgacacctggagctccctcccctggtggctacaacccacacacgccaggctcaggcatcgagcagaactccagcgactgggtaaccactgacattcaggtgaaggtgcgggacacctacctggatacacaggtggtgggacagacaggtgtcatccgcagtgtcacggggggcatgtgctctgtgtacctgaaggacagtgagaaggttgtcagcatttccagtgagcacctggagcctatcacccccaccaagaacaacaaggtgaaagtgatcctgggcgaggatcgggaagccacgggcgtcctactgagcattgatggtgaggatggcattgtccgtatggaccttgatgagcagctcaagatcctcaacctccgcttcctggggaagctcctggaagcctgaagcaggcagggccggtggacttcgtcggatgaagagtgatcctccttccttccctggcccttggctgtgacacaagatcctcctgcagggctaggcggattgttctggatttccttttgtttttccttttagttttccatcttttccctccctggtgctcattggaatctgagtagagtctgggggagggtccccaccttcctgtacctcctccccacagcttgcttttgttgtaccgtctttcaataaaaagaagctgtttggtctaaaaaaaaaaaaaaaaaaaaaaaa

SEQ ID NO: 1957 - DNA, 2490 bp, Homo Sapiens
  NM_003171
actgtccgccgccgtgtccgcggctgcgccagacagtgtagaacctgcggcctcgatgtccttctcccgtgccctattgtgggctcggctcccggcggggcgccaggctggccaccgggcagccatctgctctgcccttcgtccccactttgggccctttcccggggttctggggcaagtttctgtccttgccaccgcctcctcctctgcctccggtggctccaaaataccaaacacgtccttgttcgtgcccctgactgtgaaacctcagggccccagcgccgacggcgacgtcggggccgagctaacccggcctctggacaagaatgaagtaaagaaggtcttagacaaattttacaagaggaaagaaattcagaaactgggtgctgattatggacttgatgctcgtctcttccaccaagctttcataagctttagaaattatattatgcagtctcattccctggatgtggacattcacattgttttgaatgatatttgcttcggtgcagctcatgcggatgatttattcccatttttcttgagacatgccaaacaaatatttcctgtgttggactgtaaggatgatctacgtaaaatcagtgacttaagaataccacctaactggtacccagatgctagagccatgcagcggaagataatatttcattcaggccccacaaacagtggaaagacttatcacgcaatccagaaatacttctcagcaaagtctggagtgtattgtggccctctaaaattactggcacatgagatcttcgaaaagagtaatgctgctggtgtgccatgtgacttggtgacaggtgaagagcgtgtgacagttcagccaaatgggaaacaggcttcacatgtttcttgtacagttgagatgtgcagtgttacaactccttatgaagtggctgtaattgatgaaattcaaatgattagagatccagccagaggatgggcctggaccagagcacttctaggactgtgtgctgaagaggttcatttgtgtggagaacctgctgctattgacctggtgatggagcttatgtacacaacgggggaggaagtggaggttcgagactataagaggcttacccccatttctgtgctggaccatgcactagaatctttagataaccttcggcctggggactgcattgtctgttttagcaagaatgatatttattctgtgagtcggcagattgaaattcggggattagaatcagctgttatatatggcagtctcccacctgggaccaaacttgctcaagcaaaaaagtttaatgatcccaatgacccatgcaaaatcttggttgctacagatgcaattggcatgggacttaatttgagcataaggagaattattttttactcccttataaagcccagtatcaatgaaaagggagagagagaactagaaccaatcacaacctctcaagccctgcagattgctggcagagctggcagattcagctcacggtttaaagaaggagaggttacaacaatgaatcatgaagatctcagtttattaaaggaaattttgaagaggcctgtggatcctataagggcagctggtcttcatccaactgctgagcagattgaaatgtttgcctaccatctccctgatgcaacactgtccaatctcattgatatttttgtagacttttcacaagttgatgggcagtattttgtctgcaatatggatgattttaaattttctgcagagttgatccagcatattccactaagtctgcgagtgaggtatgttttctgcacagctcctatcaacaagaagcagccttttgtgtgttcttcactgttacagtttgccaggcagtatagcaggaatgagcccctgacctttgcatggttacgccgatacatcaaatggcctttacttccacctaagaatattaaagacctcatggatcttgaagctgtccacgatgtcttggatctttacttgtggctaagctaccgatttatggatatgtttccagatgccagccttattcgagatctccagaaagaactagatggtattatccaagatggtgtgcacaatatcactaaattgattaaaatgtctgagacgcataagctgttgaatttggagggctttccatcagggagccagtcacgattgtcaggaaccttaaagagccaagctagaaggacacgcggcaccaaagctctagggagtaaagctactgagccacccagccccgatgcaggagagctgtcccttgcttccagattggtgcagcaaggactcctcactccagacatgctgaaacagctagaaaaagagtggatgacacaacaaactgaacacaacaaagaaaaaacagagtctgggactcatccaaaagggacgagaagaaagaagaaggaacctgattcggactagttttctgttcctgtttttttttttttatttaattttgcaaataaaaatttattttgaagaaaaaaaaaaaaaaa

SEQ ID NO: 1958 - DNA, 2745 bp, Homo Sapiens
  NM_003173
ctcgcgaggccggctaggcccgaatgtcgttagccgtggggaaagatggcggaaaatttaaaaggctgcagcgtgtgttgcaagtcttcttggaatcagctgcaggacctgtgccgcctggccaagctctcctgccctgccctcggtatctctaagaggaacctctatgactttgaagtcgagtacctgtgcgattacaagaagatccgcgaacaggaatattacctggtgaaatggcgtggatatccagactcagagagcacctgggagccacggcagaatctcaagtgtgtgcgtatcctcaagcagttccacaaggacttagaaagggagctgctccggcggcaccaccggtcaaagaccccccggcacctggacccaagcttggccaactacctggtgcagaaggccaagcagaggcgggcgctccgtcgctgggagcaggagctcaatgccaagcgcagccatctgggacgcatcactgtagagaatgaggtggacctggacggccctccgcgggccttcgtgtacatcaatgagtaccgtgttggtgagggcatcaccctcaaccaggtggctgtgggctgcgagtgccaggactgtctgtgggcacccactggaggctgctgcccgggggcgtcactgcacaagtttgcctacaatgaccagggccaggtgcggcttcgagccgggctgcccatctacgagtgcaactcccgctgccgctgcggctatgactgcccaaatcgtgtggtacagaagggtatccgatatgacctctgcatcttccgcacggatgatgggcgtggctggggcgtccgcaccctggagaagattcgcaagaacagcttcgtcatggagtacgtgggagagatcattacctcagaggaggcagagcggcggggccagatctacgaccgtcagggcgccacctacctctttgacctggactacgtggaggacgtgtacaccgtggatgccgcctactatggcaacatctcccactttgtcaaccacagttgtgaccccaacctgcaggtgtacaacgtcttcatagacaaccttgacgagcggctgccccgcatcgctttctttgccacaagaaccatccgggcaggcgaggagctcacctttgattacaacatgcaagtggaccccgtggacatggagagcacccgcatggactccaactttggcctggctgggctccctggctcccctaagaagcgggtccgtattgaatgcaagtgtgggactgagtcctgccgcaaatacctcttctagcccttagaagtctgaggccagactgactgagggggcctgaagctacatgcacctcccccactgctgccctcctgtcgagaatgactgccagggcctcgcctgcctccacctgcccccacctgctcctacctgctctacgttcagggctgtggccgtggtgaggaccgactccaggagtcccctttccctgtcccagccccatctgtgggttgcacttacaaacccccacccaccttcagaaatagtttttcaacatcaagactctctgtcgttgggattcatggcctattaaggaggtccaaggggtgagtcccaacccagccccagaatatatttgtttttgcacctgcttctgcctggagattgaggggtctgctgcaggcctcctccctgctgccccaaaggtatggggaagcaaccccagagcaggcagacatcagaggccagagtgcctagcccgacatgaagctggttccccaaccacagaaactttgtactagtgaaagaaagggggtccctgggctacgggctgaggctggtttctgctcgtgcttacagtgctgggtagtgttggccctaagagctgtagggtctcttcttcagggctgcatatctgagaagtggatgcccacatgccactggaagggaagtgggtgtccatgggccactgagcagtgagaggaaggcagtgcagagctggccagccctggaggtaggctgggaccaagctctgccttcacagtgcagtgaaggtacctagggctcttgggagctctgcggttgctaggggccctgacctggggtgtcatgaccgctgacaccactcagagctggaaccaagatctagatagtccgtagatagcacttaggacaagaatgtgcattgatggggtggtgatgaggtgccaggcactgggtagagcacctggtccacgtggattgtctcagggaagccttgaaaaccacggaggtggatgccaggaaagggcccatgtggcagaaggcaaagtacaggccaagaattgggggtgggggagatggcttccccactatgggatgacgaggcgagagggaagcccttgctgcctgccattcccagaccccagccctttgtgctcaccctggttccactggtctcaaaagtcacctgcctacaaatgtacaaaaggcgaaggttctgatggctgccttgctccttgctcccccaccccctgtgaggacttctctaggaagtccttcctgactacctgtgcccagagtgcccctacatgagactgtatgccctgctatcagatgccagatctatgtgtctgtctgtgtgtccatcccgccgaccccccagactaacctccaggcatggactgaatctggttctcctcttgtacacccctcaaccctatgcagcctggagtgggcatcaataaaatgaactgtcgactgaacaaaaaaaaaaaaaaaaaa

SEQ ID NO: 1959 - DNA, 6725 bp, Homo Sapiens
  NM_003174
tcggcgggaagcggcgatcctgccaccgggaggtgtggaagagccgggtagattctggctacattggagattggttgctttctaaaactgaaggagaagcccatgaagagatggtggattctcactgagttttgactagcggaagaaaagagagagttcaagtggatggccttgaggacttgaaaagctgagatatgatgattttgaagtcatttcacatcgaagccatgatttaaatatcggcgttaagatttcaacaagaaaaacttaagcttccttggattcccacgtcaaaggaaagtttcaagctttcagaaggagttctcactcgaagataaagaacagctcgctaaccacgaaagaggaatcgatgctcagcttttagttgcacttcctaaagttgcagaattaagacaaatctttgaaccaaagaagaaagaattcttagaaatgaaaagaaaagaaagaattgccaggcgcctggaagggattgaaaatgacactcagcccatcctcttgcagagctgcacaggattggtgactcaccgcctgctggaggaagacacccctcgatacatgagagccagcgaccctgccagcccccacatcggccgatcaaatgaagaggaggaaacttctgattcttctctagaaaagcaaactcgatccaaatactgcacagaaacctccggtgtccacggtgactcaccctatggttcgggtaccatggacacccacagtctggagtccaaagccgaaagaattgcaaggtacaaagcagaaagaaggcgacagctggcagagaagtatgggctgactctggatcccgaggccgactccgagtatttatcccgctataccaagtccaggaaggagcctgatgctgtcgagaagcggggaggaaaaagtgacaaacaggaagagtcaagcagagatgctagttctctgtaccccgggaccgagacgatggggctcaggacctgtgccggtgaatccaaggactatgccctccatgtgggtgacggctcttccgacccggaggtgctgctgaacatagaaaaccaaagacgaggtcaagagctgagtgccacccggcaggcccatgacctgtccccagcagccgagagttcctcgaccttctctttctctgggcgagactcctccttcactgaagtgccacggtcccccaagcacgcccacagctcctccctgcagcaggcagcctcccggagcccctcctttggtgacccacagctatcccctgaggcccgacccaggtgcacttcacattcagaaacgccaactgtcgatgatgaagaaaaggtggatgaacgagccaagctgagcgtcgccgccaagaggttgcttttcagggagatggaaaaatcttttgatgaacaaaatgttccaaagcgacgctcaagaaacacagctgtggagcagaggctacgccgtctgcaggacaggtccctcacccagcccatcaccactgaagaggtggtcatcgcagccacattgcaggcctctgctcaccaaaaggccttagccaaggaccagacaaatgagggcaaagagcttgctgagcaaggagaacctgattcctccactctaagcttggccgaaaagttggccttgtttaacaaattgtcccagccagtctcaaaagcgatttctacccggaacagaatagacacgagacagaggagaatgaacgctcgctatcaaactcagccagtcacactgggagaggtggagcaggtgcagagtggaaagctcattcctttctcacctgccgtgaacacatcagtgtctaccgtagcatccacggttgctccaatgtatgccggagatcttcgcacaaagccacctcttgaccacaatgcaagtgccactgactataagttttcttcttcaatagaaaattcggactctccagttagaagcattctgaaatcgcaagcttggcagcctttggtagagggtagcgagaacaagggaatgttgagagaatatggagagacagaaagcaagagagctttgacaggtcgagacagtgggatggagaagtatgggtcctttgaggaagcagaagcatcctaccccatcctgaaccgagccagggaaggagacagccataaggaatctaaatatgctgttcccagaagaggaagcctggaacgggcgaaccctcccatcacccacctcggggatgaaccgaaggaattttccatggctaaaatgaatgcacaaggaaacttggacttgagggacaggctgccctttgaagagaaggtggaggtggagaatgttatgaaaaggaagttttcactaagagcggcagagttcggggagcccacttccgagcagacggggacagctgctgggaaaactattgctcaaaccacagcccccgtgtcctggaagccccaggattcttcggaacagccacaggagaagctctgcaagaatccatgtgcgatgtttgctgctggagagatcaaaacgccgacaggggagggccttcttgactcacccagcaaaaccatgtctattaaagaaagattggcactgttgaagaaaagcggggaggaagattggagaaacagactcagcaggaggcaggagggcggcaaggcgccggccagcagcctgcacacccaggaagcagggcggtccctcatcaagaagcgggtcacagaaagtcgagagagccaaatgacgattgaggagaggaagcagctcatcactgtgagagaggaggcctggaagacgagaggcagaggagcggccaacgactcgacccagttcactgtggctggcaggatggtgaagaaaggtttggcgtcacctactgccataaccccagtagcctcacccatttgcggtaaaacaagaggcaccacacccgtttccaaacccctggaagatatcgaagccagaccagatatgcagttagaatcggacctgaagttggacaggctggaaacctttctaagaaggctgaataacaaagttggcgggatgcacgaaacggtgctcactgtcaccggcaaatctgtgaaggaggtgatgaagccagatgatgatgaaacctttgccaaattttaccgcagcgtggattataatatgccaagaagtcctgtggagatggatgaggacttcgatgtcattttcgatccttatgcacccaaattgacgtcttccgtggccgagcacaagcgggcagttaggcccaagcgccgggttcaggcctccaaaaaccccctgaaaatgctggcggcaagagaagatctccttcaggaatacactgagcagagattaaacgttgccttcatggagtcaaagcggatgaaagtagaaaagatgtcttccaactccaacttctcagaagtcaccctggcgggtttagccagtaaagaaaacttcagcaacgtcagcctgcggagcgtcaacctgacggaacagaactctaacaacagcgccgtgccctacaagaggctgatgctgttgcagattaaaggaagaagacatgtgcagaccaggctggtggaacctcgagcttcggcgctcaacagtggggactgcttcctcctgctctctccccactgctgcttcctgtgggtaggagagtttgcaaacgtcatagaaaaggcgaaggcctcagaacttgcaactttaattcagacaaagagggaacttggttgtagagctacttatatccaaaccattgaagaaggaattaatacacacactcatgcagccaaagacttctggaagcttctgggtggccaaaccagttaccaatctgctggagacccaaaagaagatgaactctatgaagcagccataatagaaactaactgcatttaccgtctcatggatgacaaacttgttcctgatgacgactactgggggaaaattccgaagtgctcccttctgcaacccaaagaggtactggtgtttgattttggtagtgaagtttacgtatggcatgggaaagaagtcacattagcacaacgaaaaatagcatttcagctggcaaagcacttatggaatggaacctttgactatgagaactgtgacatcaatcccctggatcctggagaatgcaatccgcttatccccagaaaaggacaggggcggcccgactgggcgatatttgggagacttactgaacacaatgagacgattttgttcaaagagaagtttctggattggacggaactgaagagatcgaatgagaagaaccccggggaacttgcccagcacaaggaagaccccaggactgatgtcaaggcatacgatgtgacacggatggtgtccatgccccagacgacagcaggcaccatcctggacggagtgaacgtcggccgtggctatggcctggtggaaggacacgacaggaggcagtttgagatcaccagcgtttccgtggatgtctggcacatcctggaattcgactatagcaggctccccaaacaaagcatcgggcagttccatgagggggatgcctatgtggtcaagtggaagttcatggtgagcacggcagtgggaagtcgccagaagggagagcactcggtgagggcagccggcaaagagaagtgcgtctacttcttctggcaaggccggcactccaccgtgagtgagaagggcacgtcggcgctgatgacggtggagctggacgaggaaaggggggcccaggtccaggttctccagggaaaggagcccccctgtttcctgcagtgtttccagggggggatggtggtgcactcggggaggcgggaagaggaagaagaaaatgtgcaaagtgagtggcggctgtactgcgtgcgtggagaggtgcccgtggaagggaatttgctggaagtggcctgtcactgtagcagcctgaggtccagaacttccatggtggtgcttaacgtcaacaaggccctcatctacctgtggcacggatgcaaagcccaggcccacacgaaggaggtcggaaggaccgctgcgaacaagatcaaggaacaatgtcccctggaagcaggactgcatagtagcagcaaagtcacaatacacgagtgtgatgaaggctccgagccactcggattctgggatgccttaggaaggagagacaggaaagcctacgattgcatgcttcaagatcctggaagttttaacttcgcgccccgcctgttcatcctcagcagctcctctggggattttgcagccacagagtttgtgtaccctgcccgagccccctctgtggtcagttccatgcccttcctgcaggaagatctgtacagcgcgccccagccagcacttttccttgttgacaatcaccacgaggtgtacctctggcaaggctggtggcccatcgagaacaagatcactggttccgcccgcatccgctgggcctccgaccggaagagtgcgatggagactgtgctccagtactgcaaaggaaaaaatctcaagaaaccagcccccaagtcttaccttatccacgctggtctggagcccctgacattcaccaatatgtttcccagctgggagcacagagaggacatcgctgagatcacagagatggacacggaagtttccaatcagatcaccctcgtggaagacgtcttagccaagctctgtaaaaccatttacccgctggccgacctcctggccaggccactcccggagggggtcgatcctctgaagcttgagatctatctcaccgacgaagacttcgagtttgcactagacatgacgagggatgaatacaacgccctgcccgcctggaagcaggtgaacctgaagaaagcaaaaggcctgttctgagtggggagacgccagaggagcctcacggtcacgtccaacaacaccactgcaccagggaaatggatatatatttttggactggtgtttttcacaaagtatttttcaatcagagttttcagaacctgacattgttaaagatactgcttgtcccggagttgtgtattttgtaaatgttcaagggaactgtttggaaacttctttccaccattcaggaggttatcagaattaataaaagtatctgttatgtgcacttaagccgcagctgctatagatagcactgccttcttgttccagctaggcaatgccttttttttttttttttgaagcagttctctttataaagtgttattttgatagtttgtggattctaaaatatatatatatttatataaacaccatataagtcaaatatgtatttaacaaagcaatatgtattcattcactttcaagatttgttttggtgtcaaaataacatgaaaaggtagatggagttgcttctgttgaattagctctgccaccaatatgtatcttcatacacgtttggaaatgtttcctgcagcattaggtatgacttgttctgagtactgcttccggtgctaaaatgaacaaagaatttgtacttaatggcatggactctggagaatctatgcgaatcaacctttctaccttaatatctccccaaaaatgtatagtgccttgtttttatgtacagtttatatacagaaaagtttgctctgcatttttgatgatggtttggaacattatctacaattttactctcaaatagtcaaaataaaaacatctcaatttctaataccggttgtaaacagtacacatgtcattttgtgatataggactcccaaataaaagtatcagaataaacacaacaattaactggtaaaaaaaaa

SEQ ID NO: 1960 - DNA, 5079 bp, Homo Sapiens
  NM_003177
acactgggaggaagtgcgggccgcctgcccgggcgcgttaaggaagttgcccaaaatgaggaagagccgcgggcccggcggctgaggccaccccggcggcggctggagagcgaggaggagcgggtggccccgcgctgcgcccgccctcgcctcacctggcgcaggtggacacctgcgcaggtgtgtgccctccggcccctgaagcatggccagcagcggcatggctgacagcgccaaccacctgcccttctttttcggcaacatcacccgggaggaggcagaagattacctggtccaggggggcatgagtgatgggctttatttgctgcgccagagccgcaactacctgggtggcttcgccctgtccgtggcccacgggaggaaggcacaccactacaccatcgagcgggagctgaatggcacctacgccatcgccggtggcaggacccatgccagccccgccgacctctgccactaccactcccaggagtctgatggcctggtctgcctcctcaagaagcccttcaaccggccccaaggggtgcagcccaagactgggccctttgaggatttgaaggaaaacctcatcagggaatatgtgaagcagacatggaacctgcagggtcaggctctggagcaggccatcatcagtcagaagcctcagctggagaagctgatcgctaccacagcccatgaaaaaatgccttggttccatggaaaaatctctcgggaagaatctgagcaaattgtcctgataggatcaaagacaaatggaaagttcctgatccgagccagagacaacaacggctcctacgccctgtgcctgctgcacgaagggaaggtgctgcactatcgcatcgacaaagacaagacagggaagctctccatccccgagggaaagaagttcgacacgctctggcagctagtcgagcattattcttataaagcagatggtttgttaagagttcttactgtcccatgtcaaaaaatcggcacacagggaaatgttaattttggaggccgtccacaacttccaggttcccatcctgcgacttggtcagcgggtggaataatctcaagaatcaaatcatactccttcccaaagcctggccacagaaagtcctcccctgcccaagggaaccggcaagagagtactgtgtcattcaatccgtatgagccagaacttgcaccctgggctgcagacaaaggcccccagagagaagccctacccatggacacagaggtgtacgagagcccctacgcggaccccgaggagatcaggcccaaggaggtttacctggaccgaaagctgctgacgctggaagacaaagaactgggctctggtaattttggaactgtgaaaaagggctactaccaaatgaaaaaagttgtgaaaaccgtggctgtgaaaatactgaaaaacgaggccaatgaccccgctcttaaagatgagttattagcagaagcaaatgtcatgcagcagctggacaacccgtacatcgtgcggatgatcgggatatgcgaggccgagtcctggatgctggttatggagatggcagaacttggtcccctcaataagtatttgcagcagaacagacatgtcaaggataagaacatcatagaactggttcatcaggtttccatgggcatgaagtacttggaggagagcaattttgtgcacagagatctggctgcaagaaatgtgttgctagttacccaacattacgccaagatcagtgatttcggactttccaaagcactgcgtgctgatgaaaactactacaaggcccagacccatggaaagtggcctgtcaagtggtacgctccggaatgcatcaactactacaagttctccagcaaaagcgatgtctggagctttggagtgttgatgtgggaagcattctcctatgggcagaagccatatcgagggatgaaaggaagtgaagtcaccgctatgttagagaaaggagagcggatggggtgccctgcagggtgtccaagagagatgtacgatctcatgaatctgtgctggacatacgatgtggaaaacaggcccggattcgcagcagtggaactgcggctgcgcaattactactatgacgtggtgaactaaccgctcccgcacctgtcggtggctgcctttgatcacaggagcaatcacaggaaaatgtatccagaggaattgattgtcagccacctccctctgccagtcgggagagccaggcttggatggaacatgcccacaacttgtcacccaaagcctgtcccaggactcaccctccacaaagcaaaggcagtcccgggagaaaagacggatggcaggatccaaggggctagctggatttgtttgttttcttgtctgtgtgattttcatacaggttatttttacgatctgtttccaaatccctttcatgtctttccacttctctgggtcccggggtgcatttgttactcatcgggcccagggacattgcagagtggcctagagcactctcaccccaagcggccttttccaaatgcccaaggatgccttagcatgtgactcctgaagggaaggcaaaggcagaggaatttggctgcttctacggccatgagactgatccctggccactgaaaagctttcctgacaataaaaatgttttgaggctttaaaaagaaaatcaagtttgaccagtgcagtttctaagcatgtagccagttaaggaaagaaagaaagaaaaaaaaaaaaggcctggatactgcttttgctgtctctgttatgagatggaagacttacatgtttgtgataaaaggggaccatgagaatgaattggcttggcttactttccccctgaaatcctctctcctgcagactgtcttgaagacctggtgactggtaaataaagccctgcatggaggctgcacagcaggggcaagaggcccatcccccagcatctcactgaggacagcttcaggctgccttcctctgaacgtggtccacaccttcctctcctccacagagagggtgccgccagaatcccctgtcgctttctgtgtctgcaatggggggcagcacagggatcaaagccatctaaagagtttccaaagaaagtattaattcagaacaagccaaagaccctgagcctcaccacaaacaggccttttggagtgtgaatttgagttgaagatacaagatcggagaatgattttctggtcttaactaatcctcatcttcatgtttgatctttaagaagtcatcacccattgatttcagttttgctgtacctcttgaaagttaaagagacatctcagcactttaggaggccgaggcgggtggatcacttgaggtaaggagtttgagactagcctggccaatatggtaaaaccccatctctactaaaaatacaaaaattagccgggcatggtggcatgtgtctgtagtcccagctactcgggaggctgaggcaggagaatcgcttgaacccaggaaacggaggtcgcagtgagccaagatcatgccactgcactccagcttgggcatcacagcgagactctgtcaaaacaaacaaacaaaaaaacaacttaaagaggtaatttagccatcattcttatgccagcagatataaataaacttggacccatctggtcttcagctaaacctgagacattttaaagtgcatggacagccatggacagcaggccctcctctaacaggggatgcaaggcatggagaaagacaatcagtacccaagctcagccacagaagacaggagtcactcatataacttgtgtttagaagtttttggtagccacgcacactttctgaaatcacactatctggtggtttaatcatatttttaaagacagaatccctgagtgctgagcagattctcaaaacacatttagaatccctgaaattagaaagatcaatgacaaaatatctgtcagccaggccacaaacaggtgtaaaattatgaaaggagtggttggatgtgccaagtttggtaaagtggtgactgcatctgagaaagaggctgtgaggctgaactcttggtggcttccttctgtaacttccagagggagtcttcaacacaggccccgtgctcgtaggaatacggtagcacctatgtaggaagtgcgtggagttttctgtcttctttctgtgtgatttttggcctttttatcagcacttctcccctcccaggagcctggggatgccaaacatccagaatgtgatgggacaagatgggggcaggggcctcacctccctgcagaggtccggccaggtctccttgtccctggacaatctcctgagcctctctgcttggtggagcaggcacctgtgtgcagaattcccactgtggccagcacgaggaagtcttttctagtgaaaatgtgtcttgtggtcaggaataattatcctttcccctgtagccaccaaggagggcaaatagagaaaggtaacctaattgaaggattggtcatgtgaaaagggctacatttgggaagctgggaaaggcctccaggcttctagagcagctagcttgggctggattctcatacccaggctgccccttggattgttctacccaagcttttccctggggtctgggctcactccataaggtaaggtgccttttaccttatggtccttctttagcaggtaacaaaggagcatcaggggcaggctgccctggtggcatcacactggctagtgaggccgtgaatatcttgtcccccagcagggccgacagtttctatcacagaaaacagtgtgttcagtggtgaaaatcgttgcatgcatgttttcatctgagcgtgtccttctcccatactccctatcagccagccctgcctgtagctgctgtatggtgattgcacttggacatcagtccaatgactgcaagtcggcctggattttcacttgcagaggctacagctgcattgtcaggtctcccagccctgcagagagctccctccactggttagcagtgtgttgtgttttccattcatttcagaagagctacattgtgtcactggacatttttaaaaactgtgatttttaataaaaatttaaaatttgctttgtgatgaaaaaaa

SEQ ID NO: 1961 - DNA, 5049 bp, Homo Sapiens
  NM_003184
acagacaagatgtcggcggatggtagcttcgagcccttgcggagaggagcatctctgtgacagaagcttgtcgacggcggcttctaggagctagtcgaaggagcgaggttgaggcgggcagcgacccgtcaggtcgctcacctgggcaccggccagctgcgagacgtgacttggggaccgcaggggagtggagagtgtgaggtgccaaagactagtaatgccccgtatccccctaggaagccgggaagccaagctccgcgggaccgcttcatgccgctgactggtgtagagcccgccagaatgaacaggaagaaaggagacaagggctttgaaagcccaaggccatataaattaacccatcaggtcgtctgcatcaacaacataaatttccagagaaaatctgttgtgggatttgtggaactgactatatttcccacagttgcaaacttgaatagaatcaagttgaacagcaaacagtgtagaatataccgagtaaggatcaatgatttagaggctgcttttatttataatgacccaaccttggaagtttgtcacagtgaatcaaaacagagaaacctcaattatttttccaatgcttatgcagctgcagttagtgctgtggaccctgatgcaggaaatggagaactttgcattaaggttccatcagagctatggaaacacgttgatgagttaaaggtcctgaagatacacatcaatttttctttggatcagcccaaaggaggtcttcattttgtggtacccagtgtagagggaagtatggcagagagaggtgctcatgttttctcttgtgggtatcaaaattctacaagattttggttcccttgtgttgattcatactctgaattgtgtacatggaaattagaatttacagtagatgctgcaatggttgctgtttctaatggcgatttggtggagacagtgtatactcatgatatgaggaagaaaactttccattatatgcttaccattcctacagcagcgtcaaatatctccttggccattggaccatttgaaatactggtagatccatacatgcatgaggttactcatttttgtttgccccaacttcttccattgctgaaacataccacatcataccttcatgaagtctttgaattttatgaagaaattcttacatgtcgttacccatactcctgttttaagactgtcttcattgatgaggcttatgttgaagtggctgcttatgcttccatgagcatttttagcacaaatcttttacacagtgccatgattatagatgagacacctttgactagaaggtgtttagcccaatccttggcccagcagttttttggttgtttcatatctagaatgtcttggtctgatgaatgggtgctgaagggaatttcaggctatatctatggactttggatgaaaaaaacttttggtgttaatgagtaccgccattggattaaagaggagctagacaaaatagtggcatatgaactaaaaactggtggggttttactacatcccatatttggtggaggaaaagagaaggataatccggcttcccatctacacttttcaataaagcatccacatacactgtcctgggaatactacactatgtttcagtgtaaagcccaccttgtgatgagattgattgaaaataggatcagtatggaatttatgctacaagttttcaataaactgctaagtctggctagtactgcttcatctcagaagttccagtcacatatgtggagtcagatgttggtttccacatctgggtttttgaaatccatttcaaatgtctctggcaaagatattcagccgttaataaagcagtgggtagatcagagtggagtggtaaaattttatggaagttttgcatttaatagaaaacgaaatgtcttggaactggaaataaaacaggactatacatctcctggaactcagaaatacgtgggaccacttaaagtgacagtgcaggagttagatggatccttcaatcatacactgcaaattgaagaaaacagccttaaacatgatataccctgccattccaaaagtagaaggaataaaaagaaaaaaatcccactgatgaatggagaagaagttgatatggatctttctgcaatggatgctgattcccctttgctgtggataaggatagacccagatatgtcagtattgaggaaggtagaatttgagcaagctgattttatgtggcagtatcagctccgctatgagagagatgttgttgcacagcaggaatccattttggctttggaaaaattccctactccagcatctcggcttgcactcactgatatattagaacaagagcagtgtttctacagagtaagaatgtcagcttgcttctgtcttgcaaagattgcaaattcaatggtgagcacatggacaggaccaccagccatgaagtcactcttcactaggatgttttgttgtaaaagttgtccaaacattgtgaaaacaaacaactttatgagctttcaaagctattttctacagaagactatgccagttgcaatggctttattaagagatgttcataatctttgtcctaaagaagtcttaacatttattttagacttaatcaagtacaatgacaacaggaaaaataagttttcagataactattatcgtgcagaaatgattgatgccctggccaactctgttacacctgcagtcagtgtgaataatgaagttagaactttggataacttaaatcctgatgtgcgactcattcttgaagaaatcaccagatttttgaatatggaaaaacttcttccgagttacaggcataccatcactgtcagttgtttgagagccatacgggtacttcagaagaacggacatgtgccaagtgatccagctctttttaaatcttatgctgaatatggccactttgtggacattaggatagcagctttggaagcagttgttgattatactaaagtggacagaagttatgaagaactgcaatggctacttaatatgattcagaatgaccctgtaccctatgtaaggcataagattctcaacatgttgactaagaacccaccatttactaagaacatggagtctcccttatgcaatgaagccctggtagatcaactttggaaacttatgaattctggtacttcacatgactggaggttacggtgtggtgctgtggacttgtacttcacactttttggcctcagtagaccttcctgtttacccttgccagagcttgggttggttcttaatctaaaggagaaaaaagctgtcttgaatcctaccataattccagagtcagtagcaggcaaccaagaagctgcaaataatccaagcagtcacccacagctagttggatttcagaaccctttttccagttctcaagatgaggaggagattgatatggatactgttcatgatagccaggccttcatttcccatcatttaaacatgcttgaaaggccgtcaactccagggctctcgaaatatcggccagctagctcccgatctgctttaataccccagcactcagcaggctgtgacagcacacccaccacaaaaccccagtggagtttggaacttgcacggaagggaacaggtaaagaacaagcacctttggagatgagtatgcatccagcggcaagcgctccactctcagtctttactaaggaatctacagcctccaaacacagtgaccaccatcaccaccatcaccatgagcacaagaaaaagaagaagaagcataaacataagcacaaacacaagcataagcatgacagtaaagaaaaggacaaggagcctttcactttctccagccctgccagtggcaggtctattcgttctccttccctttcagactgagaaggggacaaaaagacctttcctttcatgtccagaagaatgtatgtaactaaagctttgtcctctgtgaagaattataaaagggaggggggaaaggattcgcctctcctacagaaattctgaattcatttaagttctaagcatttgatttatgttatttatacagttgggatctaattaggaaaatgtgttttgtagttctggataaactatttcatccgctgtttcctccccaaaacacacacacagagcaaactccctttcataaaagccctcatatccactggcagtccccgttcgcatcatggtctccatgtgtaccgccaaagtcaattatgtttgaaagcctttggtggatgttatggggcaaagttatgatttacacagaagcaactgccaaatctgtggtgcaaccactatctccagtgaaatattgtataacaccatttggaactactgaaaagacagtggcttttctacagtactcttccttattgcaccatttttgtattaacgtagaaactaagcatcagaatttatgaacaaagaatatgttatttttccttttgctctaaaatactgagatttggggaagcaattcttttttaaaaaaattttgaataactatcttttgataacacattcggcggttacgatgttggaatttagcagaactatcaaatccaaaattattttcaaatcaagatgtttaaattataagtttttttgttttgttttccagtaagtataaatgaaaatattcatatgtaaaatatgttttgcttaatgtggacaatttacacacccaacacatactgtttccaaaattatttctatatgacacaaagtatgatacctttaaaaaggtgagcttatatattgtttattaacctggaaatagacaatttggctctcataccataagcatttaaaaacatatgaaatattttgatttctttatatggtggtgtgtttttatttctgaattttccatgtgctttaatatttgtttaagaatattttttatatctgttcaatttttatcattccccttatcattagaaagtttgacaaaaatacttgaatcttggacctctaaatatacttttagttgtgtttaacttgtttaataaataactttttaagttgaaaaaaaaaaaaaaaaaaaaaaaaaaaaaa

SEQ ID NO: 1962 - DNA, 4647 bp, Homo Sapiens
  NM_003185
atggcggcgggctcggatctgctggacgaggtcttcttcaacagcgaggtggacgagaaagtggtgagcgacctggtgggctcgctggagtcgcagctggcggccagcgcggcccaccaccaccacctcgcgccgcgcacgcccgaggtgcgggccgcggccgccggcgcgctcgggaaccatgttgtgagcggcagcccggccggagccgcgggcgcagggccggccgcccccgccgagggcgcgcccggagcggcgccggagccgccccccgcaggtagagcgcggccggggggcggggggccgcagcgcccgggccccccctcaccgcgccgcccccttgtccccgcagggcccgcgccgcccgccgcgaagctgaggccgccgcccgagggcagcgcggggtcctgcgccccggtgcccgccgccgccgccgtcgccgcggggcccgagcccgcccccgccggccccgccaagcccgccggccccgccgcgctggccgcccgcgccggccccggccccgggcccggccccggccccggccccggccctggccctggcaagcccgccggccccggcgccgcgcaaactttgaatgggagcgccgcgctgctgaactcgcaccacgccgccgcacctgctgtcagcctggtcaacaacgggcccgccgcgctgctgccgctgcccaagcccgccgcccccggcactgtcatccagacgccccccttcgtgggcgccgccgcgccccccgcgcccgccgcgccctcgccccccgccgcccccgcgcccgccgcccccgccgccgccccgcccccgccaccccccgcgcccgccactctggcccggccgcccggccaccccgccggacccccgaccgccgcgcccgccgtgccgccccccgccgccgcccagaacgggggcagcgccggggcagcccccgcccccgccccggccgccgggggccccgcgggggtcagcggccaacccgggcccggcgcggcggctgcggcgccggcgccgggggtcaaggccgagtcgcccaagagggtggtgcaggcggcgcccccggcggcgcagaccctggcggccagcggcccggccagcacggcggccagcatggtcatcgggccaactatgcaaggggcgctgcccagcccggccgccgtcccgccgcccgcccccgggacccccaccgggctgcccaaaggcgcggccggcgcagtgacccagagcctgtcccggacgcccacggccaccaccagcgggattcgggccaccctgacgcccaccgtgctggccccccgcttgccgcagccgcctcagaacccgaccaacatccagaacttccagctgcccccaggaatggtcctcgtccgaagtgagaatgggcagttgttaatgattcctcagcaggccttggcccagatgcaggcgcaggcccatgcccagcctcagaccaccatggcgcctcgccctgccacccccacaagtgcccctcccgtccagatctccaccgtacaggcacctggaacacctatcattgcacggcaggtgaccccaactaccataattaagcaagtgtctcaggcccagacaacggtgcagcccagtgcaaccctgcagcgctcgcccggcgtccagcctcagctcgttctgggtggcgctgcccagacggcttcacttgggacggcgacggctgttcagacggggactcctcagcgcacggtaccaggggcgaccaccacttcctcagctgccacggaaactatggaaaacgtgaagaaatgtaaaaatttcctatctacgttaataaaactggcttcatctggcaagcagtctacagagacagcagctaatgtgaaagagctcgtgcagaatttactggatggaaaaatagaagcagaagatttcacaagcaggttataccgagaacttaattcttcacctcaaccttaccttgtgcctttcctgaagaggagcttacccgccttgagacagctgacccccgactccgcggccttcatccagcagagccagcagcagccgccaccgcccacctcgcaggccaccactgcgctcacggccgtggtgctgagtagctcggtccagcgcacggccgggaagacggcggccaccgtgaccagtgccctccagccccctgtgctcagcctcacgcagcccacgcaggtcggcgtcggcaagcaggggcaacccacaccgctggtcatccagcagcctccgaagccaggagccctgatccggcccccgcaggtgacgttgacgcagacacccatggtcgccctgcggcagcctcacaaccggatcatgctcaccacgcctcagcagatccagctgaacccactgcagccagtccctgtggtgaaacccgccgtgttacctggaaccaaagccctttctgctgtctcggcacaagcagctgctgcacagaaaaataaactcaaggagcctgggggaggttcgtttcgggacgatgatgacattaatgatgttgcatcgatggctggagtaaacttgtcagaagaaagtgcaagaatattagccacgaactctgaattggtgggcacgctaacgcggtcctgtaaagatgaaaccttcctcctccaagcgcctttgcagagaagaatattagaaataggtaaaaaacatggtataacggaattacatccagatgtagtaagttatgtatcacatgccacgcaacaaaggctacagaatcttgtagagaaaatatcagaaacagctcagcagaagaacttttcttacaaggatgacgacagatatgagcaggcgagtgacgtccgggcacagctcaagttttttgaacagcttgatcaaatcgaaaagcagaggaaggatgagcaggagcgggagatcctgatgagggcagcaaagtctcggtcaagacaagaagatccagaacagttaaggctgaaacagaaggcaaaggagatgcagcaacaggaactggcacaaatgagacagcgggacgccaacctcacagcactagcagcgatcgggcccaggaaaaagaggaaagtggactgtccggggccgggctcaggagcagaggggtcgggccccggctcagtggtcccaggcagctcgggtgtcggaacccccagacagttcacgcgacaaagaatcacgcgggtcaacctcagggacctcatattttgtttagaaaatgaacgtgagacaagccattcactgctgctctacaaagcattccttaagtgacacaggaggacgcctggggactttttatatatttgcagattacgcctttttgtaacgagcaaatgggatattgtttaaaaaacagccacctctttacaatggaacagttttatattcctgtttctaaatcagctcttcagtgtgaaagaaaacacgtttctgtaacagagagaacacaaaggcctgtggatactcttaaaggacaattaaatcttaactcatcttgattgagtggccttcctgccaaacaagccatatataaagactgatggaatcgttagcaaataattagctgccctctgtcaactcatagcagtttctgcattatttgtgcattttggtttagttctacctaacttactatgtaggtgtatgtctacagccgatgacctcatttcgtttattttatttttgtaatagtcagttggcaaagcaaactgattttttagactatttatcttccttcccttcccctcccaccccgctctcctctctgccccctgccctcccctcccctcccttcccctccactccgctgagaatcctggaggaatacacaattcatcgttgcacccccacctcagagtgtaatcgcatttctgcttggtagaggccgagcccagcaaaggtggctccttctgaatgtgtggtcagcatctgtacaaatgcattttatttgctatagtttgtaaagctgtaaagttaaaagagatgaaaaccttttcagcataaatatattttacttgcactgtgttttttagctaaaagtgaaaacctagattaaataaaatcaaagttgagaagaatcatcaaaagactgtttctcggtgtgaatcaagtgttgaaaaatggttggtgtattttgtcagtaattgtacataacttttggcacatgacatagaaatggctatgtaaactataattattttgctaagagactgtatgcaagccttgggccgactttacagacgtccagagcaaagccccttctttgtacctatttttttattacaaatatactaattggttctttctattttcagaggttattgtatgaaattgtctattgatagtacttttatgactgtaaatactctggctttctccgtgtgaattctcacattagactttaattcgagcgcgtgtgaactgaacgctgatcagtattttttatcaacacctgagaactgttacaccttttattttgtcttttaggaaatccctgtctttccattttttcatgtaaattttgcacagttacttgttcatatgtaaatattttactttcagaaatgaagtttttaattgctattgttttatataggattgaaagaaaattaactcctttattaaaaacaaatttatctgtaaaaaaaaaaaaaaaaaaaa

SEQ ID NO: 1963 - DNA, 1177 bp, Homo Sapiens
  NM_003186
tcaccacggcggcagccctttaaacccctcacccagccagcgccccatcctgtctgtccgaacccagacacaagtcttcactccttcctgcgagccctgaggaagccttctttccccagacatggccaacaagggtccttcctatggcatgagccgcgaagtgcagtccaaaatcgagaagaagtatgacgaggagctggaggagcggctggtggagtggatcatagtgcagtgtggccctgatgtgggccgcccagaccgtgggcgcttgggcttccaggtctggctgaagaatggcgtgattctgagcaagctggtgaacagcctgtaccctgatggctccaagccggtgaaggtgcccgagaacccaccctccatggtcttcaagcagatggagcaggtggctcagttcctgaaggcggctgaggactatggggtcatcaagactgacatgttccagactgttgacctctttgaaggcaaagacatggcagcagtgcagaggaccctgatggctttgggcagcttggcagtgaccaagaatgatgggcactaccgtggagatcccaactggtttatgaagaaagcgcaggagcataagagggaattcacagagagccagctgcaggagggaaagcatgtcattggccttcagatgggcagcaacagaggggcctcccaggccggcatgacaggctacggacgacctcggcagatcatcagttagagcggagagggctagccctgagcccggccctcccccagctccttggctgcagccatcccgcttagcctgcctcacccacacccgtgtggtaccttcagccctggccaagctttgaggctctgtcactgagcaatggtaactgcacctgggcagctcctccctgtgcccccagcctcagcccaacttcttacccgaaagcatcactgccttggcccctccctcccggctgcccccatcacctctactgtctcctccctgggctaagcaggggagaagcgggctgggggtagcctggatgtgggccaagtccactgtcctccttggcggcaaaagcccattgaagaagaaccagcccagcctgccccctatcttgtcctggaatatttttggggttggaactcaaaaaaaaaaaaaaaaaatcaatcttttctcaaaaaaaaaaaaaaaaaa

SEQ ID NO: 1964 - DNA, 3779 bp, Homo Sapiens
  NM_003190
ggggacgcggcacagatagggggaagccggagtaatggttttcgggcaagtggatgttggagagcacacacaggagttggggggcgggggagggcctggggttggggagggctcgaactcggggctgctgggtagtccaggagggcgcggtaaggctggggtgtcctggtgagaactggagaggatctacccgggtccctgcctggccagtggggaaacaccggtcccccaggcaccttcacctaaccagagcggggatttccaccgcccctcatgccgccctttggaggaaagtgaaagtgaaaggaggaagaggaggcttcatggctgaggaggtcgcagcgccatgaagtccctgtctctgctcctcgctgtggctttgggcctggcgaccgccgtctcagcaggacccgcggtgatcgagtgttggttcgtggaggatgcgagcggaaagggcctggccaagagacccggtgcactgctgttgcgccagggaccgggggaaccgccgccccggccggacctcgaccctgagctctatctcagtgtacacgaccccgcgggcgccctccaggctgccttcaggcggtatccccggggcgcccccgcaccacactgcgagatgagccgcttcgtgcctctccccgcctctgcgaaatgggccagcggcctgacccccgcgcagaactgcccgcgggccctggatggggcttggctgatggtcagcatatccagcccagtcctcagcctctccagcctcttgcgaccacagccagagcctcagcaggagcctgttctcatcaccatggcaacagtggtactgactgtcctcacccacacccctgcccctcgagtgagactgggacaagatgctctgctggacttgagctttgcctacatgccccccacctccgaggccgcctcatctctggctccgggtccccctccctttgggctagagtggcgacgccagcacctgggtaagggacatctgctcctggctgcaactcctgggctgaatggccagatgccagcagcccaagaaggggccgtggcatttgctgcttgggatgatgatgagccatggggcccatggaccggaaatgggaccttctggctgcctacagttcaaccctttcaggagggcacctatctggccaccatacacctgccatacctgcaaggacaggtcaccctggagcttgctgtgtacaaaccccccaaagtgtccctgatgccagcaacccttgcacgggccgccccaggggaggcacccccggaattgctctgccttgtgtcccacttctacccttctgggggcctggaggtggagtgggaactccggggtggcccagggggccgctctcagaaggccgaggggcagaggtggctctcggccctgcgccaccattccgatggctctgtcagcctctctgggcacttgcagccgcccccagtcaccactgagcagcatggggcacgctatgcctgtcgaattcaccatcccagcctgcctgcctcggggcgcagcgctgaggtcaccctggaggtagcaggtctttcagggccctcccttgaggacagcgtaggccttttcctgtctgcctttcttctgcttgggctcttcaaggcactgggctgggctgctgtctacctgtccacctgcaaggattcaaagaagaaagcagagtgagggcactcactgccatcctgtggaagccaccatcatctctggcccaagcttctgtagtagctccctaaaataataccctatcatctgctcctaatccctccaatctctctccactgagtggctggaatgcttttttttttttctttcacttatataagggataatttttcttttttttttttttttgagacggagtctcactcttccgcccaggctgcagtgcagtggcatgatcttggcttactgcaacctccgcctcctgggttcaagcaattctgtggcttcagcctccggagtagctgggattacaggcacatgccaccacacccagtgaatttttgtatttttagtagagacggggtttcaccatgttggccaggctggtcttgaattcctgacctcaggtgatctgcccacctcagcctcccaaagtgctgggattacaggcgtgagccaccacaccaggcccgagaaatgcttttttaaaaaacacacatcttatggcattcaccttcttggagctctaggacagtggttctcaaaatttttttctctcaggacctcttaaaaatcatcaaggaccccaaaaagcttttgggtatgtgggttatagctatcaatatttatggtactagaacttaaaagtgagaaaaatttaaaacacgagaatacataggcacacattctattcatcgtgggaaccatggtgtcaatacatatcatgtagcttctgaaaaactccactgtacacttatagaatgaagaaggcaaaaaacttttttttttttttttttgagacggagtctcgctctgtcgcccaggctggagtgcagtggcgcgatctcggctcactgcaagctccgcctctcgggttcacgccattctcctgcctcagcctcccaagtagctcggactacaggcgtcctccaccatgcctggctaatattttgtattttttagtagagacggggtttcaccgtgttagccaggatggtctcgatctcctaacctggtgatccgcccgcctcggcctcccaaagtattgggattacccgcgtgagccaccgcgcccggctgcaaataatctttctttttttctgagacagagtctcgctctgttgcccaggctggagtgcagtggcacgatctcggctcacggcacgctccgcctcccgggttcacgccattctcctgcctcagcttcccgagtagctgggactacaggggcccgccaccacgcccggctaactttttgtgtttttagtagagacggggtttcaccgtgttagccaggatggtctcgatctcctgaccttgtgatctgcccgcctcggcctcccaaagtgctgggattacaggcgtgagccaccgcgcccggcggcgaaacacgatattgtactaacatcttaattttgttataaaatctcacaaaccccctgacatagtctcagagatctgtagggccgaggttacatttggagaacccgtactctagggccaaatccattcttcttgccctggctcacttgtcccccccaccgccccgcgctggagccactgcctagttcttcagccctagatggtgctcgccagacctcctctcaatgctcatcacacacagggctattcctttcctccaatgaaccaaacgcctcccgcccacctccaggtcccagtcctctgttccctttgcctggtccacccttgccctccctgggtcgcagacgaggtcggcctcgtcattccccgcagaccgccgcgcgtccctcttgtgcggttcaccacagttgtatttaagtgatcgtgtgagtcgtcgttaaatgcctgtctccccgcggatcatgggctcctcgaggacagggactggcctgtctgtccactgctgtaaccccgcgccggcatagggacctaaggcccactggagggcgctcatcaagtagctgctggatgttgacgaaggaagcggcggcgcagctcagggatctccgagtcaggacggtcggccagacccacggggtaacgggtctaatcgtgtaggaataaagctgtattccagtgcttccaaaaaaaaaaaaaaaaaaaaaaa

SEQ ID NO: 1965 - DNA, 1921 bp, Homo Sapiens
  NM_003194
ggcggaagtgacattatcaacgcgcgccaggggttcagtgaggtcgggcaggttcgctgtggcgggcgcctgggccgccggctgtttaacttcgcttccgctggcccatagtgatctttgcagtgacccagcatcactgtttcttggcgtgtgaagataacccaaggaattgaggaagttgctgagaagagtgtgctggagatgctctaggaaaaaattgaatagtgagacgagttccagcgcaagggtttctggtttgccaagaagaaagtgaacatcatggatcagaacaacagcctgccaccttacgctcagggcttggcctcccctcagggtgccatgactcccggaatccctatctttagtccaatgatgccttatggcactggactgaccccacagcctattcagaacaccaatagtctgtctattttggaagagcaacaaaggcagcagcagcaacaacaacagcagcagcagcagcagcagcagcaacagcaacagcagcagcagcagcagcagcagcagcagcagcagcagcagcagcagcagcagcagcaacaggcagtggcagctgcagccgttcagcagtcaacgtcccagcaggcaacacagggaacctcaggccaggcaccacagctcttccactcacagactctcacaactgcacccttgccgggcaccactccactgtatccctcccccatgactcccatgacccccatcactcctgccacgccagcttcggagagttctgggattgtaccgcagctgcaaaatattgtatccacagtgaatcttggttgtaaacttgacctaaagaccattgcacttcgtgcccgaaacgccgaatataatcccaagcggtttgctgcggtaatcatgaggataagagagccacgaaccacggcactgattttcagttctgggaaaatggtgtgcacaggagccaagagtgaagaacagtccagactggcagcaagaaaatatgctagagttgtacagaagttgggttttccagctaagttcttggacttcaagattcagaatatggtggggagctgtgatgtgaagtttcctataaggttagaaggccttgtgctcacccaccaacaatttagtagttatgagccagagttatttcctggtttaatctacagaatgatcaaacccagaattgttctccttatttttgtttctggaaaagttgtattaacaggtgctaaagtcagagcagaaatttatgaagcatttgaaaacatctaccctattctaaagggattcaggaagacgacgtaatggctctcatgtacccttgcctcccccacccccttctttttttttttttaaacaaatcagtttgttttggtacctttaaatggtggtgttgtgagaagatggatgttgagttgcagggtgtggcaccaggtgatgcccttctgtaagtgcccaccgcgggatgccgggaaggggcattatttgtgcactgagaacaccgcgcagcgtgactgtgagttgctcataccgtgctgctatctgggcagcgctgcccatttatttatatgtagattttaaacactgctgttgacaagttggtttgagggagaaaactttaagtgttaaagccacctctataattgattggactttttaattttaatgtttttccccatgaaccacagtttttatatttctaccagaaaagtaaaaatcttttttaaaagtgttgtttttctaatttataactcctaggggttatttctgtgccagacacattccacctctccagtattgcaggacagaatatatgtgttaatgaaaatgaatggctgtacatatttttttctttcttcagagtactctgtacaataaatgcagtttataaaagtgttagattgttgttaaaaaaaaaaaaaaaaaa

SEQ ID NO: 1966 - DNA, 1586 bp, Homo Sapiens
  NM_003196
cgcccccgccgggcgtgtgtgtcgtgtgtgtttggggcccgcgcgggttgcgcgccctccgccttcgcgcctcctgcccccgaggccctactgctgcccctgtgcccctcgccccgccgggcgtcgcgggccaacatgggccaggaagaggagctgctgaggatcgccaaaaagctggagaagatggtggccaggaagaacacggaaggggccctggaccttctgaagaagctgcacagctgccagatgtccatccagctactacagacaaccaggattggagttgctgttaatggggtccgcaagcactgctcagacaaggaggtggtgtccttggccaaagtccttatcaaaaactggaagcggctgctagactcccctggacccccaaaaggagaaaaaggagaggaaagagaaaaggcaaagaagaaggaaaaagggcttgagtgttcagactggaagccagaagcaggcctttctccaccaaggaaaaaacgagaagaccccaaaaccaggagagactctgtggactccaagtcttctgcctcctcctctccaaaaagaccatcggtggaaagatcaaacagcagcaaatcaaaagcggagagccccaaaacacctagcagccccttgacccccacgtttgcctcttccatgtgtctcctggccccctgctatctcacaggggactctgtccgggacaagtgtgtggagatgctgtcagcagccctgaaggcggacgatgattacaaggactatggagtcaactgtgacaagatggcatcagaaatcgaagatcatatctaccaagagctcaagagcacggacatgaagtaccggaaccgcgtgcgcagccgcataagcaacctcaaggaccccaggaaccccggcctgcggcggaacgtgctcagtggggccatctccgcagggcttatagccaagatgacggcagaggaaatggccagtgatgaactgagggagttgaggaatgccatgacccaggaggccatccgtgagcaccagatggccaagactggcggcaccaccactgacctcttccagtgcagcaaatgcaagaagaagaactgcacctataaccaggtgcagacacgcagtgctgatgagcccatgactacctttgtcttatgcaatgaatgtggcaatcgctggaagttctgctgatggaacagccagccatgaacaaggtgaggaagaagaaagaggaagcgctgaattatctgaactggagaagcaataaaaattaaagtgaaggaaaatactgaactctgtctgagtgggatggtatgagttagaggaagaattctcttgcaaattaataatcggtcattagaaacaattggttaatgggggagcctaattggagaatgatgctgagaatttgtattgatgaacctcttttagaaactgcagagggctgggcacggtggtttatggctgtaatctgcaaactctgggaggctgaggtgggagaatcgcttaaccccagaagtttgagtccagcccaggcaacacagcaagaccccatctctataaaaagaaaaaataaagaaactgcagcgccttag

SEQ ID NO: 1967 - DNA, 8320 bp, Homo Sapiens
  NM_003199
gtgtgtggatgtgtgagtgagagggaacgagagtaagagaaagaaagaagtgaggggatgtaaactcgaataaatttcaaagtgcctccgagggatgcaacgggcaaaaactgaactgttcaggcttcagattgtaactgacgatctgaggaaaaatgaggtgctcgatgaattttcgtttgtattttttggcgaggcgggggaggtgttgagattttttttttttcccctcggggtgggtgcgagggggatgcatcctagcctgcccgacccggagcaagtcgcgtctccccgccggagcccccccacccatttctttgctgaacttgcaattccgtgcgcctcggcgtgtttccccctccccccttccctccgtcccctcccctccccggagaagagagttggtgttaagagtcagggatcttggctgtgtgtctgcggatctgtagtggcggcggcggcggcggcggcggggaggcagcaggcgcgggagcgggcgcaggagcaggcggcggcggtggcggcggcggttagacatgaacgccgcctcggcgccggcggtgcacggagagccccttctcgcgcgcgggcggtttgtgtgattttgctaaaatgcatcaccaacagcgaatggctgccttagggacggacaaagagctgagtgatttactggatttcagtgcgatgttttcacctcctgtgagcagtgggaaaaatggaccaacttctttggcaagtggacattttactggctcaaatgtagaagacagaagtagctcagggtcctgggggaatggaggacatccaagcccgtccaggaactatggagatgggactccctatgaccacatgaccagcagggaccttgggtcacatgacaatctctctccaccttttgtcaattccagaatacaaagtaaaacagaaaggggctcatactcatcttatgggagagaatcaaacttacagggttgccaccagcagagtctccttggaggtgacatggatatgggcaacccaggaaccctttcgcccaccaaacctggttcccagtactatcagtattctagcaataatccccgaaggaggcctcttcacagtagtgccatggaggtacagacaaagaaagttcgaaaagttcctccaggtttgccatcttcagtctatgctccatcagcaagcactgccgactacaatagggactcgccaggctatccttcctccaaaccagcaaccagcactttccctagctccttcttcatgcaagatggccatcacagcagtgacccttggagctcctccagtgggatgaatcagcctggctatgcaggaatgttgggcaactcttctcatattccacagtccagcagctactgtagcctgcatccacatgaacgtttgagctatccatcacactcctcagcagacatcaattccagtcttcctccgatgtccactttccatcgtagtggtacaaaccattacagcacctcttcctgtacgcctcctgccaacgggacagacagtataatggcaaatagaggaagcggggcagccggcagctcccagactggagatgctctggggaaagcacttgcttcgatctattctccagatcacactaacaacagcttttcatcaaacccttcaactcctgttggctctcctccatctctctcagcaggcacagctgtttggtctagaaatggaggacaggcctcatcgtctcctaattatgaaggacccttacactctttgcaaagccgaattgaagatcgtttagaaagactggatgatgctattcatgttctccggaaccatgcagtgggcccatccacagctatgcctggtggtcatggggacatgcatggaatcattggaccttctcataatggagccatgggtggtctgggctcagggtatggaaccggccttctttcagccaacagacattcactcatggtggggacccatcgtgaagatggcgtggccctgagaggcagccattctcttctgccaaaccaggttccggttccacagcttcctgtccagtctgcgacttcccctgacctgaacccaccccaggacccttacagaggcatgccaccaggactacaggggcagagtgtctcctctggcagctctgagatcaaatccgatgacgagggtgatgagaacctgcaagacacgaaatcttcggaggacaagaaattagatgacgacaagaaggatatcaaatcaattactagcaataatgacgatgaggacctgacaccagagcagaaggcagagcgtgagaaggagcggaggatggccaacaatgcccgagagcgtctgcgggtccgtgacatcaacgaggctttcaaagagctcggccgcatggtgcagctccacctcaagagtgacaagccccagaccaagctcctgatcctccaccaggcggtggccgtcatcctcagtctggagcagcaagtccgagaaaggaatctgaatccgaaagctgcgtgtctgaaaagaagggaggaagagaaggtgtcctcagagcctccccctctctccttggccggcccacaccctggaatgggagacgcatcgaatcacatgggacagatgtaaaagggtccaagttgccacattgcttcattaaaacaagagaccacttccttaacagctgtattatcttaaacccacataaacacttctccttaacccccatttttgtaatataagacaagtctgagtagttatgaatcgcagacgcaagaggtttcagcattcccaattatcaaaaaacagaaaaacaaaaaaaagaaagaaaaaagtgcaacttgagggacgactttctttaacatatcattcagaatgtgcaaagcagtatgtacaggctgagacacagcccagagactgaacggcaatctttccacactgtggaacaatgcatttgtgcctaaacttcttttggaaaaaaaaaatataattaatttgtaagtctgaaaaaaaaatatttaatttaaaaaaaattgtaaacttgcaataatgaaaaagtgtacttctgaagaaaactacatgaacgtttttgttggtattcaagtcagctagtgtttataattactggatattgaattaggggaagctcggctgccctagtaacaaaaccagcaaacgtcctgatgacaacgaagtgatgacattagccattccttagggtaggaggaacagatggatcttatagacctatgacaaatatatatataaatatatatataaatatatattaaaaatttagtgactatggtaagcttttgttcatttgtttcagacttttttctcctgtaaaaaaatagtactgattaacttttttaaaagaaagattttactgtaaatatggatttttttttttttggtcttatttctgtccctttccctggtttgttatcgtaacctgtagtgccaactctgcttccagaggggtagtgcaggatgaaatgctgaccctgatgttgcttctcattcataaataagtagaaagttgtttctccagtcttttgggaacacaggacttaaaagtcacatcatgtgtagatattacaagcagcattaccaagacatggcaaaaagagtttgtctgaattgtaatgttgcgtttgtgaacctattctgggattttcagaggtacaaggttagaatgctacaatgttaccactgtgccttccaatgtttatatcatcggaaacataacataatcaaagtggctgtgatttaacaaaatgattaaagtgttacctacctgtgtagccgaagtagtgtgcagtgaggcgtttctgaatacatggtcagatttttggaaaaaaacaaaaacaaaaaaaacaagtaaagttcaaaaaccgtcaaatgagaaaattgcaagtagtgtgacagagctgattgattttgttgctttcttgattttttttttcaaaatgggtttactaaaatgtagatgacttaactgcctcctccttcgtctgaaaaatgccaatattcaatcatcatgcagcattataacaagccttataagtcctaaagcattaagttgcacttttttgaggaggggtagtgcagtatttctctggccagtatgaatgaagtttatacttaccatatttgatagaaacatagatcaagctatggcacagcgactcatcagatagctagctttgacgtctgggcacaattgaaccaacttccatcgtgaatctttataatgattgactttggtgtatagtgcagtaaacaaatagtgctcctagttaagtatttgtcagcatccttttgtctctaacttgtttctatttttacagccacacaattcttggcatgtattaagaaaaaaaaaaatccctgttcaagtagtttttccacctatcagcactgagtaaatgccataaatccattgaaatggtctaaatgttccatctgttctcctgttttgccagttatatagtaatgaaatacatttgtaaattttatgcaacaaatggcaaacgtatcattattttgaaattgtgtatgtaaaagttatatttttacatgtagactcttgttattatgtgttttaatacattgtatcagtttttgtttttttttaaaaactgtggtttaaaaagaagtctcatttaaatgaaatagctacaagaatcagaattttatgttcatttctgaaaatgtaagaacaaataagatagttaccacgtggtcatcttttacaaacccataaacattttgattagctgtgtgtgtgttgaaaaactgtaaatatgttcagtagcgataaaactaaaataactttgatttgttgataagttcctaaaatgtggaggtggattaaaaccttaggagaatagcagaaatcaaacttcatgaaaagttattttggggctttcctgtgaaatgtatgaacaaagaggctcagagaaggacatggaagacaataatgtatactctctcctcctccctgaataatgaaaaccatgtgtatttgttccctccgtatgttaaagatttccttttagtggtacattctgcactcattttgtatagtctaccaaggcgggtatccctaggaacaatattatataggaagcaggtatactctgatcacattcaggataagtgtacagaagaaaatacggtgtttactctttagggaactggaaacactccctgcattgatgtacattttaagaatggcacttttgatacatgttatcataaaggtgcttaatagagctgaattaaagtttttcaaatctgtaaacaaagcaaaaaagtaaattgtagtcatttgattattttttaaattggtgctttatattttgttctcactcagagtaaaagctgcaatttattgttcaccagctttgatgtattcattactcagtaatgcaatacctctattgttgaattccctttggaaataagtgaaaattctaacggccactgaaagctgctcgctaggttttgcttggtggagaaacataatctgcacctatccatattaattgggttgtatccccattaaaaaagaaaaaaagggaatgtggcctttttagtgtgttttttattgttgttgttttgtaattatcaaacccaggtaagatattggtatcctgcactggattttcaaatgaagttcagcagaagacagttaagattaaagtactatacaaaaatttcaaaagggtccatactacgctatctgtatgacgacacttaggctggggatctctttcagaaactcggactttaaaagcaacttggagcagttgatccacctccacattcaagtaatttatgaatatgcagaatagggatctgttcatctagaaatttttaccatttgtcttctgtgtagctgcaaggaacactaatgtttatacaactgtcagtccacccagtggtgcaactggttctgattcagtcttccgattcctttttatttttcactttttcctatttctgaatttttttttttatttgtgatcttgattttgatgaggggttggggagtggggagggagtcgaaccaagacttggagttaagaggattttcatcttttgcatccaacaggcagaatatgatctgtgtccaaaagtgaacttgagtcaggaatgaatcaatttcagcataaacaagcacaaaaatttagtctgctggctgactggaagcaaaaaagtcaagatggaatatgatgaattccaacacaatggggcaccaaggcctttaggcctctctttttattttgctttggttttgtttgtttttctttagagacatgctctttctcatgggacttgaagtggactcatctttgtgcagtgctggttttgccatactcatttcaagtattatagacatatgtaatggtgaaaatatatgaactgtggcctttttcattcttgttacttgtgatgcaattaagtgaagataagaaaaaaaaaaaaaaagcagagatttaccatgtatcagtgcctggctttttgttataaagctttgtttgtctagtgctcttttgctataaaatagactgtagtacaccctagtaggaaaaaaaaaaaactaaatttaaaaataaaaaatatatttggcttatttttcgcaggagcaatccttttataccatgaatattacaaaaaaattgtcagattctgaatatttcttctttgtagatttttggaatcattatgagtaaaagtttgttactttattttactatttaaaagatgttattttaccatgtgttaccaagatgaaactgtatgggtagcttttttgtttgttttttgttttgtttttgtttttgtttttgtttttagttgtaggtcgcagcggggaaattttttgcgactgtacacatagctgcagcattaaaaacttaaaaaaattgttaaaaaaaaaaaaagggaaaacatttcaaaaaaaaaaaaaaagataaacagttacaccttgttttcaatgtgtggctgagtgcctcgattttttcatgtttttggtgtatttctgatttgtagaagtgtccaaacaggttgtgtgctggagttccttcaagacaaaaacaaacccagcttggtcaaggccattacctgtttcccatctgtagttattcgatgaagtcatgtacatgaccgttctgtagcaataaatgtgccatttttataaactgtttctgacacttgtttcatttcattttgcattgtccatatagctatgattctcttctgtaagtaaaacgcatctatatttcattttccaagtgttggaggtattgacagcttaacaaacaaaacatacaaaaaaaatcacaaaaacaaattgaaaagcaaagcacatgattgatcaaggaagagatgcccttaatgaaaatggaacgggatgcatgcaaaacaaaaagaaaactgtctagaggattaactaattgaaggaatataattaatgtgtgtgtaacactgaagctatgcatttgaagagctctgaactgcaccagtgttttcggttgtgctgcaggttgctaagtcaagtcagccttaaccttttgcaccagttggtcggctgtttggcagaacattctcagatcttttcagtcaaaaatctaagatgatttattttgtatcactttgttaaaagctgaatattgttaactacagttaatattaacactgtatttatactttctcaaactacatccgccccaccacttctggttgcctctgttgactattaatccagatgtaaacaaccagatgtttttttctaacttgtacaaactgacgtgtgtcaactatcatggaaggaaaaaaatgtacagattaaaattattcagtgttatgtactgtaagttaatatttttgtagaatggacatcaatctactttgcaaaatttggaggctatttcaacattgcactgtagaaatgtaaagtaatgtatgcaatgtaaaggaaagcccgcggtagctgagcgcttcataacagaatgttctaatcaagtacgtggtatttggggatgtctccaatattgctcttgtattctttctaattgggtttagtgactagttgaaggaaaatgttataacgccatttggttcacatgtgaagtgccctccatagccaaatgttgggatttttttttttttcgtttttggttggactgtttgcagatatttaaattttatgaaatttccaaagattttggttgataacccccttttaccttctaaatgatttgagatgttcttatgttcttactgtgtgttttaaatatatataaaagagccacaagcattt

SEQ ID NO: 1968 - DNA, 4382 bp, Homo Sapiens
  NM_003216
cggcagctgcagcgggtcgcacggctccggcccatctcggggggcgggcgggggaggcgaggtgcgcgagccgagtccggggcacgatgtccgacgcgggcggcggaaagaagccgcctgtggacccgcaggcaggacccggtccggggccggggcgcgcagctggggaaaggggcctgtcggggtccttccccctggtcctgaagaagctgatggagaaccccccgcgcgaggcgcgcctcgataaggaaaaggggaaggaaaagctggaggaggacgaggccgcagccgccagcaccatggctgtctcagcctccctcatgccacccatctgggacaagaccatcccatatgatggcgaatctttccacctggagtacatggacctggatgagttcctgctggagaatggcatccccgccagccccacccacctggcccacaacctgctgctgcctgtagcagagctagaagggaaggagtctgccagctcttccacagcatccccaccatcctcctccactgccatctttcagccctctgaaaccgtgtccagcacagaatcttccctggagaaggagagggagactcccagtcccatcgaccccaattgtgtggaagtggatgtgaacttcaatccggaccccgccgacctggtgctctccagtgtgccaggcggggagctcttcaaccctcggaagcacaagtttgctgaggaggacctgaagccccagcctatgatcaaaaaggccaagaaggtctttgtccccgacgagcagaaggatgaaaagtactggacaagacgcaagaagaacaacgtggcagctaaacggtcacgggatgcccggcgcctgaaagagaatcagatcaccatccgggcagccttcctggagaaggagaacacagccctgcggacggaggtggccgagctacgcaaggaggtgggcaagtgcaagaccatcgtgtccaagtatgagaccaaatacgggcccttgtaacccgtgccccccgcccgggcggggtactgcctgcacctcagacctctgcctgggggctccctgtaacccctcacacgcgtggagacttatgactcgtcgtgggcgcatggcggcgcacctgctgcaggagcggccacgtctcagcttcattataccatggcctgcgcacgtggcgacgtccctgaggggccagtctcctcactggtggggaacgcaagagaatctgcgtagatgggtgactcagccttagtttctattcttggatgtcccagttgaatcagaaggggacctctggagtacacacctctctcctgggcgctcagggtccctggactctccctcagtctccagcctgggctgccgagggctatctctgcagaatgagttgtgatcattgtcaccctatgtcttctcaggtagcagggcgcgtttccacttaaggtgtgtctgtcacgcacctcattctccccagacagtctttgagtaacatctgttcccatcttccttggaagcaggacacaccagctcctccgtcagtgtctgcatgggtagcaggctgcaggagtggggtctctgcacagcctgggatggggcttggggctggggcctgcagcagaagtgtgcccagcgtttctcggctcccgcaccccttttcccttatggctctgaggccatcggctgtctctgcatttcattggctgtggaggagagactcctaggatggctgctgtctgagccatgagtgccagggctgagagaggcctcttcatttcctctccaggctactcagaggccatgtgaagctcgtttgtcccactagaccaggcctctgggcctgctctttctttccacccaatgtccagtcttggatcatagatttaaaaggaaaacccctcttatctaggaggctttaacttcctggaccccaggattcaccttcctagtggtgtttagaaaatgcctccacagcccccttccaccatgggcatgagagctggggtgtgtttcttgagaagctcccttttttcttgctctgctcaccggtgtggcctgggctggagtgcactctccctgggggcagctggggcctcgcaattcttgcttcaggatctctcccatgcgagctgcccggagggtgtcagcagggcaagacacctagtctagagtcaccaaggtcacagtgccactttcacgggatagcaggctcttgggacttttacacaggcctagggtcccctcagtcttggtcccaggagatgggggccactcgtgaggctggccatgctgtggcttctcacagctgtggtctcccctgcctcacaacgactcctttctcttgtgtggcgggactcgcccttttgctgtgctcagaagattcactgaggaaactcatggaagcctctgctcatttgggtcactgggacacccctgagatgggtgtgtttatttgctcagggcgggcagcctatggtgaagaggagacagaggcgatgggcgtgcttcgtcctccgtaacactggctttatttaccgtggtggttcagagtcccaggccctgacctctaaagacttttcataacagacgttaagaccaagccgtggacctcaccccaggggaatgccacggccctttggggacctgcacacccacctctccgggggacttgacaaggggccctgaggccaagggaggtcactcctccctccaggcccctgacttttactttgtggttctctaaaaaccatgtacacactttcactctattgtaaccacacagggcaggcgcatccagcatgtcagtgtcctgccccgggcagctctccctcccgggcacgctccctctggcctggtggatcaccaagagggcggttctcattttgttattagtggaagagccttgagcttaaaagctcttcattttctttgccggaaagtatatggtttgtgtttttgcagttttatttttttaaggatggacactaaatctctggtgtccatgttccgagcccggtggctgggatggtggctcgatgtgtctcctctttatcccgccctctgcctgtttggtgccctcccttctttcccccaggcagtgggtatcgggttctttcccaaagtgcttacttggaaagagtgtggctgctggactcttttcgaaatgcccctctgagtcaggagcctggtggggacaagatggaggatgtccacagaggctgacctgtgggggaaaagaagtgctcaggtaaggttgtctcctctcctgtcctaaaaaaatccatgcttgcaggagagggttggtgcctgctcagtttctgtcgagggaatgggagtctcctcggctccctcctgggccctctgcttcttggaggccgaccgctggagactgcggctcctgtgcttggatctttgacatctgtcagtcactggaggctagagaagttgactttaccttggctttctgtgggttcccgatgggcttggaagtgccgtctacttcctaagcatcctgtctaaagctttgtggcaccctcagtgcaacctcagaacagacaaatcatgaatgagctggaactttgcaagaatattcatattataaatgtctcatctgatggaggaacgtgtgcatttagagagagggagagttttcaaggtttatggcaactttgtggaggacctgggtaactcttacccttggccaaaggaagaggttttcctgtctggcttctgaggttggagggggcacttagcagtgaaccttaagtctgggtacatgtaaccctgctgaggggctgtgcaggccgctcctacggtcctttggcctgaggcagggcgggaggcatgcaagccagtgggggaaaacccctctgaagctgggcagccctctacctgggccccgggagccgtgctccttggaacgcaaagggccgaggagcatctggttttcatggcaaagctctactccagagctcctttaacatctgctaattaagtgcaataaatttttctagaaaatggcaaagatgacttccaggtggatattgctctcttacggtgttggggatgccagaacaccacttggttttatttttctaagtgcatgtgatgtgatagagtgtgtggggctctgtgtccttccctgggagctggcattccagcgggcccctctctttacctttgttgggggaaggaggcaagagagaaattccttcttcccagccagagagggcagaagcagaccgtagcccattggccttatgtgcgtgtgtgcgtgcgagtgtgtcactgctggtgggccggagtgatgtggtgggagggaagccgggaatgtatccttttcagacaaaattaaatattttgaaatgagaaaaaaaaaaaaaaaaaaaa

SEQ ID NO: 1969 - DNA, 1054 bp, Homo Sapiens
  NM_003226
gccaaaacagtgggggctgaactgacctctcccctttgggagagaaaaactgtctgggagcttgacaaaggcatgcaggagagaacaggagcagccacagccaggagggagagccttccccaagcaaacaatccagagcagctgtgcaaacaacggtgcataaatgaggcctcctggaccatgaagcgagtcctgagctgcgtcccggagcccacggtggtcatggctgccagagcgctctgcatgctggggctggtcctggccttgctgtcctccagctctgctgaggagtacgtgggcctgtctgcaaaccagtgtgccgtgccagccaaggacagggtggactgcggctacccccatgtcacccccaaggagtgcaacaaccggggctgctgctttgactccaggatccctggagtgccttggtgtttcaagcccctgcaggaagcagaatgcaccttctgaggcacctccagctgcccccggccgggggatgcgaggctcggagcacccttgcccggctgtgattgctgccaggcactgttcatctcagcttttctgtccctttgctcccggcaagcgcttctgctgaaagttcatatctggagcctgatgtcttaacgaataaaggtcccatgctccacccgaggacagttcttcgtgcctgagactttctgaggttgtgctttatttctgctgcgtcgtgggagagggcgggagggtgtcaggggagagtctgcccaggcctcaagggcaggaaaagactccctaaggagctgcagtgcatgcaaggatattttgaatccagactggcacccacgtcacaggaaagcctaggaacactgtaagtgccgcttcctcgggaaagcagaaaaaatacatttcaggtagaagttttcaaaaatcacaagtctttcttggtgaagacagcaagccaataaaactgtcttccaaagtggtcctttatttcacaaccactctcgctactgttcaatacttgtactattcctgggttttgtttctttgtacagtaaacattatgaacaaacaggca

SEQ ID NO: 1970 - DNA, 5241 bp, Homo Sapiens
  NM_003234
agagcgtcgggatatcgggtggcggctcgggacggaggacgcgctagtgtgagtgcgggcttctagaactacaccgaccctcgtgtcctcccttcatcctgcggggctggctggagcggccgctccggtgctgtccagcagccatagggagccgcacggggagcgggaaagcggtcgcggccccaggcggggcggccgggatggagcggggccgcgagcctgtggggaaggggctgtggcggcgcctcgagcggctgcaggttcttctgtgtggcagttcagaatgatggatcaagctagatcagcattctctaacttgtttggtggagaaccattgtcatatacccggttcagcctggctcggcaagtagatggcgataacagtcatgtggagatgaaacttgctgtagatgaagaagaaaatgctgacaataacacaaaggccaatgtcacaaaaccaaaaaggtgtagtggaagtatctgctatgggactattgctgtgatcgtctttttcttgattggatttatgattggctacttgggctattgtaaaggggtagaaccaaaaactgagtgtgagagactggcaggaaccgagtctccagtgagggaggagccaggagaggacttccctgcagcacgtcgcttatattgggatgacctgaagagaaagttgtcggagaaactggacagcacagacttcaccggcaccatcaagctgctgaatgaaaattcatatgtccctcgtgaggctggatctcaaaaagatgaaaatcttgcgttgtatgttgaaaatcaatttcgtgaatttaaactcagcaaagtctggcgtgatcaacattttgttaagattcaggtcaaagacagcgctcaaaactcggtgatcatagttgataagaacggtagacttgtttacctggtggagaatcctgggggttatgtggcgtatagtaaggctgcaacagttactggtaaactggtccatgctaattttggtactaaaaaagattttgaggatttatacactcctgtgaatggatctatagtgattgtcagagcagggaaaatcacctttgcagaaaaggttgcaaatgctgaaagcttaaatgcaattggtgtgttgatatacatggaccagactaaatttcccattgttaacgcagaactttcattctttggacatgctcatctggggacaggtgacccttacacacctggattcccttccttcaatcacactcagtttccaccatctcggtcatcaggattgcctaatatacctgtccagacaatctccagagctgctgcagaaaagctgtttgggaatatggaaggagactgtccctctgactggaaaacagactctacatgtaggatggtaacctcagaaagcaagaatgtgaagctcactgtgagcaatgtgctgaaagagataaaaattcttaacatctttggagttattaaaggctttgtagaaccagatcactatgttgtagttggggcccagagagatgcatggggccctggagctgcaaaatccggtgtaggcacagctctcctattgaaacttgcccagatgttctcagatatggtcttaaaagatgggtttcagcccagcagaagcattatctttgccagttggagtgctggagactttggatcggttggtgccactgaatggctagagggatacctttcgtccctgcatttaaaggctttcacttatattaatctggataaagcggttcttggtaccagcaacttcaaggtttctgccagcccactgttgtatacgcttattgagaaaacaatgcaaaatgtgaagcatccggttactgggcaatttctatatcaggacagcaactgggccagcaaagttgagaaactcactttagacaatgctgctttccctttccttgcatattctggaatcccagcagtttctttctgtttttgcgaggacacagattatccttatttgggtaccaccatggacacctataaggaactgattgagaggattcctgagttgaacaaagtggcacgagcagctgcagaggtcgctggtcagttcgtgattaaactaacccatgatgttgaattgaacctggactatgagaggtacaacagccaactgctttcatttgtgagggatctgaaccaatacagagcagacataaaggaaatgggcctgagtttacagtggctgtattctgctcgtggagacttcttccgtgctacttccagactaacaacagatttcgggaatgctgagaaaacagacagatttgtcatgaagaaactcaatgatcgtgtcatgagagtggagtatcacttcctctctccctacgtatctccaaaagagtctcctttccgacatgtcttctggggctccggctctcacacgctgccagctttactggagaacttgaaactgcgtaaacaaaataacggtgcttttaatgaaacgctgttcagaaaccagttggctctagctacttggactattcagggagctgcaaatgccctctctggtgacgtttgggacattgacaatgagttttaaatgtgatacccatagcttccatgagaacagcagggtagtctggtttctagacttgtgctgatcgtgctaaattttcagtagggctacaaaacctgatgttaaaattccatcccatcatcttggtactactagatgtctttaggcagcagcttttaatacagggtagataacctgtacttcaagttaaagtgaataaccacttaaaaaatgtccatgatggaatattcccctatctctagaattttaagtgctttgtaatgggaactgcctctttcctgttgttgttaatgaaaatgtcagaaaccagttatgtgaatgatctctctgaatcctaagggctggtctctgctgaaggttgtaagtggtcgcttactttgagtgatcctccaacttcatttgatgctaaataggagataccaggttgaaagaccttctccaaatgagatctaagcctttccataaggaatgtagctggtttcctcattcctgaaagaaacagttaactttcagaagagatgggcttgttttcttgccaatgaggtctgaaatggaggtccttctgctggataaaatgaggttcaactgttgattgcaggaataaggccttaatatgttaacctcagtgtcatttatgaaaagaggggaccagaagccaaagacttagtatattttcttttcctctgtcccttcccccataagcctccatttagttctttgttatttttgtttcttccaaagcacattgaaagagaaccagtttcaggtgtttagttgcagactcagtttgtcagactttaaagaataatatgctgccaaattttggccaaagtgttaatcttaggggagagctttctgtccttttggcactgagatatttattgtttatttatcagtgacagagttcactataaatggtgtttttttaatagaatataattatcggaagcagtgccttccataattatgacagttatactgtcggttttttttaaataaaagcagcatctgctaataaaacccaacagatactggaagttttgcatttatggtcaacacttaagggttttagaaaacagccgtcagccaaatgtaattgaataaagttgaagctaagatttagagatgaattaaatttaattaggggttgctaagaagcgagcactgaccagataagaatgctggttttcctaaatgcagtgaattgtgaccaagttataaatcaatgtcacttaaaggctgtggtagtactcctgcaaaattttatagctcagtttatccaaggtgtaactctaattcccattttgcaaaatttccagtacctttgtcacaatcctaacacattatcgggagcagtgtcttccataatgtataaagaacaaggtagtttttacctaccacagtgtctgtatcggagacagtgatctccatatgttacactaagggtgtaagtaattatcgggaacagtgtttcccataattttcttcatgcaatgacatcttcaaagcttgaagatcgttagtatctaacatgtatcccaactcctataattccctatcttttagttttagttgcagaaacattttgtggtcattaagcattgggtgggtaaattcaaccactgtaaaatgaaattactacaaaatttgaaatttagcttgggtttttgttacctttatggtttctccaggtcctctacttaatgagatagtagcatacatttataatgtttgctattgacaagtcattttaactttatcacattatttgcatgttacctcctataaacttagtgcggacaagttttaatccagaattgaccttttgacttaaagcagagggactttgtatagaaggtttgggggctgtggggaaggagagtcccctgaaggtctgacacgtctgcctacccattcgtggtgatcaattaaatgtaggtatgaataagttcgaagctccgtgagtgaaccatcattataaacgtgatgatcagctgtttgtcatagggcagttggaaacggcctcctagggaaaagttcatagggtctcttcaggttcttagtgtcacttacctagatttacagcctcacttgaatgtgtcactactcacagtctctttaatcttcagttttatctttaatctcctcttttatcttggactgacatttagcgtagctaagtgaaaaggtcatagctgagattcctggttcgggtgttacgcacacgtacttaaatgaaagcatgtggcatgttcatcgtataacacaatatgaatacagggcatgcattttgcagcagtgagtctcttcagaaaacccttttctacagttagggttgagttacttcctatcaagccagtacgtgctaacaggctcaatattcctgaatgaaatatcagactagtgacaagctcctggtcttgagatgtcttctcgttaaggagatgggccttttggaggtaaaggataaaatgaatgagttctgtcatgattcactattctagaacttgcatgacctttactgtgttagctctttgaatgttcttgaaattttagactttctttgtaaacaaatgatatgtccttatcattgtataaaagctgttatgtgcaacagtgtggagattccttgtctgatttaataaaatacttaaacactgaaaaaaaaaaaaaaaaaa

SEQ ID NO: 1971 - DNA, 4264 bp, Homo Sapiens
  NM_003236
agccgccttcctatttccgcccggcgggcagcgctgcggggcgagtgccagcagagaggcgctcggtcctccctccgccctcccgcgccgggggcaggccctgcctagtctgcgtctttttcccccgcaccgcggcgccgctccgccactcgggcaccgcaggtagggcaggaggctggagagcctgctgcccgcccgcccgtaaaatggtcccctcggctggacagctcgccctgttcgctctgggtattgtgttggctgcgtgccaggccttggagaacagcacgtccccgctgagtgcagacccgcccgtggctgcagcagtggtgtcccattttaatgactgcccagattcccacactcagttctgcttccatggaacctgcaggtttttggtgcaggaggacaagccagcatgtgtctgccattctgggtacgttggtgcacgctgtgagcatgcggacctcctggccgtggtggctgccagccagaagaagcaggccatcaccgccttggtggtggtctccatcgtggccctggctgtccttatcatcacatgtgtgctgatacactgctgccaggtccgaaaacactgtgagtggtgccgggccctcatctgccggcacgagaagcccagcgccctcctgaagggaagaaccgcttgctgccactcagaaacagtggtctgaagagcccagaggaggagtttggccaggtggactgtggcagatcaataaagaaaggcttcttcaggacagcactgccagagatgcctgggtgtgccacagaccttcctacttggcctgtaatcacctgtgcagccttttgtgggccttcaaaactctgtcaagaactccgtctgcttggggttattcagtgtgacctagagaagaaatcagcggaccacgatttcaagacttgttaaaaaagaactgcaaagagacggactcctgttcacctaggtgaggtgtgtgcagcagttggtgtctgagtccacatgtgtgcagttgtcttctgccagccatggattccaggctatatatttctttttaatgggccacctccccacaacagaattctgcccaacacaggagatttctatagttattgttttctgtcatttgcctactggggaagaaagtgaaggaggggaaactgtttaatatcacatgaagaccctagctttaagagaagctgtatcctctaaccacgagaccctcaaccagcccaacatcttccatggacacatgacattgaagaccatcccaagctatcgccacccttggagatgatgtcttatttattagatggataatggttttatttttaatctcttaagtcaatgtaaaaagtataaaaccccttcagacttctacattaatgatgtatgtgttgctgactgaaaagctatactgattagaaatgtctggcctcttcaagacagctaaggcttgggaaaagtcttccagggtgcggagatggaaccagaggctgggttactggtaggaataaaggtaggggttcagaaatggtgccattgaagccacaaagccggtaaatgcctcaatacgttctgggagaaaacttagcaaatccatcagcagggatctgtcccctctgttggggagagaggaagagtgtgtgtgtctacacaggataaacccaatacatattgtactgctcagtgattaaatgggttcacttcctcgtgagccctcggtaagtatgtttagaaatagaacattagccacgagccataggcatttcaggccaaatccatgaaagggggaccagtcatttattttccattttgttgcttggttggtttgttgctttatttttaaaaggagaagtttaactttgctatttattttcgagcactaggaaaactattccagtaatttttttttcctcatttccattcaggatgccggctttattaacaaaaactctaacaagtcacctccactatgtgggtcttcctttcccctcaagagaaggagcaattgttcccctgagcatctgggtccatctgacccatggggcctgcctgtgagaaacagtgggtcccttcaaatacatagtggatagctcatccctaggaattttcattaaaatttggaaacagagtaatgaagaaataatatataaactccttatgtgaggaaatgctactaatatctgaaaagtgaaagatttctatgtattaactcttaagtgcacctagcttattacatcgtgaaaggtacatttaaaatatgttaaattggcttgaaattttcagagaattttgtcttcccctaattcttcttccttggtctggaagaacaatttctatgaattttctctttatttttttttataattcagacaattctatgacccgtgtcttcatttttggcactcttatttaacaatgccacacctgaagcacttggatctgttcagagctgaccccctagcaacgtagttgacacagctccaggtttttaaattactaaaataagttcaagtttacatcccttgggccagatatgtgggttgaggcttgactgtagcatcctgcttagagaccaatcaacggacactggtttttagacctctatcaatcagtagttagcatccaagagactttgcagaggcgtaggaatgaggctggacagatggcggaagcagaggttccctgcgaagacttgagatttagtgtctgtgaatgttctagttcctaggtccagcaagtcacacctgccagtgccctcatccttatgcctgtaacacacatgcagtgagaggcctcacatatacgcctccctagaagtgccttccaagtcagtcctttggaaaccagcaggtctgaaaaagaggctgcatcaatgcaagcctggttggaccattgtccatgcctcaggatagaacagcctggcttatttggggatttttcttctagaaatcaaatgactgataagcattggatccctctgccatttaatggcaatggtagtctttggttagctgcaaaaatactccatttcaagttaaaaatgcatcttctaatccatctctgcaagctccctgtgtttccttgccctttagaaaatgaattgttcactacaattagagaatcatttaacatcctgacctggtaagctgccacacacctggcagtggggagcatcgctgtttccaatggctcaggagacaatgaaaagcccccatttaaaaaaataacaaacattttttaaaaggcctccaatactcttatggagcctggatttttcccactgctctacaggctgtgactttttttaagcatcctgacaggaaatgttttcttctacatggaaagatagacagcagccaaccctgatctggaagacagggccccggctggacacacgtggaaccaagccagggatgggctggccattgtgtccccgcaggagagatgggcagaatggccctagagttcttttccctgagaaaggagaaaaagatgggattgccactcacccacccacactggtaagggaggagaatttgtgcttctggagcttctcaagggattgtgttttgcaggtacagaaaactgcctgttatcttcaagccaggttttcgagggcacatgggtcaccagttgctttttcagtcaatttggccgggatggactaatgaggctctaacactgctcaggagacccctgccctctagttggttctgggctttgatctcttccaacctgcccagtcacagaaggaggaatgactcaaatgcccaaaaccaagaacacattgcagaagtaagacaaacatgtatatttttaaatgttctaacataagacctgttctctctagccattgatttaccaggctttctgaaagatctagtggttcacacagagagagagagagtactgaaaaagcaactcctcttcttagtcttaataatttactaaaatggtcaacttttcattatctttattataataaacctgatgcttttttttagaactccttactctgatgtctgtatatgttgcactgaaaaggttaatatttaatgttttaatttattttgtgtggtaagttaattttgatttctgtaatgtgttaatgtgattagcagttattttccttaatatctgaattatacttaaagagtagtgagcaatataagacgcaattgtgtttttcagtaatgtgcattgttattgagttgtactgtaccttatttggaaggatgaaggaatgaatctttttttcctaaa

SEQ ID NO: 1972 - DNA, 3183 bp, Homo Sapiens
  NM_003239
gacagaagcaatggccgaggcagaagacaagccgaggtgctggtgaccctgggcgtctgagtggatgattggggctgctgcgctcagaggcctgcctccctgccttccaatgcatataaccccacaccccagccaatgaagacgagaggcagcgtgaacaaagtcatttagaaagcccccgaggaagtgtaaacaaaagagaaagcatgaatggagtgcctgagagacaagtgtgtcctgtactgcccccacctttagctgggccagcaactgcccggccctgcttctccccacctactcactggtgatctttttttttttacttttttttcccttttcttttccattctcttttcttattttctttcaaggcaaggcaaggattttgattttgggacccagccatggtccttctgcttcttctttaaaatacccactttctccccatcgccaagcggcgtttggcaatatcagatatccactctatttatttttacctaaggaaaaactccagctcccttcccactcccagctgccttgccacccctcccagccctctgcttgccctccacctggcctgctgggagtcagagcccagcaaaacctgtttagacacatggacaagaatcccagcgctacaaggcacacagtccgcttcttcgtcctcagggttgccagcgcttcctggaagtcctgaagctctcgcagtgcagtgagttcatgcaccttcttgccaagcctcagtctttgggatctggggaggccgcctggttttcctccctccttctgcacgtctgctggggtctcttcctctccaggccttgccgtccccctggcctctcttcccagctcacacatgaagatgcacttgcaaagggctctggtggtcctggccctgctgaactttgccacggtcagcctctctctgtccacttgcaccaccttggacttcggccacatcaagaagaagagggtggaagccattaggggacagatcttgagcaagctcaggctcaccagcccccctgagccaacggtgatgacccacgtcccctatcaggtcctggccctttacaacagcacccgggagctgctggaggagatgcatggggagagggaggaaggctgcacccaggaaaacaccgagtcggaatactatgccaaagaaatccataaattcgacatgatccaggggctggcggagcacaacgaactggctgtctgccctaaaggaattacctccaaggttttccgcttcaatgtgtcctcagtggagaaaaatagaaccaacctattccgagcagaattccgggtcttgcgggtgcccaaccccagctctaagcggaatgagcagaggatcgagctcttccagatccttcggccagatgagcacattgccaaacagcgctatatcggtggcaagaatctgcccacacggggcactgccgagtggctgtcctttgatgtcactgacactgtgcgtgagtggctgttgagaagagagtccaacttaggtctagaaatcagcattcactgtccatgtcacacctttcagcccaatggagatatcctggaaaacattcacgaggtgatggaaatcaaattcaaaggcgtggacaatgaggatgaccatggccgtggagatctggggcgcctcaagaagcagaaggatcaccacaaccctcatctaatcctcatgatgattcccccacaccggctcgacaacccgggccaggggggtcagaggaagaagcgggctttggacaccaattactgcttccgcaacttggaggagaactgctgtgtgcgccccctctacattgacttccgacaggatctgggctggaagtgggtccatgaacctaagggctactatgccaacttctgctcaggcccttgcccatacctccgcagtgcagacacaacccacagcacggtgctgggactgtacaacactctgaaccctgaagcatctgcctcgccttgctgcgtgccccaggacctggagcccctgaccatcctgtactatgttgggaggacccccaaagtggagcagctctccaacatggtggtgaagtcttgtaaatgtagctgagaccccacgtgcgacagagagaggggagagagaaccaccactgcctgactgcccgctcctcgggaaacacacaagcaacaaacctcactgagaggcctggagcccacaaccttcggctccgggcaaatggctgagatggaggtttccttttggaacatttctttcttgctggctctgagaatcacggtggtaaagaaagtgtgggtttggttagaggaaggctgaactcttcagaacacacagactttctgtgacgcagacagaggggatggggatagaggaaagggatggtaagttgagatgttgtgtggcaatgggatttgggctaccctaaagggagaaggaagggcagagaatggctgggtcagggccagactggaagacacttcagatctgaggttggatttgctcattgctgtaccacatctgctctagggaatctggattatgttatacaaggcaagcattttttttttttttttaaagacaggttacgaagacaaagtcccagaattgtatctcatactgtctgggattaagggcaaatctattacttttgcaaactgtcctctacatcaattaacatcgtgggtcactacagggagaaaatccaggtcatgcagttcctggcccatcaactgtattgggccttttggatatgctgaacgcagaagaaagggtggaaatcaaccctctcctgtctgccctctgggtccctcctctcacctctccctcgatcatatttccccttggacacttggttagacgccttccaggtcaggatgcacatttctggattgtggttccatgcagccttggggcattatgggttcttcccccacttcccctccaagaccctgtgttcatttggtgttcctggaagcaggtgctacaacatgtgaggcattcggggaagctgcacatgtgccacacagtgacttggccccagacgcatagactgaggtataaagacaagtatgaatattactctcaaaatctttgtataaataaatatttttggggcatcctggatgatttcatcttctggaatattgtttctagaacagtaaaagccttattctaaggtg

SEQ ID NO: 1973 - DNA, 6475 bp, Homo Sapiens
  NM_003243
gagagcccccggtggggccggcggaggagcgcccttccccccgcgcgctgattgctgtggcgtcctgcccgtccccgcccgcgtgtgtgcgagggagggcgagtgcgccgggtcggcctgatgggggtaatcgagggtttcggggacgccgagcggcactttcctcttcccagcgagtgaaggagggcagtcggcggctctcgcgccccggccactttccctgcgcgattcccggagctccctgcaggaggtgagagtccccagcgggtccggatggcgtagttttgccgcggcgcagcagctgccggagctcgccgccgccgagcgctgggcggggaaacttgccgccgctttcctccaacttgctgcgggtggatctccgctggacacaccgcctccgaggcagtttgaaaattgcaaggagggactttaagactacttctgatttgcaaagattgtctgtgctctgagcaggctgaagtgactggacgagacgcactgttggagaaataaaaatgacttcccattatgtgattgccatctttgccctgatgagctcctgtttagccactgcaggtccagagcctggtgcactgtgtgaactgtcacctgtcagtgcctcccatcctgtccaggccttgatggagagcttcactgttttgtcaggctgtgccagcagaggcacaactgggctgccacaggaggtgcatgtcctgaatctccgcactgcaggccaggggcctggccagctacagagagaggtcacacttcacctgaatcccatctcctcagtccacatccaccacaagtctgttgtgttcctgctcaactccccacaccccctggtgtggcatctgaagacagagagacttgccactggggtctccagactgtttttggtgtctgagggttctgtggtccagttttcatcagcaaacttctccttgacagcagaaacagaagaaaggaacttcccccatggaaatgaacatctgttaaattgggcccgaaaagagtatggagcagttacttcattcaccgaactcaagatagcaagaaacatttatattaaagtgggggaagatcaagtgttccctccaaagtgcaacatagggaagaattttctctcactcaattaccttgctgagtaccttcaacccaaagcagcagaagggtgtgtgatgtccagccagccccagaatgaggaagtacacatcatcgagctaatcacccccaactctaacccctacagtgctttccaggtggatataacaattgatataagaccttctcaagaggatcttgaagtggtcaaaaatctcatcctgatcttgaagtgcaaaaagtctgtcaactgggtgatcaaatcttttgatgttaagggaagcctgaaaattattgctcctaacagtattggctttggaaaagagagtgaaagatctatgacaatgaccaaatcaataagagatgacattccttcaacccaagggaatctggtgaagtgggctttggacaatggctatagtccaataacttcatacacaatggctcctgtggctaatagatttcatcttcggcttgaaaataatgcagaggagatgggagatgaggaagtccacactattcctcctgagctacggatcctgctggaccctggtgccctgcctgccctgcagaacccgcccatccggggaggggaaggccaaaatggaggccttccgtttcctttcccagatatttccaggagagtctggaatgaagagggagaagatgggctccctcggccaaaggaccctgtcattcccagcatacaactgtttcctggtctcagagagccagaagaggtgcaagggagcgtggatattgccctgtctgtcaaatgtgacaatgagaagatgatcgtggctgtagaaaaagattcttttcaggccagtggctactcggggatggacgtcaccctgttggatcctacctgcaaggccaagatgaatggcacacactttgttttggagtctcctctgaatggctgcggtactcggccccggtggtcagcccttgatggtgtggtctactataactccattgtgatacaggttccagcccttggggacagtagtggttggccagatggttatgaagatctggagtcaggtgataatggatttccgggagatatggatgaaggagatgcttccctgttcacccgacctgaaatcgtggtgtttaattgcagccttcagcaggtgaggaaccccagcagcttccaggaacagccccacggaaacatcaccttcaacatggagctatacaacactgacctctttttggtgccctcccagggcgtcttctctgtgccagagaatggacacgtttatgttgaggtatctgttactaaggctgaacaagaactgggatttgccatccaaacgtgctttatctctccatattcgaaccctgataggatgtctcattacaccattattgagaatatttgtcctaaagatgaatctgtgaaattctacagtcccaagagagtgcactttcctatcccgcaagctgacatggataagaagcgattcagctttgtcttcaagcctgtcttcaacacctcactgctctttctacagtgtgagctgacgctgtgtacgaagatggagaagcacccccagaagttgcctaagtgtgtgcctcctgacgaagcctgcacctcgctggacgcctcgataatctgggccatgatgcagaataagaagacgttcactaagccccttgctgtgatccaccatgaagcagaatctaaagaaaaaggtccaagcatgaaggaaccaaatccaatttctccaccaattttccatggtctggacaccctaaccgtgatgggcattgcgtttgcagcctttgtgatcggagcactcctgacgggggccttgtggtacatctattctcacacaggggagacagcaggaaggcagcaagtccccacctccccgccagcctcggaaaacagcagtgctgcccacagcatcggcagcacgcagagcacgccttgctccagcagcagcacggcctagcccaacccagcccaacccggcccaacccagcccagcccagctcagctcagctactgccaagggcaggaccaatggctgagcctcgtgtccagactcagagggctggattttggttcccttgtaaagacagagtgaatttcagtataaagatcacccgttgtattcaccccacacccagggctagtataaacatgaccctgggcttctgtaccacactagaattcatgtgagaaagctaaaatggtggtcttctccaccagcccctcacaggcttgggggttttcaatgtgaaacacatgccagtttttaaaatgctgctttgtccaggtgagaacatccataatttggggccctgagttttacccagactcaaggagttggtaaagggttaatagccagatagtagaaccagtgaggagatgcggccaaagattctttatatctgaaccaagatgtaaaacaagaaatgctttgaggctttctaagcgatcctcctgtctaatttgcacctttgtctggatgcacacttctgaccttgctgccacaacctgtggggtctgatgtgtcccttgatgggtgctgccctcagggactgcaccctgacaagtgttaaggcaacattcctttcttgtgccctgggccaaaaccaatgctgatgaccttatcagcttcctgtttcttcccatacttgcatacaccactgcaaaatgtcttaatgcaaattttgtatttcttacaggcctacagaaattgaaaatgaccaaaatcaggaaccacagatttgtgcccattcctaatattttgttctgcaaattaatgtataatttgaggtgaaattcagttataaagtcaaggacgaatttgcacagtgatatatttctatgtgtatgcaagtacaagtatataatatgtcacctggcacattcattttctcagttgaagaagagaaaatttgaaaatgtccttatgcttttagagttgcaacttaagtatatttggtagggtgagtgtttccactcaaaatatgtcaacttaaaaaaaaataggccctttcataaaaaccaaactgtagcaagatgcaaatgcatggcaaatcctgtcggtctccagttggttatctgaatagtgtcaccaattccaccaagacagtgctgagattggaaaagggcactcatttggattgccttacttctcttgccttaaatatatcccatatatttaatatgtcaaaaagggcttgaggtgaatttcattaaatggaataatatgatgccactttgcagctaaaataagctcagtgatacctccttgttaaaaaaaaaaaaaaaaaaaaagaatgccaggggggaattatcatgctaaattattttactgctgaagatagcttcattgcaaattattctttttccagaatttcccccaaacaacttagaattccataagtagaacaagatagattctacccccaaaatattcataagcaaatcccactgcccttaaaataaggaagttatgcctggttgtctgtgaatggaacctcagtaggtaatcctgatgaagcttaaaaccttagggcagtgtctacatgggaaacaagtatgtggaaattgacaatcatttttaccaaatcgttgagtaataatatgacttacctgatagatatacacattcaataaggaacatttttttttttcaataaggaacattttaactaaaacattactttagggctgagatttccaggctatctacattgatctactgaaaaatttctagatttccatatacaaacgaagaagacatgagtttagagaatttttttcctttaatttttttttaacagaagggtatcagagtggaggacctagattacgctacctgtgtttgaaaatattgcgctttgcctaaccttcggtggaatgtattgtttcagcatattctatgtataaaaaagtttaaagatgtcttcaaagaagactagagtctttaagtcacttatagctatattttactacaaaatttgtgtataaagatatatttaagtgttttagataaatttaagttactccatatgaaatgtttaatttcagctactgtgaattctttcgatcagtcctttgcttttttaaaaaatcttttccatcgtgttaaaaagaaaattagctattaggagatattaaaagattgatgtcttagaaggacagggttaaaaccttctgtaatatatttaaatatatatttttaagagagatgctacattgccaatgattttataaataatttaaaattaatttacaaatttatagatgcaaaccaaaagatctttttaaaagagagagagaggaaaaaaatcaccttttatttgtttgggtctcattgtcagaattattattcagatcaagaaatctgtgtcgataaaacctaatctcatattggagagtgaatgtcgttaagtatttctgaaatgtttctaaaaaatgaacatgaaaaaaataaggtattttctccctagcttctcattacagtatttctaattgcttcacactttacagttttaatacaaagtacaagctctacttttataacgtgtactacaagtttctttaaaagtattgttgtatttcagctgaactcttgtatctgcagtcttttgttatttctgcaggctacacccttaatttgcagaggccattttgttgtttgtttgatgctgaagctgttgttaaaatgccccaaactccaaggcagattgtctgtataatacgctatagcttttcaccatgtggtgtttaccagctgttactctgtattttaaaaagccagagatttcttctgtctaaactgtttctatagcattttctaaacaaaaaaaatggtttttttctttgccttgtaataagattgtaaatccatttcctgcttgtgttcttagtgggcatgattgtgagtgtgtgtggggtgctcacacgcgtgccagtctttttgtactgtaactacctcatggtttgaatgatgattgtactgctggttgtgttaacagagcacattttgttgggtgagtcctatgtgatttttttcatgtttgttttatctgggggttgttcatgaaactgacagatgtttttctaaaaaggactattatcagtttccaaatacaatacttctctcttctggtttttcctgaatgagcctgattttgttgctggttttcatcatctatgagggtaaaacgagtacccttaaaatccctgtggccagtttgaacacccctgttgtattcttttctctgttcagtgtgtcagctattttgtgaagatgcttagatgtatagttttgataaccacagttttaaatcttttatctgtgcataataaaaagatatatatcagttattaaaaaaaaaa

SEQ ID NO: 1974 - DNA, 2679 bp, Homo Sapiens
  NM_003245
attctataaatggtaaggcaatccttggcagcctgtctgtcagcactgtccgtgccattcccagaggagcctgagaagaggcagaggaaggcgaaacatggctgctctaggagtccagagtatcaactggcagacggccttcaaccgacaagcgcatcacacagacaagttctccagccaggagctcatcttgcggagaggccaaaacttccaggtcttaatgatcatgaacaaaggccttggctctaacgaaagactggagttcattgtctccacagggccttacccctcagagtcggccatgacgaaggctgtgtttccactctccaatggcagtagtggtggctggagtgcggtgcttcaggccagcaatggcaatactctgactatcagcatctccagtcctgccagcgcacccataggacggtacacaatggccctccagatcttctcccagggcggcatctcctctgtgaaacttgggacgttcatactgctttttaacccctggctgaatgtggatagcgtctttatgggtaaccacgctgagagagaagagtatgttcaggaagatgccggcatcatctttgtgggaagcacaaaccgaattggcatgattggctggaactttggacagtttgaagaagacattctcagcatctgcctctcaatcttggataggagtctgaatttccgccgtgacgctgctactgatgtggccagcagaaatgaccccaaatacgttggccgggtgctgagtgccatgatcaatagcaatgatgacaatggtgtgcttgctgggaattggagcggcacttacaccggtggccgggacccaaggagctggaacggcagcgtggagatcctcaaaaattggaaaaaatctggcttcagcccagtccgatatggccagtgctgggtctttgctgggaccctcaacacagcgctgcggtctttggggattccttcccgggtgatcaccaacttcaactcagctcatgacacagaccgaaatctcagtgtggatgtgtactacgaccccatgggaaaccccctggacaagggtagtgatagcgtatggaatttccatgtctggaatgaaggctggtttgtgaggtctgacctgggcccctcgtacggtggatggcaggtgttggatgctaccccgcaggaaagaagccaaggggtgttccagtgcggccccgcttcggtcattggtgttcgagagggtgatgtgcagctgaacttcgacatgccctttatcttcgcggaggttaatgccgaccgcatcacctggctgtacgacaacaccactggcaaacagtggaagaattccgtgaacagtcacaccattggcaggtacatcagcaccaaggcggtgggcagcaatgctcgcatggacgtcacggacaagtacaagtacccagaaggctctgaccaggaaagacaagtgttccaaaaggctttggggaaacttaaacccaacacgccatttgccgcgacgtcttcaatgggtttggaaacagaggaacaggagcccagcatcatcgggaagctgaaggtcgctggcatgctggcagtaggcaaagaagtcaacctggtcctactgctcaaaaacctgagcagggatacgaagacagtgacagtgaacatgacagcctggaccatcatctacaacggcacgcttgtacatgaagtgtggaaggactctgccacaatgtccctggaccctgaggaagaggcagaacatcccataaagatctcgtacgctcagtatgagaagtacctgaagtcagacaacatgatccggatcacagcggtgtgcaaggtcccagatgagtctgaggtggtggtggagcgggacatcatcctggacaaccccaccttgaccctggaggtgctgaacgaggctcgtgtgcggaagcctgtgaacgtgcagatgctcttctccaatccactggatgagccggtgagggactgcgtgctgatggtggagggaagcggcctgctgttgggtaacctgaagatcgacgtgccgaccctagggcccaaggaggggtcccgggtccgttttgatatcctgccctcccggagtggcaccaagcaactgctcgccgacttctcctgcaacaagttccctgcaatcaaggccatgttgtccatcgatgtagccgaatgaagggcgctggtggcctcccgtacaaacttggacaacacggagcagggagagctcaccatggaatgaaccccccgcccatgctgtccggcctgggaaaccctctccatctcccaaggctgccagacatggacctccaggctccagcacatccccctctcctctcccccaggttggggctgggtccaccctgtcctatgacttgatcacttttgcacattccctggccgcttctccccagagctgcctgctctgtgagccccacagccctgctcattcctcacgcccttcaatgctgcaggatggactggcccctgacccagggactctccaaacgggatacaggagagaagctggtctagactgtttgctgatccccaacctgcacggggcattcctgcttctctctcaggccaccacagagggcaggggatggttagtcacctgccccagcactcacaccctaactcaaaataaatgttaaataagtgcgatcacacaaa

SEQ ID NO: 1975 - DNA, 5820 bp, Homo Sapiens
  NM_003246
agccgctgcgcccgagctggcctgcgagttcagggctcctgtcgctctccaggagcaacctctactccggacgcacaggcattccccgcgcccctccagccctcgccgccctcgccaccgctcccggccgccgcgctccggtacacacaggatccctgctgggcaccaacagctccaccatggggctggcctggggactaggcgtcctgttcctgatgcatgtgtgtggcaccaaccgcattccagagtctggcggagacaacagcgtgtttgacatctttgaactcaccggggccgcccgcaaggggtctgggcgccgactggtgaagggccccgacccttccagcccagctttccgcatcgaggatgccaacctgatcccccctgtgcctgatgacaagttccaagacctggtggatgctgtgcgggcagaaaagggtttcctccttctggcatccctgaggcagatgaagaagacccggggcacgctgctggccctggagcggaaagaccactctggccaggtcttcagcgtggtgtccaatggcaaggcgggcaccctggacctcagcctgaccgtccaaggaaagcagcacgtggtgtctgtggaagaagctctcctggcaaccggccagtggaagagcatcaccctgtttgtgcaggaagacagggcccagctgtacatcgactgtgaaaagatggagaatgctgagttggacgtccccatccaaagcgtcttcaccagagacctggccagcatcgccagactccgcatcgcaaaggggggcgtcaatgacaatttccagggggtgctgcagaatgtgaggtttgtctttggaaccacaccagaagacatcctcaggaacaaaggctgctccagctctaccagtgtcctcctcacccttgacaacaacgtggtgaatggttccagccctgccatccgcactaactacattggccacaagacaaaggacttgcaagccatctgcggcatctcctgtgatgagctgtccagcatggtcctggaactcaggggcctgcgcaccattgtgaccacgctgcaggacagcatccgcaaagtgactgaagagaacaaagagttggccaatgagctgaggcggcctcccctatgctatcacaacggagttcagtacagaaataacgaggaatggactgttgatagctgcactgagtgtcactgtcagaactcagttaccatctgcaaaaaggtgtcctgccccatcatgccctgctccaatgccacagttcctgatggagaatgctgtcctcgctgttggcccagcgactctgcggacgatggctggtctccatggtccgagtggacctcctgttctacgagctgtggcaatggaattcagcagcgcggccgctcctgcgatagcctcaacaaccgatgtgagggctcctcggtccagacacggacctgccacattcaggagtgtgacaagagatttaaacaggatggtggctggagccactggtccccgtggtcatcttgttctgtgacatgtggtgatggtgtgatcacaaggatccggctctgcaactctcccagcccccagatgaacgggaaaccctgtgaaggcgaagcgcgggagaccaaagcctgcaagaaagacgcctgccccatcaatggaggctggggtccttggtcaccatgggacatctgttctgtcacctgtggaggaggggtacagaaacgtagtcgtctctgcaacaaccccacaccccagtttggaggcaaggactgcgttggtgatgtaacagaaaaccagatctgcaacaagcaggactgtccaattgatggatgcctgtccaatccctgctttgccggcgtgaagtgtactagctaccctgatggcagctggaaatgtggtgcttgtccccctggttacagtggaaatggcatccagtgcacagatgttgatgagtgcaaagaagtgcctgatgcctgcttcaaccacaatggagagcaccggtgtgagaacacggaccccggctacaactgcctgccctgccccccacgcttcaccggctcacagcccttcggccagggtgtcgaacatgccacggccaacaaacaggtgtgcaagccccgtaacccctgcacggatgggacccacgactgcaacaagaacgccaagtgcaactacctgggccactatagcgaccccatgtaccgctgcgagtgcaagcctggctacgctggcaatggcatcatctgcggggaggacacagacctggatggctggcccaatgagaacctggtgtgcgtggccaatgcgacttaccactgcaaaaaggataattgccccaaccttcccaactcagggcaggaagactatgacaaggatggaattggtgatgcctgtgatgatgacgatgacaatgataaaattccagatgacagggacaactgtccattccattacaacccagctcagtatgactatgacagagatgatgtgggagaccgctgtgacaactgtccctacaaccacaacccagatcaggcagacacagacaacaatggggaaggagacgcctgtgctgcagacattgatggagacggtatcctcaatgaacgggacaactgccagtacgtctacaatgtggaccagagagacactgatatggatggggttggagatcagtgtgacaattgccccttggaacacaatccggatcagctggactctgactcagaccgcattggagatacctgtgacaacaatcaggatattgatgaagatggccaccagaacaatctggacaactgtccctatgtgcccaatgccaaccaggctgaccatgacaaagatggcaagggagatgcctgtgaccacgatgatgacaacgatggcattcctgatgacaaggacaactgcagactcgtgcccaatcccgaccagaaggactctgacggcgatggtcgaggtgatgcctgcaaagatgattttgaccatgacagtgtgccagacatcgatgacatctgtcctgagaatgttgacatcagtgagaccgatttccgccgattccagatgattcctctggaccccaaagggacatcccaaaatgaccctaactgggttgtacgccatcagggtaaagaactcgtccagactgtcaactgtgatcctggactcgctgtaggttatgatgagtttaatgctgtggacttcagtggcaccttcttcatcaacaccgaaagggacgatgactatgctggatttgtctttggctaccagtccagcagccgcttttatgttgtgatgtggaagcaagtcacccagtcctactgggacaccaaccccacgagggctcagggatactcgggcctttctgtgaaagttgtaaactccaccacagggcctggcgagcacctgcggaacgccctgtggcacacaggaaacacccctggccaggtgcgcaccctgtggcatgaccctcgtcacataggctggaaagatttcaccgcctacagatggcgtctcagccacaggccaaagacgggtttcattagagtggtgatgtatgaagggaagaaaatcatggctgactcaggacccatctatgataaaacctatgctggtggtagactagggttgtttgtcttctctcaagaaatggtgttcttctctgacctgaaatacgaatgtagagatccctaatcatcaaattgttgattgaaagactgatcataaaccaatgctggtattgcaccttctggaactatgggcttgagaaaacccccaggatcacttctccttggcttccttcttttctgtgcttgcatcagtgtggactcctagaacgtgcgacctgcctcaagaaaatgcagttttcaaaaacagactcagcattcagcctccaatgaataagacatcttccaagcatataaacaattgctttggtttccttttgaaaaagcatctacttgcttcagttgggaaggtgcccattccactctgcctttgtcacagagcagggtgctattgtgaggccatctctgagcagtggactcaaaagcattttcaggcatgtcagagaagggaggactcactagaattagcaaacaaaaccaccctgacatcctccttcaggaacacggggagcagaggccaaagcactaaggggagggcgcatacccgagacgattgtatgaagaaaatatggaggaactgttacatgttcggtactaagtcattttcaggggattgaaagactattgctggatttcatgatgctgactggcgttagctgattaacccatgtaaataggcacttaaatagaagcaggaaagggagacaaagactggcttctggacttcctccctgatccccacccttactcatcacctgcagtggccagaattagggaatcagaatcaaaccagtgtaaggcagtgctggctgccattgcctggtcacattgaaattggtggcttcattctagatgtagcttgtgcagatgtagcaggaaaataggaaaacctaccatctcagtgagcaccagctgcctcccaaaggaggggcagccgtgcttatatttttatggttacaatggcacaaaattattatcaacctaactaaaacattccttttctcttttttcctgaattatcatggagttttctaattctctcttttggaatgtagattttttttaaatgctttacgatgtaaaatatttattttttacttattctggaagatctggctgaaggattattcatggaacaggaagaagcgtaaagactatccatgtcatctttgttgagagtcttcgtgactgtaagattgtaaatacagattatttattaactctgttctgcctggaaatttaggcttcatacggaaagtgtttgagagcaagtagttgacatttatcagcaaatctcttgcaagaacagcacaaggaaaatcagtctaataagctgctctgccccttgtgctcagagtggatgttatgggattctttttttctctgttttatcttttcaagtggaattagttggttatccatttgcaaatgttttaaattgcaaagaaagccatgaggtcttcaatactgttttaccccatcccttgtgcatatttccagggagaaggaaagcatatacacttttttctttcatttttccaaaagagaaaaaaatgacaaaaggtgaaacttacatacaaatattacctcatttgttgtgtgactgagtaaagaatttttggatcaagcggaaagagtttaagtgtctaacaaacttaaagctactgtagtacctaaaaagtcagtgttgtacatagcataaaaactctgcagagaagtattcccaataaggaaatagcattgaaatgttaaatacaatttctgaaagttatgttttttttctatcatctggtataccattgctttatttttataaattattttctcattgccattggaatagatatctcagattgtgtagatatgctatttaaataatttatcaggaaatactgcctgtagagttagtatttctatttttatataatgtttgcacactgaattgaagaattgttggttttttcttttttttgttttgtttttttttttttttttttttgcttttgacctcccatttttactatttgccaatacctttttctaggaatgtgcttttttttgtacacatttttatccattttacattctaaagcagtgtaagttgtatattactgtttcttatgtacaaggaacaacaataaatcatatggaaatttatatttataaaaaaaaaaaaaaaaaaaaaaaaaaaaaaa

SEQ ID NO: 1976 - DNA, 2568 bp, Homo Sapiens
  NM_003249
gccccgggagcgcgggcggcgggccccttggtcctcaggcggccgtggcggcggtggcggcggttgggccgaggcaggcggcctcagtggccgaggtggctggacgcgtagcaggtggaaggagggagggagccgcaggcgcagacccacccgccatgaagccccccgcagcctgtgcaggagacatggcggacgcagcatctccgtgctctgtggtaaacgacctgcggtgggacctgagtgcccagcagatagaggagcgcaccagggagctcatcgagcagaccaagcgcgtgtatgaccaggttggcacccaggagtttgaggacgtgtcctacgagagcacgctcaaggcgctggccgatgtggaggtcacctacacagttcagaggaatatccttgacttcccccagcatgtttccccctccaaggacatccggacagccagcacagaggccgacaagaagctctctgagttcgacgtggagatgagcatgagggaggacgtgtaccagaggatcgtgtggctccaggagaaagttcagaaggactcactgaggcccgaggctgcgcggtacctggagcggctaatcaagctgggccggagaaatgggcttcacctccccagagagactcaggaaaacatcaaacgcatcaagaagaagctgagccttctgtgcatcgacttcaacaagaacctgaacgaggacacgaccttcctgcccttcacgctccaggagctaggagggctccccgaggactttctgaactccctggagaagatggaggacggcaagttgaaggtcaccctcaagtacccccattacttccccctcctgaagaaatgccacgtgcctgagaccaggaggaaagtggaggaggccttcaactgccggtgcaaggaggagaactgcgctatcctcaaggagctggtgacgctgcgggcccagaagtcccgcctgctggggttccacacgcacgccgactatgtcctggagatgaacatggccaagaccagccagaccgtggccaccttcctagatgagctggcgcagaagctgaagcccctgggggagcaggagcgtgcggtgattctggagctgaagcgtgcggagtgcgagcgccggggcctgcccttcgacggccgcatccgtgcctgggacatgcgctactacatgaaccaggtggaggagacgcgctactgcgtggaccagaacctgctcaaggagtacttccccgtgcaggtggtcacgcacgggctgctgggcatctaccaggagctcctggggctggccttccaccacgaggagggcgccagtgcctggcatgaggacgtgcggctctacaccgcgagggacgcggcctcgggggaggtggtcggcaagttctacctggacctgtacccgcgggaaggaaagtacgggcacgcggcctgctttggcctgcagcccggctgcctgcggcaggatgggagccgccagatcgccatcgcggccatggtggccaacttcaccaagcccacagccgacgcgccctcgctgctgcagcatgacgaggtggagacctacttccatgagtttggccacgtgatgcaccagctctgctcccaggcggagttcgccatgttcagcgggacccacgtggagcgggactttgtggaggcgccgtcgcagatgctggagaactgggtgtgggagcaggagccgctgctgcggatgtcgcggcactaccgcacaggcagcgccgtgccccgggagctcctggagaagctcattgagtcccggcaggccaacacaggcctcttcaacctgcgccagatcgtcctcgccaaggtggaccaggccctgcacacgcagacggacgcagaccccgccgaggagtatgcgcggctctgccaggagatcctcggggtcccggccacgccaggaaccaacatgcctgcaaccttcggccatctggcaggtggctacgacgcccagtactacgggtacctgtggagcgaggtgtattccatggacatgttccacacgcgcttcaagcaggagggtgtcctgaacagcaaggttggcatggattacagaagctgcatcctgagacccggcggttccgaggatgccagcgccatgctgaggcgcttcctgggccgtgaccccaagcaggacgccttcctcctgagcaaggggctgcaggtcgggggctgcgagcccgagccgcaggtctgctgaggcctggcactgcgactgcccagtctggcctgcgctcccgccgccctggtgccttagcccccggcacaggatggggcaggctctggcacagtgcctgggactggcagggtggctgagcggctgtcttgcctcttgtcattgtctgtccccacccggtcgtggcccacccggctagagacggcgtcctcaaggcatctggagggctttcgtggctgccagggcctggtctttgttgcactaacacgtctcctctctgggaaacgtcccttgtcaggagacggctcttctttgaaatgaggtcattaaaaggaaacagaaaaagagaaaaaaaaaaaaaaaaaaa

SEQ ID NO: 1977 - DNA, 7218 bp, Homo Sapiens
  NM_003253
gccccgcatcgtgcccggccccgtcgcggagatcccggacgaccgtcgcgggttgatggtcgcattccagatgtaaacagcttcagaagcctgacggtcatatggtagaatcactgtggactgagacccacctttctagacctgaagcccaggaggaggaagaggaggctggttggtaccatgggcataatgctctgaatcctagtctctcacctagtatgtgagcagtccctgcagatggcccatttggagatcttgacaaagcctcttctgtttccaatggggtttttggcgcattctcacagacttagatgaaactgtgatggccaccgcagggggcaggtgctgacatcgtccccagccctgtggctgttcatccggacatcatttccaacctcaatatctaaatgccacagtgctcttggagcaagttgggctggggaccactgttgccttttaagaccataaaaccatgggaaacgcagaaagtcaacatgtagagcacgagttttatggagaaaagcatgccagcctggggcgcaagcacacttcccgctccctgcgcctctcgcacaagacgcggaggaccaggcacgcttcctcggggaaggtgatccacaggaactccgaagtgagcacccgatccagcagcacccccagcatcccccagtccctggctgaaaatggcctggagcccttctcccaagatggtaccctagaagacttcgggagccccatctgggtggaccgagtggacatgggcttgagacctgtgtcttacactgactcttctgtcactcccagcgtagacagcagcatcgtcctcacagcagcctctgtgcagagcatgccagacactgaggagagcaggctttacggggatgacgctacatatttggctgagggaggcaggaggcagcattcctatacatccaatgggcccactttcatggagacggcgagctttaagaagaaacgctccaaatctgcagacatctggcgggaggacagcctggaattctcactctctgatctgagccaagaacatttaacaagcaacgaagaaatcttgggttccgccgaagagaaggactgcgaggaggctcgggggatggaaacgcgggcgagtccgcggcagctcagcacctgtcagagagccaattccttgggtgacttgtatgctcagaaaaactctggagtgacagcaaacggggggccggggagcaaatttgcaggctactgtcggaatttggtgtctgatattcccaatcttgcaaaccataagatgccaccagctgctgctgaagagactcctccgtacagtaattataacacacttccctgtaggaaatctcactgtctctctgaaggtgccaccaacccacaaattagccatagcaacagcatgcaaggcagaagagctaaaacaactcaggatgttaatgcaggcgagggcagtgagtttgcagacagtgggattgaaggggccactaccgacacggacctcctgtccaggcgatctaatgccaccaactccagctactcacccaccacaggccgggcctttgtgggcagcgacagcggcagcagctccaccggggatgcggctcgtcagggggtgtacgagaacttccggcgggagctggagatgagcaccaccaacagcgagagcctggaggaggccggctcggcgcacagcgatgagcagagcagcggcaccctgagctctccgggccagtcggacatcctgctgaccgccgcacagggcacggtgcgcaaggccggcgccctggccgtcaagaacttcctggtgcacaagaagaacaagaaggtggagtcagccacccggaggaagtggaagcactactgggtgtccctgaaaggatgcacgctatttttctacgagagcgacggcaggtctgggatagaccacaacagcatccccaaacacgccgtctgggtggagaacagcattgtgcaggcggtgcctgagcaccccaagaaggactttgtcttctgcctcagcaattccctgggtgatgccttcctttttcagaccactagccagacggagcttgaaaactggatcaccgccatccactctgcctgcgccactgcggtcgcgaggcaccaccacaaggaagacacgctccgactcctgaaatcagagatcaaaaaactggaacagaagattgacatggatgaaaagatgaagaaaatgggtgaaatgcagctgtcttcagtcactgactcaaagaaaaagaaaacaatattagatcagatctttgtctgggagcaaaatctcgagcagttccaaatggacctgtttcgtttccgctgttatttagccagccttcagggtggggagctgccaaaccccaaaaggcttctcgcttttgcaagtcgaccaacgaaagtggccatgggccgccttggaatcttttcggtatcatcgtttcatgccctggtggcagcacgcactggtgaaactggagtgagaagacgtactcaggccatgtccagatccgcgagcaagcgaaggagcaggttttcttctctgtggggtctggatactacctccaaaaagaagcagggacggccaagcatcaatcaggtgtttggagagggaaccgaagctgtaaagaaatctttagagggaatatttgatgacattgttccagatggcaagagggagaaagaagtggtcttacctaacgttcaccagcacaaccctgactgcgacatttgggtccacgagtatttcactccatcctggttctgtctgcccaataatcagcctgccctgacggtcgtccggccaggcgacactgcacgggacaccctggagctgatttgcaagacacatcaactggatcattctgctcattacctgcgcctgaaatttctaatagaaaacaaaatgcagctctatgttccacagcccgaggaagacatctatgagctgctgtacaaagaaattgaaatctgtccaaaagtcactcagagcatccacattgagaagtcagatacagctgctgatacttacgggttttcactttcttctgtggaagaagatggtattcgaaggctgtacgtgaatagtgtgaaggaaaccggtttagcttccaagaaaggcctgaaagcaggagatgagattcttgagatcaataatcgtgctgctgacgccctgaactcttctatgctcaaagatttcctctcacagccctcgctgggcctcctggtgaggacctaccccgagctggaggaaggagtggagctgctggaaagcccgccccaccgagtggacggccctgccgaccttggcgagagccccctcgcctttctcaccagcaacccagggcacagcctttgcagcgagcagggcagcagtgctgagaccgctccagaggagaccgaggggccagacttggaatcctcagatgagactgatcacagcagcaagagtacagaacaggtggccgcattttgccgcagtttgcatgagatgaacccctctgaccagagcccatctcctcaggactccacggggcctcagctggcgaccatgagacaactctcggatgcagataagctgcgcaaggtgatctgcgagctcctggagacggagcgcacctacgtgaaggatttaaactgtcttatggagagatacctaaagcctcttcaaaaagaaacttttctcacccaggatgagcttgacgtgctttttggaaatttaacggaaatggtagagtttcaagtagaattccttaaaactctagaagatggagtgagactggtacctgatttggaaaagcttgagaaggttgatcaatttaagaaagtgctgttctctctggggggatcattcctgtattatgctgaccgcttcaagctctacagtgccttctgcgccagccacacaaaagttcccaaggtcctggtgaaagccaagacagacacggctttcaaggcattcttggatgcccagaacccgaagcagcagcactcatccacgctggagtcgtacctcatcaagcccatccagaggatcctcaagtacccacttctgctcagggagctgttcgccctgaccgatgcggagagcgaggagcactaccacctggacgtggccatcaagaccatgaacaaggttgccagtcacatcaatgagatgcagaaaatccatgaagagtttggggctgtgtttgaccagctgattgctgaacagactggtgagaaaaaagaggttgcagatctgagcatgggagacctgcttttgcacactaccgtgatctggctgaacccgccggcctcgctgggcaagtggaaaaaggaaccagagttggcagcattcgtcttcaaaactgctgtggtccttgtgtataaagatggttccaaacagaagaagaaacttgtaggatctcacaggctttccatttatgaggactgggaccccttcagatttcgacacatgatccccacggaagcgctgcaggttcgagctttggcgagtgcagatgcagaggcaaatgccgtgtgtgaaattgtccatgtaaaatccgagtctgaagggaggccggagagggtctttcacttgtgctgcagctccccagagagccgaaaggatttcctaaaggctgtgcattcaatcctgcgtgataagcacagaagacagctcctcaaaaccgagagccttccctcatcccagcaatatgtcccttttggaggcaaaagattgtgtgcactgaagggggccaggccggccatgagcagggcagtgtctgccccaagcaagtctcttgggaggaggaggcggcggctggctcgaaacaggtttaccattgattctgatgccgtctccgcaagcagcccggagaaagagtcccagcagccccccggtggtggggacactgaccgatgggtagaggagcagtttgatcttgctcagtatgaggagcaagatgacatcaaggagacagacatcctcagtgacgatgatgagttctgtgagtccgtgaagggtgcctcagtggacagagacctgcaggagcggcttcaggccacctccatcagtcagcgggaaagaggccggaaaaccctggatagtcacgcgtcccgcatggcacagctcaagaagcaagctgccctgtcggggatcaatggaggcctggagagcgcaagcgaggaagtcatttgggttaggcgtgaagactttgccccctccaggaaactgaacactgagatctgactgcgtcacctgccccgtagagaatgtgtgtagatacttcctgccctaactctgcccaccctcctgtaccgtcgacaagaatgtccccttaggtcgcgctcttgcacacacggttttggcagctgacttggttctgaagccatgtagccacccaactttgtcattttcaacaacatcagaaagaattgatcagaatcccaaataagcttgagtcctatcttctgtatattactaagggcttttatttattctcaataaatcagggcctgaacaattaaaagaaaaaagattctatagcactggaaagcaaatcaccccaggagttaacggatgtacaacagattaatttaagggatagtagcacacacacgatccttctatctgaaatcagtctcctagctggggaaacctctttcacacacaaaatgaaatgtgtacagcttgccgtgttctgactgtacccttccctcttccatgtctgagaatctccgtgtattttaagaatgtgtgaggagagggtggcgattcatgtttcaatgagcctctttttttttttccttcctgttttggtctatggctggtcttactctgtgtccatgttcggaagctctagttttgcatagaattatagagatgccaaactctttgaaaagagatccaaatttatcgcttgagagaaagaaaagaaacactattttttgtattttacctgagatacaggggcacaaatagatgagaattttacagtgttagtgtatgtatccctgagcctaaaaaatgaggatataaccttttacagagagagtgaggcgtggtggttttatatttatatatgaaaggccagcaagctcatgcgaaggatatacttttcttccaaaaagcggattttttttttttaatgtttgaatctatatttgagatgggagtttggttggattaaacatgacaccccggtgggcggtgtgtgtgtctgttgcacatggcagggaggggagcctccttctcatggggttgccatggtgatcattggtttttccatcaaaattgcatcttcatccatagattaccttccccttccctgacagtccataaccaaacctttaaacagaacaacctctttaaaaacttctcttgtgtttaacactttcttcatgccaacgaaacagggtaaacatgctcaaaacattaacagtctaaacagatatccaaatactaagaagaaaaacaagttatagcactttcaattttttttttttttttaaaaaaaggtttatagctttttcttttcccatgtcacaatgtccacttcctaagaagggtttaaaatactatgaaaactttctttttggggaaaatatctatttggtgtttgacacatcagtaggtactttaaagacctgaattttatagtagctttaggagttatattttataaaaatcagttatgactttatatttccagacaatagagagttcagtacatcatgctcttgtgcctctgcctgcttttcctgcgttcccaccctgtattccccccgcctttcgggtttccagggcttcgagcttgatcttttgaaagttttattctattaaatttttgctatatcttctggttttctgaaaaagctttagaatggtttctataccctttgtatcactgcatttttccatatcatctccggttcgatcgcgtccagatggaaaacggaagcagaggcttctaatcgtcgcatttactggctccagtgcaacacatccatctgaaaacactcggaagtctggtgcttggagagggtgccattgtctcttgtacataaggtcatgacgtgtctatgtcaaaagttcttatatatttcttttataagctgaaagaaggtctatttttatgtttttaggtctatgaatggaacgttgtaaatgcttgtcaaacaataaaaataacgaaaagtgaaaaaaaaaaaaaaaaaaaa

SEQ ID NO: 1978 - DNA, 931 bp, Homo Sapiens
  NM_003254
tttcgtcggcccgccccttggcttctgcactgatggtgggtggatgagtaatgcatccaggaagcctggaggcctgtggtttccgcacccgctgccacccccgcccctagcgtggacatttatcctctagcgctcaggccctgccgccatcgccgcagatccagcgcccagagagacaccagagaacccaccatggccccctttgagcccctggcttctggcatcctgttgttgctgtggctgatagcccccagcagggcctgcacctgtgtcccaccccacccacagacggccttctgcaattccgacctcgtcatcagggccaagttcgtggggacaccagaagtcaaccagaccaccttataccagcgttatgagatcaagatgaccaagatgtataaagggttccaagccttaggggatgccgctgacatccggttcgtctacacccccgccatggagagtgtctgcggatacttccacaggtcccacaaccgcagcgaggagtttctcattgctggaaaactgcaggatggactcttgcacatcactacctgcagttttgtggctccctggaacagcctgagcttagctcagcgccggggcttcaccaagacctacactgttggctgtgaggaatgcacagtgtttccctgtttatccatcccctgcaaactgcagagtggcactcattgcttgtggacggaccagctcctccaaggctctgaaaagggcttccagtcccgtcaccttgcctgcctgcctcgggagccagggctgtgcacctggcagtccctgcggtcccagatagcctgaatcctgcccggagtggaagctgaagcctgcacagtgtccaccctgttcccactcccatctttcttccggacaatgaaataaagagttaccacccagcagaaaaaaaaaaaaaaaa

SEQ ID NO: 1979 - DNA, 3670 bp, Homo Sapiens
  NM_003255
cgcagcaaacacatccgtagaaggcagcgcggccgccgagaaccgcagcgccgctcgcccgccgccccccaccccgccgccccgcccggcgaattgcgccccgcgcccctcccctcgcgcccccgagacaaagaggagagaaagtttgcgcggccgagcggggcaggtgaggagggtgagccgcgcgggaggggcccgcctcggccccggctcagcccccgcccgcgcccccagcccgccgccgcgagcagcgcccggaccccccagcggcggcccccgcccgcccagccccccggcccgccatgggcgccgcggcccgcaccctgcggctggcgctcggcctcctgctgctggcgacgctgcttcgcccggccgacgcctgcagctgctccccggtgcacccgcaacaggcgttttgcaatgcagatgtagtgatcagggccaaagcggtcagtgagaaggaagtggactctggaaacgacatttatggcaaccctatcaagaggatccagtatgagatcaagcagataaagatgttcaaagggcctgagaaggatatagagtttatctacacggccccctcctcggcagtgtgtggggtctcgctggacgttggaggaaagaaggaatatctcattgcaggaaaggccgagggggacggcaagatgcacatcaccctctgtgacttcatcgtgccctgggacaccctgagcaccacccagaagaagagcctgaaccacaggtaccagatgggctgcgagtgcaagatcacgcgctgccccatgatcccgtgctacatctcctccccggacgagtgcctctggatggactgggtcacagagaagaacatcaacgggcaccaggccaagttcttcgcctgcatcaagagaagtgacggctcctgtgcgtggtaccgcggcgcggcgccccccaagcaggagtttctcgacatcgaggacccataagcaggcctccaacgcccctgtggccaactgcaaaaaaagcctccaagggtttcgactggtccagctctgacatcccttcctggaaacagcatgaataaaacactcatcccatgggtccaaattaatatgattctgctccccccttctccttttagacatggttgtgggtctggagggagacgtgggtccaaggtcctcatcccatcctccctctgccaggcactatgtgtctggggcttcgatccttgggtgcaggcagggctgggacacgcggcttccctcccagtccctgccttggcaccgtcacagatgccaagcaggcagcacttagggatctcccagctgggttagggcagggcctggaaatgtgcattttgcagaaacttttgagggtcgttgcaagactgtgtagcaggcctaccaggtccctttcatcttgagagggacatggcccttgttttctgcagcttccacgcctctgcactccctgcccctggcaagtgctcccatcgccccggtgcccaccatgagctcccagcacctgactccccccacatccaagggcagcctggaaccagtggctagttcttgaaggagccccatcaatcctattaatcctcagaattccagtgggagcctccctctgagccttgtagaaatgggagcgagaaaccccagctgagctgcgttccagcctcagctgagtctttttggtctgcacccacccccccacccccccccccccgcccacatgctccccagcttgcaggaggaatcggtgaggtcctgtcctgaggctgctgtccggggccggtggctgccctcaaggtcccttccctagctgctgcggttgccattgcttcttgcctgttctggcatcaggcacctggattgagttgcacagctttgctttatccgggcttgtgtgcagggcccggctgggctccccatctgcacatcctgaggacagaaaaagctgggtcttgctgtgccctcccaggcttagtgttccctccctcaaagactgacagccatcgttctgcacggggctttctgcatgtgacgccagctaagcatagtaagaagtccagcctaggaagggaaggattttggaggtaggtggctttggtgacacactcacttctttctcagcctccaggacactatggcctgttttaagagacatcttatttttctaaaggtgaattctcagatgataggtgaacctgagttgcagatataccaacttctgcttgtatttcttaaatgacaaagattacctagctaagaaacttcctagggaactagggaacctatgtgttccctcagtgtggtttcctgaagccagtgatatgggggttaggataggaagaactttctcggtaatgataaggagaatctcttgtttcctcccacctgtgttgtaaagataaactgacgatatacaggcacattatgtaaacatacacacgcaatgaaaccgaagcttggcggcctgggcgtggtcttgcaaaatgcttccaaagccaccttagcctgttctattcagcggcaaccccaaagcacctgttaagactcctgacccccaagtggcatgcagcccccatgcccaccgggacctggtcagcacagatcttgatgacttccctttctagggcagactgggagggtatccaggaatcggcccctgccccacgggcgttttcatgctgtacagtgacctaaagttggtaagatgtcataatggaccagtccatgtgatttcagtatatacaactccaccagacccctccaacccatataacaccccacccctgttcgcttcctgtatggtgatatcatatgtaacatttactcctgtttctgctgattgtttttttaatgttttggtttgtttttgacatcagctgtaatcattcctgtgctgtgttttttattacccttggtaggtattagacttgcacttttttaaaaaaaggtttctgcatcgtggaagcatttgacccagagtggaacgcgtggcctatgcaggtggattccttcaggtctttcctttggttctttgagcatctttgctttcattcgtctcccgtctttggttctccagttcaaattattgcaaagtaaaggatctttgagtaggttcggtctgaaaggtgtggcctttatatttgatccacacacgttggtcttttaaccgtgctgagcagaaaacaaaacaggttaagaagagccgggtggcagctgacagaggaagccgctcaaataccttcacaataaatagtggcaatatatatatagtttaagaaggctctccatttggcatcgtttaatttatatgttatgttctaagcacagctctcttctcctattttcatcctgcaagcaactcaaaatatttaaaataaagtttacattgtagttattttcaaatctttgcttgataagtattaagaaatattggacttgctgccgtaatttaaagctctgttgattttgtttccgtttggatttttgggggaggggagcactgtgtttatgctggaatatgaagtctgagaccttccggtgctgggaacacacaagagttgttgaaagttgacaagcagactgcgcatgtctctgatgctttgtatcattcttgagcaatcgctcggtccgtggacaataaacagtattatcaaagagaaaaaaaaaaaaaaaaa

SEQ ID NO: 1980 - DNA, 1616 bp, Homo Sapiens
  NM_003258
gcgcacgtcccggattcctcccacgagggggcgggctgcggccaaatctcccgccaggtcagcggccgggcgctgattggccccatggcggcggggccggctcgtgattggccagcacgccgtggtttaaagcggtcggcgcgggaaccaggggcttactgcgggacggccttggagagtactcgggttcgtgaacttcccggaggcgcaatgagctgcattaacctgcccactgtgctgcctggctcccccagcaagacccgggggcagatccaggtgattctcgggccgatgttctcaggaaaaagcacagagttgatgagacgcgtccgtcgcttccagattgctcagtacaagtgcctggtgatcaagtatgccaaagacactcgctacagcagcagcttctgcacacatgaccggaacaccatggaggcactgcccgcctgcctgctccgagacgtggcccaggaggccctgggcgtggctgtcataggcatcgacgaggggcagtttttccctgacatcgtggagttctgcgaggccatggccaacgccgggaagaccgtaattgtggctgcactggatgggaccttccagaggaagccatttggggccatcctgaacctggtgccgctggccgagagcgtggtgaagctgacggcggtgtgcatggagtgcttccgggaagccgcctataccaagaggctcggcacagagaaggaggtcgaggtgattgggggagcagacaagtaccactccgtgtgtcggctctgctacttcaagaaggcctcaggccagcctgccgggccggacaacaaagagaactgcccagtgccaggaaagccaggggaagccgtggctgccaggaagctctttgccccacagcagattctgcaatgcagccctgccaactgagggacctgcgagggccgcccgctcccttcctgccactgccgcctactggacgctgccctgcatgctgcccagccactccaggaggaagtcgggaggcgtggagggtgaccacaccttggccttctgggaactctcctttgtgtggctgccccacctgccgcatgctccctcctctcctacccactggtctgcttaaagcttccctctcagctgctgggacgatcgcccaggctggagctggccccgcttggtggcctgggatctggcacactccctctccttggggtgagggacagagccccacgctgttgacatcagcctgcttcttcccctctgcggctttcactgctgagtttctgttctccctgggaagcctgtgccagcacctttgagccttggcccacactgaggcttaggcctctctgcctgggatgggctcccaccctcccctgaggatggcctggattcacgccctcttgtttccttttgggctcaaagcccttcctacctctggtgatggtttccacaggaacaacagcatctttcaccaagatgggtggcaccaaccttgctgggacttggatcccaggggcttatctcttcaagtgtggagagggcagggtccacgcctctgctgtagcttatgaaattaactaattgaaaattcactggttggtggaaaaaaaaaaaaaaaaaaaaaa

SEQ ID NO: 1981 - DNA, 2722 bp, Homo Sapiens
  NM_003260
tcgccgcgctcccgccccggccgctgcccctgcccgccccgctcgccccgcgcaccccaacccggggaggggctcccacgaccccgggcgcgcgcgcttgggggcgcgccagggactccagggtcccttgccccgcgccgcttctccctcctccctctttcttcgggcagcctccccaccaccccacttcagcctcccccactcttgccgcctccatatcatcaagctctggtggcgcctggggggcttttcggatcggcaggatgtacccccagggaaggcacccgaccccgctccagtccggccagcccttcaagttctcgatcttggagatctgcgaccgcatcaaagaagaattccagtttcttcaggctcaataccacagcctcaagctagaatgtgagaagctggccagcgagaagacggaaatgcagcgacattatgtcatgtattatgagatgtcgtacgggctcaacattgaaatgcataagcaggcggagattgtgaagcgtctgagcggtatctgcgctcagattatccccttcctgacccaggagcatcagcagcaggtgctccaggccgtagaacgcgccaagcaggtcaccgtgggggagctgaacagcctcatcgggcagcagctccagccgctgtcccaccacgcaccccctgtgcccctcaccccccgcccagccgggctggtgggcggcagtgctacggggctgcttgctctgtctggagccctggctgcccaggctcagctggcggcggctgtcaaggaggaccgtgcgggcgtggaggccgaggggtccagagtggagagagccccgagcaggagtgcatctccctcgccccctgagagtctcgtggaggaggagcgaccgagtggccctggtggtggcgggaagcagagagcagatgagaaggagccatcaggaccttatgaaagcgacgaagacaagagtgattacaatctggtggtggacgaggaccaaccctcagagccccccagcccggctaccaccccctgcggaaaggtacccatctgcattcctgcccgtcgggacctggtggacagtccagcctccttggcctctagccttggctcaccgctgcctagagccaaggagctcatcctgaatgaccttcccgccagcactcctgcctccaaatcctgtgactcctccccgccccaggacgcttccacccccgggcccagctcggccagtcacctctgccagcttgctgccaagccagcaccttccacggacagcgtcgccctgaggagccccctgactctgtccagtcccttcaccacgtccttcagcctgggctcccacagcactctcaacggagacctctccgtgcccagctcctacgtcagcctccacctgtccccccaggtcagcagctctgtggtgtacggacgctcccccgtgatggcatttgagtctcatccccatctccgagggtcatccgtctcttcctccctacccagcatccctgggggaaagccggcctactccttccacgtgtctgcggacgggcagatgcagccggttcccttcccctcggatgcactggtaggcgcgggcatcccgcggcacgcccggcagctgcacacgctggcccatggcgaggtggtctgcgcggtcaccatcagcggctccacacagcatgtgtacacgggcggcaagggctgtgtgaaggtgtgggacgtgggccagcctggggccaagacgcccgtggcccagctcgactgcctgaaccgagacaactacattcgttcctgcaagttgctgccggatggccggagtctgatcgtgggcggtgaggccagcaccttgtccatttgggacctggcggcgcccaccccccgtatcaaggccgagctgacttcctcagccccagcctgctacgccctggccgtcagccccgacgccaaggtttgcttctcctgctgcagcgatggcaacattgtggtctgggacctgcagaatcagactatggtcaggcagttccagggccacacggacggcgccagctgcattgatatttccgattacggcactcggctctggacagggggcctggacaacacggtgcgctgctgggacctgcgggagggccgccagctgcagcagcatgacttcagctcccagattttctccctgggccactgccctaaccaggactggctggcggtcggaatggagagtagcaacgtggagatcctgcacgtccgcaagccggagaaataccagctgcacctccacgagagctgcgtgctgtccctgaagtttgcctcctgcggacggtggtttgtgagcaccgggaaggacaacctgctcaacgcctggaggacgccgtacggggccagcattttccagtccaaggagtcgtcctcagtcctgagttgtgacatctccagaaataacaaatacatcgtgacaggctcgggggacaagaaggccaccgtgtatgaggtggtctactgagacatgaccccccttcctgtacccgaagtccagactcccaggggaatcagcagccaggacagacatcctagcagccgcctcccagccctgcctaggaaccgtacatcccatctgctctctggccaacggcttcacaccttcccctgctgcatgtgggggccgatgggcaggggacctcggtggaaataaaatgtatctatcacatccgcaaaaaaaaaaaaaaaaaa

SEQ ID NO: 1982 - DNA, 3417 bp, Homo Sapiens
  NM_003264
cggaggcagcgagaaagcgcagccaggcggctgctcggcgttctctcaggtgactgctcggagttctcccagtgtttggtgttgcaagcaggatccaaaggagacctatagtgactcccaggagctcttagtgaccaagtgaaggtacctgtggggctcattgtgcccattgctctttcactgctttcaactggtagttgtgggttgaagcactggacaatgccacatactttgtggatggtgtgggtcttgggggtcatcatcagcctctccaaggaagaatcctccaatcaggcttctctgtcttgtgaccgcaatggtatctgcaagggcagctcaggatctttaaactccattccctcagggctcacagaagctgtaaaaagccttgacctgtccaacaacaggatcacctacattagcaacagtgacctacagaggtgtgtgaacctccaggctctggtgctgacatccaatggaattaacacaatagaggaagattctttttcttccctgggcagtcttgaacatttagacttatcctataattacttatctaatttatcgtcttcctggttcaagcccctttcttctttaacattcttaaacttactgggaaatccttacaaaaccctaggggaaacatctcttttttctcatctcacaaaattgcaaatcctgagagtgggaaatatggacaccttcactaagattcaaagaaaagattttgctggacttaccttccttgaggaacttgagattgatgcttcagatctacagagctatgagccaaaaagtttgaagtcaattcagaatgtaagtcatctgatccttcatatgaagcagcatattttactgctggagatttttgtagatgttacaagttccgtggaatgtttggaactgcgagatactgatttggacactttccatttttcagaactatccactggtgaaacaaattcattgattaaaaagtttacatttagaaatgtgaaaatcaccgatgaaagtttgtttcaggttatgaaacttttgaatcagatttctggattgttagaattagagtttgatgactgtacccttaatggagttggtaattttagagcatctgataatgacagagttatagatccaggtaaagtggaaacgttaacaatccggaggctgcatattccaaggttttacttattttatgatctgagcactttatattcacttacagaaagagttaaaagaatcacagtagaaaacagtaaagtttttctggttccttgtttactttcacaacatttaaaatcattagaatacttggatctcagtgaaaatttgatggttgaagaatacttgaaaaattcagcctgtgaggatgcctggccctctctacaaactttaattttaaggcaaaatcatttggcatcattggaaaaaaccggagagactttgctcactctgaaaaacttgactaacattgatatcagtaagaatagttttcattctatgcctgaaacttgtcagtggccagaaaagatgaaatatttgaacttatccagcacacgaatacacagtgtaacaggctgcattcccaagacactggaaattttagatgttagcaacaacaatctcaatttattttctttgaatttgccgcaactcaaagaactttatatttccagaaataagttgatgactctaccagatgcctccctcttacccatgttactagtattgaaaatcagtaggaatgcaataactacgttttctaaggagcaacttgactcatttcacacactgaagactttggaagctggtggcaataacttcatttgctcctgtgaattcctctccttcactcaggagcagcaagcactggccaaagtcttgattgattggccagcaaattacctgtgtgactctccatcccatgtgcgtggccagcaggttcaggatgtccgcctctcggtgtcggaatgtcacaggacagcactggtgtctggcatgtgctgtgctctgttcctgctgatcctgctcacgggggtcctgtgccaccgtttccatggcctgtggtatatgaaaatgatgtgggcctggctccaggccaaaaggaagcccaggaaagctcccagcaggaacatctgctatgatgcatttgtttcttacagtgagcgggatgcctactgggtggagaaccttatggtccaggagctggagaacttcaatccccccttcaagttgtgtcttcataagcgggacttcattcctggcaagtggatcattgacaatatcattgactccattgaaaagagccacaaaactgtctttgtgctttctgaaaactttgtgaagagtgagtggtgcaagtatgaactggacttctcccatttccgtctttttgatgagaacaatgatgctgccattctcattcttctggagcccattgagaaaaaagccattccccagcgcttctgcaagctgcggaagataatgaacaccaagacctacctggagtggcccatggacgaggctcagcgggaaggattttgggtaaatctgagagctgcgataaagtcctaggttcccatatttaagaccagtctttgtctagttgggatctttatgtcactagttatagttaagttcattcagacataattatataaaaactacgtggatgtaccgtcatttgaggacttgcttactaaaactacaaaacttcaaattttgtctggggtgctgttttataaacatatgccagatttaaaaattggtttttggtttttcttttttctatgagataaccatgatcataagtctattactgatatctgaatatagtcccttggtatccaagggaattggttgcaggatcctcgtggatatcaaaattcatagatgatcaagtcccttataagagtggcatagtatttgcatataacctgtgtacattctcctgtatactttaaatcatctctagattacttatgatacccaatacaatgtaaatactatgtaaatagttgtactgtctttttatttatattattattgttattttttattttcaaaatttttaaaacatacttttgatccacagttggttgacttcatggatgcagaacccatggatatagagggccaactgtaatctgtagcaactggcttagttcattaggaaacagcacaaatgaacttaagattctcaatgactgtgtcattctttcttcctgctaagagactcctctgtggccacaaaaggcattctctgtcctacctagctgtcacttctctgtgcagctgatctcaagagcaacaaggcaaagtatttggggcactccccaaaacttgttgctattcctagaaaaaagtgctgtgtatttcctattaaactttacaggatgagaaaaaaaaaaaaaaaaa

SEQ ID NO: 1983 - DNA, 4277 bp, Homo Sapiens
  NM_003268
ggttttcaggagcccgagcgagggcgccgcttttgcgtccgggaggagccaaccgtggcgcaggcggcgcggggaggcgtcccagagtctcactctgccgcccaggctggactgcagtgacacaatctcggctgactgcaaccactgcctccagggttcaagcgattctcttgcctcagcctcccaagtagctgggattacagattgatgttcatgttcctgacactactacaagattcatactcctgatgctactgacaacgtggcttctccacagtcaccaaaccagggatgctatactggacttccctactctcatctgctccagccccctgaccttatagttgcccagctttcctggcaattgactttgcccatcaatacacaggatttagcatccagggaagatgtcggagcctcagatgttaattttctaattgagaatgttggcgctgtccgaacctggagacaggaaaacaaaaagtcctttctcctgattcaccaaaaaataaaatactgactaccatcactgtgatgagattcctatagtctcaggaactgaagtctttaaacaaccagggaccctctgcccctagaataagaacatactagaagtcccttctgctaggacaacgaggatcatgggagaccacctggaccttctcctaggagtggtgctcatggccggtcctgtgtttggaattccttcctgctcctttgatggccgaatagccttttatcgtttctgcaacctcacccaggtcccccaggtcctcaacaccactgagaggctcctgctgagcttcaactatatcaggacagtcactgcttcatccttcccctttctggaacagctgcagctgctggagctcgggagccagtatacccccttgactattgacaaggaggccttcagaaacctgcccaaccttagaatcttggacctgggaagtagtaagatatacttcttgcatccagatgcttttcagggactgttccatctgtttgaacttagactgtatttctgtggtctctctgatgctgtattgaaagatggttatttcagaaatttaaaggctttaactcgcttggatctatccaaaaatcagattcgtagcctttaccttcatccttcatttgggaagttgaattccttaaagtccatagatttttcctccaaccaaatattccttgtatgtgaacatgagctcgagcccctacaagggaaaacgctctccttttttagcctcgcagctaatagcttgtatagcagagtctcagtggactggggaaaatgtatgaacccattcagaaacatggtgctggagatactagatgtttctggaaatggctggacagtggacatcacaggaaactttagcaatgccatcagcaaaagccaggccttctctttgattcttgcccaccacatcatgggtgccgggtttggcttccataacatcaaagatcctgaccagaacacatttgctggcctggccagaagttcagtgagacacctggatctttcacatgggtttgtcttctccctgaactcacgagtctttgagacactcaaggatttgaaggttctgaaccttgcctacaacaagataaataagattgcagatgaagcattttacggacttgacaacctccaagttctcaatttgtcatataaccttctgggggaactttacagttcgaatttctatggactacctaaggtagcctacattgatttgcaaaagaatcacattgcaataattcaagaccaaacattcaaattcctggaaaaattacagaccttggatctccgagacaatgctcttacaaccattcattttattccaagcatacccgatatcttcttgagtggcaataaactagtgactttgccaaagatcaaccttacagcgaacctcatccacttatcagaaaacaggctagaaaatctagatattctctactttctcctacgggtacctcatctccagattctcattttaaatcaaaatcgcttctcctcctgtagtggagatcaaaccccttcagagaatcccagcttagaacagcttttccttggagaaaatatgttgcaacttgcctgggaaactgagctctgttgggatgtttttgagggactttctcatcttcaagttctgtatttgaatcataactatcttaattcccttccaccaggagtatttagccatctgactgcattaaggggactaagcctcaactccaacaggctgacagttctttctcacaatgatttacctgctaatttagagatcctggacatatccaggaaccagctcctagctcctaatcctgatgtatttgtatcacttagtgtcttggatataactcataacaagttcatttgtgaatgtgaacttagcacttttatcaattggcttaatcacaccaatgtcactatagctgggcctcctgcagacatatattgtgtgtaccctgactcgttctctggggtttccctcttctctctttccacggaaggttgtgatgaagaggaagtcttaaagtccctaaagttctcccttttcattgtatgcactgtcactctgactctgttcctcatgaccatcctcacagtcacaaagttccggggcttctgttttatctgttataagacagcccagagactggtgttcaaggaccatccccagggcacagaacctgatatgtacaaatatgatgcctatttgtgcttcagcagcaaagacttcacatgggtgcagaatgctttgctcaaacacctggacactcaatacagtgaccaaaacagattcaacctgtgctttgaagaaagagactttgtcccaggagaaaaccgcattgccaatatccaggatgccatctggaacagtagaaagatcgtttgtcttgtgagcagacacttccttagagatggctggtgccttgaagccttcagttatgcccagggcaggtgcttatctgaccttaacagtgctctcatcatggtggtggttgggtccttgtcccagtaccagttgatgaaacatcaatccatcagaggctttgtacagaaacagcagtatttgaggtggcctgaggatctccaggatgttggctggtttcttcataaactctctcaacagatactaaagaaagaaaaagaaaagaagaaagacaataacattccgttgcaaactgtagcaaccatctcctaatcaaaggagcaatttccaacttatctcaagccacaaataactcttcactttgtatttgcaccaagttatcattttggggtcctctctggaggttttttttttctttttgctactatgaaaacaacataaatctctcaattttcgtatcaacaccatgttctgtctcactaacctccaaatggaaaataatagatctagaaaattgcaactgcccttagaggtttccagtctccattgattttctttcagatccaataataccgttctgtcctgctgtgttgattatggaatgtatcctaatcatgggaagggcaccttgggagaagttgcagatggctgacgtgctttctctagcattcagctaaaaaatgggatggtccatgattctgcgttctctgtgttctgcaaaacaacattaagtagaaaacaaacagaagcagaggcacatttccttcttttgccacagaaacaatgccactgttgagtgcaagtcacactttgtctcatagataagaggtggccccaaagaagctgggatgaatgagtcactacctgtcttgtgactgtactgcacttcatgttcttaccttcggcttctccaggtctcgccctagtgagccaagaactttctctcacatgctgcctttatttaagcctggccttcaagaccttccatgatttatcaccaacctaccttttcagctttgtttcctagcacacctcattgatcagctgctcaggctgttgcatgaagaacatggactttgcacacagatcctgggttgagttctgagtcagctgtgtattagccatgtaaccttggccttggtatgcccttgctggacctacattttctcacgtaacagcatctatgtcatagaattcctgtgaaaattaaattggccaaggatgtcagggcttctcagatcttttccttcgttgccctaatgaccacaagagaacacatacactgaaggcctcctggggggcagttgcaatttcactgaagttgtatttttttatcttaaatgaaatctatgtgtattttcaaaaaaaaaa

SEQ ID NO: 1984 - DNA, 3271 bp, Homo Sapiens
  NM_003269
agggacgccctattcccctccccgcggctgcctgtcagagcgcttctggagatattacaggggacccagcccgcagcgacaggcacaaagtcacggggtaatgaacttcggggacccttcgccgctgcgtgcgcggctctccccggaaacccggacctggccgcctcttccctcggaagatttcccagcaatctagttttcccactctgcgcttgggttccggcagcgcggagcccgtctgcctctgagactgcggtagtgttttccttctttccttgggagaccagcggtcggcagagattgcccacactctgcatgcctatgtagagggagagatcgaagactgagtgacaggaatggggaaaaagagggatttcgctccgtaggaaggccattttcgtgtctccatctctgtctttcaacatccctctcttgctgttcttccttcttcctcagtcttcctgtccatctctccatctgtctgtccatgtgtgtgtccatatcaagcagcattcccagcagctgcggttttgcaagagccgggaagaaacttaaggatgcttaaatttccactgttggacgaattctgagcgcccagggagcagcgcagcgcgcgactgacacccacctgtcccgcccaggagccttgcaggctggagggcagctggagagcggcggcgcccggcggcgaggcgggcgctgccggccgggactcgggcagcgcccaccaaccgctccgccccgggacagccagcatgagcaagccagccggatcaacaagccgcattttagatatcccctgcaaagtgtgtggcgaccgcagctcggggaagcactacggggtctacgcctgcgacggctgctcaggttttttcaaacggagcatccgaaggaataggacctatgtctgcaaatctggaaaccagggaggctgtccggtggacaagacgcacagaaaccagtgcagggcgtgtcggctgaagaagtgtttggaagtcaacatgaacaaagacgccgtgcagcacgagcgggggcctcggacgtccaccatccgcaagcaagtggccctctacttccgtggacacaaggaggagaacggggccgccgcgcactttccctcggcggcgctccctgcgccggccttcttcaccgcggtcacgcagctggagccgcacggcctggagctggccgcggtgtccaccactccagagcggcagaccctcgtgagcctggctcagcccacgcccaagtacccccatgaagtgaatgggaccccaatgtatctctatgaagtggccacggagtcggtgtgtgaatcagctgccagacttctcttcatgagcatcaagtgggctaagagtgtgccagccttctccacgctgtctttgcaagaccagctgatgcttttggaagatgcttggagagaactgtttgttctaggaatagcacaatgggccattccggttgatgctaacactctactggctgtatctggcatgaacggtgacaacacagattcccagaagctgaacaagatcatatctgaaatacaggctttacaagaggtggtggctcgatttagacaactccggttagatgctactgaatttgcctgtctaaaatgcatcgtcactttcaaagccgttcctacacatagtggttctgaactgagaagtttccggaatgctgccgccattgcagcccttcaagatgaggctcagctaacgctcaacagctacatccataccagatatcccactcaaccctgtcgctttggaaaactcctgttgcttttgccagctttacgttctattagcccatcaactatagaagaagtgtttttcaaaaaaaccatcggcaatgtgccaattacaagactgctttcagatatgtacaaatccagtgatatctaagctcacaagatacccacttttcaggatgggacagtatcagatgaacttcaacccatggagaacaagcctcaactaacaaacccttcaggaagcatataccggggaatgtgtagccttcaggaaaaaaatgccaattgacacaaagcattccagtagctatgacctgccgccctgaccaggatagggcgggtgggaaggagaggggtgcaacaggaccgcctgcactgaaaactcactgctgccatgccctgggagggggcaaactgggggttgccacaggccgtgccattctgcctcttacctggaagatcaggctgaacgatcaaaagctgaaacataagtagtgctttctcttcctttttagcatacaaagtttggtaaccaaatatagctctgtgtataacatcgtactgcggccttcaaaactacgttatgttggagcatttattttaaaaataatggtaggttttaaattaaaagtgttatcaaaagtttcccctctattgtaatacattattaagtggccttcagaactgagttaataagtgaaaagtagcttatgccatgtgatttgctttttctctatcttcttttttcttttctttctctttcttttgttctttcttcttcttttttaataccataggccaggcaaccttgtcaaaggaattgatggacaaaatgagattctcaccaggacttcaggttggataacatgtcaaaaagagaagagctttactaaaagaacataagtcaagggaggatgaataaaaacagcaaaaccaaataaagtggagatgagtgattgagtgaggtagattgctgtcccgttaacatagtgctgaaaccaaaggcagtgggggtccaaactcgtggtgcagcaagtcacaccagacaggaaacgaatatggacgtaattgcagaaggaacttcaaggagatgaatgaatgctaaaagggttcttgactgatccattgctaacagcctgagactcttcaatgcctttccgaaaactggtttctagtaaagccttgaatgaacacacacacacacacacacacacacacacacacacacacacacacacaccgtcctacactttaagctgctcctttggtatgactctatacttatggaaatgtagaaacaaacatttttaaatagctgctgtacttttcacattttgatttattaggtactagcactgaggaaaaaaaattcagcacttggactatcataggatgagtaaaacttttcttgtacaaagtgaattaactgatttgtgaagttaaaaggttgtactcattgtatttacaaagaataaaaatatattgaatttaaatgaaaaaaaaaaaaaa

SEQ ID NO: 1985 - DNA, 3352 bp, Homo Sapiens
  NM_003275
agctcccgcccgcccgcggccgcccgggagctcgtccagccccgcgctgcgctcgcccgcccgctgcccgccggagcaccgcggcctccgcccgcgtccatctgcccgccgcccgcgcctgttccgcagcccgcgtccgcgccggccccacagctctgcgtccgggtattactcagcacagaaattcaggagacacagacaagttcttccacgatgtcgtacagacgagaactagagaaataccgtgacctggatgaagatgaaatccttggagccctaacagaggaagagctgaggaccctggaaaatgagctggatgagctggaccctgataatgcactgctgcctgcaggcctgaggcagaaggatcagaccaccaaggcgcccacgggcccctttaaaagagaggagctcttggatcacttggaaaagcaagcaaaggagtttaaggaccgagaagatctggtcccctacacaggggaaaaacgaggaaaggtctgggttcctaagcagaagccactggatcctgtgctggaaagtgtgacgctggaaccggagctggaggaagccttggcaaatgcttcagatgcagaactctgtgacattgcagcgatcctgggcatgcacacgctcatgagtaaccagcagtactaccaggccctgagcagcagctccatcatgaacaaggaggggctcaacagcgtgattaaacccacacaatacaagcctgtgcccgacgaagaaccaaattcaacagacgtagaggaaacgctggaacggataaagaacaacgacccaaaacttgaagaagttaacctcaataatatccggaatatccccatccccaccctcaaggcatatgcagaagccctgaaagaaaactcatatgtgaagaagttcagcatcgtggggacacggagtaatgaccccgtggcgtatgcccttgctgagatgctcaaggagaacaaggtgttgaagacactgaatgtggaatccaacttcatttctggagctgggattctgcgcctggtagaagccctcccatacaacacttctctggtggaaatgaaaattgacaaccagagccagcccctgggcaacaaagtggaaatggagattgtgagcatgttggaaaaaaacgcaacacttctcaaattcggctaccactttacccagcaaggaccccggcttcgggcatccaacgcaatgatgaacaacaatgaccttgtgaggaagaggaggcttgcggacctgactgggcccatcattcccaagtgccggagtggtgtctagtgtgtggcggtggagtccatgcctttgaactggatgtgttctattgatgacctgtgctctgcaggggaaaccagaaggcaaaatgctggcagcatgaaacccttttgtggttcagttctttatgcactaaggttttaggttgactagtggttgtagttgaaaattttataaaataccgttaatgtgaagtttttctttagtcacagaagttgaatctggttattatttaaaaactagaagcccccaaaccagcagatcttactgaagatgatgttccagcagcagcgacttagccccaggagcccagtttcaatggccttgctgtgtggtgtttcaagtgcatttaaaatgtgtgacacagaaacggcacactcttccacatgcttttgaagtattataaaacactttattacaaatttgtcttagctattagcaaataaaactgattatcattctttattaaccctccttggaattttgaaaacctcgattaaagttgccaaattgattactggatccagaacacaattttcccctcagaacagatagacagactgaagccactgaactctgccaggagtcaacatgagattccttttgctggatatgcagaaatgataggaaaaaaaccaatggtgaaatttcaagtttcaaaaaccaacctttcattaccaatcccaggcaacaaacatgtccctgagtgttctttaagaacatttgggatttatgtacaatttaatactggagttagaactttttccttattgaatgccaaccttatgatggatgtgaaaatctacggccaaatacttttgaaaacacctttctatattgcacagtgggcaaatggcttatgtgaggtaagacactagagggataaatttccagatcaacatggctatggtatttagtaatggcccagcttagagacttcagctactgatctcatcacttattagacaaattgctgctgaccttacgcctgtatattaagcctccgcaggatgccggacaatggtgaagaaactccagatatcaaggaattgggaaatcctggccaaaccaccccaagatgattacactgaaatgtagtattagtactgctgccagatctctttttaacatcatgtgcgtctcttgggatccagcaaaagtgttaagccacaatgcccttgtgccttttaatataccacagtgccagttaaactaatatttttgtttgttgcttttgggagttattttcattagtgatttcagcaaatctcatgataaaggacaaggtcaagaactccagagcactgagcagagaggctggtgatgaaaaggtgaaggcctgcgcactgaactgtaaggcagtgggcagtacagggtaactggaggcggggccagggcctcagcgctatggaagagtgtccactgaggctgcacatggcccaggagtggcaccatgttgcagggacaaccatccccatttggcttctccttaaaacacaattgcagctgcattctgcatcgctgaaaactgcaatataatattaaatctgttggtctatgcatggctgcgtatgtgtttcttggaacctgtgtgacagggacatgtgcctggcacactggccagaagactgggcagccaccatggcagtgctggatgacctcagtaagaatgtgtcatgtattccaggtgctgatctaaaaactgtggctcaaatgtcaccgagcttatatgaagctcccagagagaacatttaaaagctcagagagtaagtgctggggaaagcagagctatcagaggaaatctctcatagaaacgaaaccaaaccaacagaaaatgaagaaggccacatctttaaggccacctctgcctctatcagatgagctgctggtctagatcaggggctggcaaacttttctgtaaaaggccagacagtaaaaatttccgattttgcaggccacatagtgtctgttgcaactattcaactctgccatagatcatgtgtaaaggaatgggtgtggctgttcaataaactatacagttgacccttgaaaaaaaaaaaaaaaa

SEQ ID NO: 1986 - DNA, 886 bp, Homo Sapiens
  NM_003278
gctgctgccttaagacgtgcagcctgggccgtggctgtcactgcgttcggacccagacccgctgcaggcagcagcagcccccgcccgcgcagcagcatggagctctggggggcctacctcctcctctgcctcttctccctcctgacccaggtcaccaccgagccaccaacccagaagcccaagaagattgtaaatgccaagaaagatgttgtgaacacaaagatgtttgaggagctcaagagccgtctggacaccctggcccaggaggtggccctgctgaaggagcagcaggccctgcagacggtctgcctgaaggggaccaaggtgcacatgaaatgctttctggccttcacccagacgaagaccttccacgaggccagcgaggactgcatctcgcgcgggggcaccctgggcacccctcagactggctcggagaacgacgccctgtatgagtacctgcgccagagcgtgggcaacgaggccgagatctggctgggcctcaacgacatggcggccgagggcacctgggtggacatgaccggcgcccgcatcgcctacaagaactgggagactgagatcaccgcgcaacccgatggcggcaagaccgagaactgcgcggtcctgtcaggcgcggccaacggcaagtggttcgacaagcgctgccgcgatcagctgccctacatctgccagttcgggatcgtgtagccggcggggcgggggccgtggggggcctggaggagggcaggggccgcgggaggccgggaggagggtggggaccttgcagcccccatcctctccgtgcgcttggagcctctttttgcaaataaagttggtgcagcttcgcggagaggaaaaaaaaaaaaaaaaaaaaaaaaaaaaaaaaaaa

SEQ ID NO: 1987 - DNA, 698 bp, Homo Sapiens
  NM_003279
tcatctttgggtggtggagtgcaaaggaggcgacctgcaacagaggagtcccggtcaccagcaaccatgacggaccagcaggctgaggccaggtcctacctcagcgaagagatgatcgctgagttcaaggctgcctttgacatgtttgatgctgatggtggtggggacatcagcgtcaaggagttgggcacggtgatgaggatgctgggccagacacccaccaaggaggagctggacgccatcatcgaggaggtggatgaggacggcagcggcaccatcgacttcgaggagttcttggtcatgatggtgcgccagatgaaagaggacgcgaaagggaagagcgaggaggagctggccgagtgcttccgcatcttcgacaggaatgcagacggctacatcgacccggaggagctggctgagattttcagggcctccggggagcacgtgacggacgaggagatcgaatctctgatgaaagacggcgacaagaacaacgacggccgcattgacttcgacgagttcctgaagatgatggagggcgtgcagtaaggagtggacagtcgcctctaccaagatcgcgtgtccctagggtgtgggagactccgccctgccgggtccccaccagggaggcgcgaccccttgtgggtctttgtctggaaggaataaaagcaaatgttccaaaaaaaaaaaaaaaaaaa

SEQ ID NO: 1988 - DNA, 738 bp, Homo Sapiens
  NM_003282
ctcgctcccagccctgctgcccagattctaggctccaagctcaggacctcaggatgggagatgaggagaagcggaacagggccatcacggcccgcaggcagcacctgaagagtgtgatgctgcagatagcggccacggagctggagaaggaggagagccgccgtgaggcagagaagcagaactacctggcggagcactgcccgccgctgcatatcccgggctccatgtctgaagtgcaggagctctgcaaacagctgcacgccaagatcgatgcggctgaagaggagaagtacgacatggaggtgagggtgcagaagaccagcaaggagctggaggacatgaaccagaagctatttgatctgcggggcaagttcaagcggcccccactgcggagggtgcgcatgtcggccgatgccatgctcaaggccctgctgggctcgaagcacaaggtgtgcatggacctgagggccaacctgaagcaggtcaagaaggaggacacagagaaggagcgggacctgcgagacgtgggtgactggaggaagaacatcgaggagaagtctggcatggagggccggaagaagatgtttgagtccgagtcctaggccactcgctgcccctacgcctgccccggtgcccggctcccagcagaacatactagggagatgcacccagagcctgccagggagggctggcctcaccaccaccgtcaataaaggatttgaatccccatgaaaaaaa

SEQ ID NO: 1989 - DNA, 2357 bp, Homo Sapiens
  NM_003288
atcgcggattacgaaacgccgcggagctgaggcagttccgctggctagtgtgtacgcggcgagcttctcccggcgccgcccgctcggctcccatagcgcccgcgacagcggtccggacgccgcccgaacatggactccgccggccaagatatcaacctgaattctcctaacaaaggtctgctgtctgactccatgacggatgttcctgtcgacacaggtgtggctgcccggactcctgctgttgagggtctgacagaggctgaggaggaggagctcagggctgagcttaccaaggtggaagaggaaattgtcactctgcgccaggtcctggcagccaaggagaggcactgtggagagctcaagaggaggctgggcctctccaccctgggggagctgaaacagaacctgtccaggagctggcatgacgtgcaggtctctagcgcctatgtgaaaacttctgagaaacttggagagtggaatgagaaagtgacccagtcagacctctacaagaagactcaggaaactctttcacaggcaggacagaagacttcagctgccctgtccacagtgggctctgccatcagcaggaagcttggagacatgaggaactctgcgaccttcaagtcgtttgaggaccgagttgggaccataaagtctaaggttgtgggtgacagagagaacggcagtgacaacctcccttcctcagcggggagtggtgacaagcccctgtcggatcccgcacctttctaagcctgtggttgcttcacccgctgcagagcacacgcaacccagcctcagcatcacagccgcagctctgttcagcggagcagccagccagggcggatgagcagagccggccctgaggacagtcctgcccatccacgcggagatgtggctgccgcgtttgcatgaatttgaagaacacaggcttgtacacagatgttttacactcacgtttgtagatgaaacagatcactgtgctgtccttcctaggggtgcaggaagtggacagggcggagggtttgaaagaatattgagccaaagcccaggctccctttgggaatcatgttagcccatcagaatgttgaaggattgaagagttctaagcataaaataagtggcattttctgacttcttcctcctcctccttccctgactcacagaaggaatgcaatcacccagcaagtcctacctgttacgcaattttttatctcaaaatgccgaacgagaaaactgtccattttctgagacccccagaaaggaaactgaccctcagcagctgcctgattgttacgcgaatctagctttaacggaagcaaattcattattttttaaatgcagtggacttttcaaaaagtttaaattaggcaaagcagctttagcctcatagaatattatttctttggactcaagctgaaatacaagccttacattgccttatgctttatttctttctaatttttatatgtatatagatgagggttccttaatggttgtgagcattgtgtggaattttacacctggcctgcgtggcagcctcttccagttgaggtgttttatgtcacgcacactccatcccagtgtacaaaacctgcttctcttctcaaccgtggcagctcccgctggctcctatgccctgccctaaagggctcttgagcctctgggaatgggaggggccaagagaaggaaaaccctgtctttagcaccctttaaaagaactgtgccccccttctcagtgctgcctttgcatgggcctggcccggctcacattcgtcagtgactccaaccctcctgcttgctgtacttgggatgaaacgaccccacaggtcaggtggagggtggggcgtgggcatcagccaggattgccgttacagtctttttctcaggagctacaaagatctcttcctgttactaaatagtcgcaccccagcagcctctctcgcacaccggggccctgcatgtcagatggcgtggtctgcagggggagctctgtgccttagtggctcttggcaggacactgagggcctgcctgtggtgtgcccggctctgccactcccgggaggggaagggctgctcagctcaaggtgtcctgttcggtagagcaagtgtcctctgacagccgtgtccccggacagttcagacacccttggggatggcactccacacacgacagagatgcaggggccagggaagcccagcgctcggtgcccttcgtccagggttaaaatcggcctgtggggtgtggtgagaaggcaggttgtgcgggtgttgaccgatgtatcttttccttaaagttattataataatgggtaatttgtcaataaagcattcctttgggggaaaaaaaaaaaaaaaaa

SEQ ID NO: 1990 - DNA, 2645 bp, Homo Sapiens
  NM_003290
tttccagcagctgtggccagcggtgccgacgtcaggccctcccccagcggtgctgacgtcggcggtccggccgggtgacctcatcgccccgacggcagccggcccggggggcggggagaggcgggggcggcccccgcgcaggcaaaggcttggggggccggggcgcggctgtgcagctctcgccggagccgagcccagccgagcgtccgccgctgcccgtgcgcctctgcgcctccgcgccatggccggcctcaactccctggaggcggtgaaacgcaagatccaggccctgcagcagcaggcggacgaggcggaagaccgcgcgcagggcctgcagcgggagctggacggcgagcgcgagcggcgcgagaaagctgaaggtgatgtggccgccctcaaccgacgcatccagctcgttgaggaggagttggacagggctcaggaacgactggccacggccctgcagaagctggaggaggcagaaaaagctgcagatgagagtgagagaggaatgaaggtgatagaaaaccgggccatgaaggatgaggagaagatggagattcaggagatgcagctcaaagaggccaagcacattgcggaagaggctgaccgcaaatacgaggaggtagctcgtaagctggtcatcctggagggtgagctggagagggcagaggagcgtgcggaggtgtctgaactaaaatgtggtgacctggaagaagaactcaagaatgttactaacaatctgaaatctctggaggctgcatctgaaaagtattctgaaaaggaggacaaatatgaagaagaaattaaacttctgtctgacaaactgaaagaggctgagacccgtgctgaatttgcagagagaacggttgcaaaactggaaaagacaattgatgacctggaagagaaacttgcccaggccaaagaagagaacgtgggcttacatcagacactggatcagacactaaacgaacttaactgtatataagcaaaacagaagagtcttgttccaacagaaactctggagctccgtgggtctttctcttctcttgtaagaagttccttttgttattgccatcttcgctttgctggaaatgtcaagcaaattatgaatacatgaccaaatattttgtatcggagaagctttgagcaccagttaaatctcattccttccctttttttttcaaatggcaccagctttttcagctctcttattttttccttaagtagcatttattcctaaggtaggcagggtatttcctagtaagcatactttcttaagacggaggccatttggttcctgggagaataggcagccccacactttgaagaatacagaccccagtatctagtcgtggatataattaaaacgctgaagaccataaccttttgggtcaactgttggtcaaactataggagagaccagggaccatcacatgggtagggattttccatccagagccaataaaaggactggtgggggccgggggtggctattgtgggaagtcataacccacagatagatcaacctaagaatcctggcccttctccactctccaccatgcaggacaaacatcttctcaagcagtcaacgtagaatgcttgggaaatagtcataattacccacatatagtaattaatagatggtaattaattgatccttgatgtgatgttcttttgcatatttccttcattctaaagttgttccctggccgggagcgttggctttcgcctgtaatcccaacactttgggaggccaggacagatcacttgaggtcaggagttcgagaccagcccagccaacatggcgaaaccatgtctctactaaaaatacaaaaattatggtgacgcctgcctgtagtcccagctactcgggaggctgaggcaggaggatcgcttgaacccaggaagtggagactgcagtgagccgatatcgcaccacagcgctccagcctggtcgacagagtgagactccatctcaagaaaaaataaaaataaagttgttctctgaagagcaaatgtctcattccagtaatgacccactcagcaggaatatggtggagttcagtccaattcaggtcagccatatccaaaagaccacaagtcattactaagttgagcaaaagagtttttatctattagcagaaagggcctctctggcagcagagattaaaaactggcccaacttcatttccatacttcagggaacagcaaattgaggatttacttatctaggacttgaattccttctttgggaccaagttaataaaagaccaagaaactcctgattaaactggataatgaaggattctgtagacagggctgcacgtatcggctttgtttgacttctcttttctcagttaacatctcagagctagaacattccacattccccagcagcgtgtgggggctgactaaagtttacaattccaactaaaaatcaccctgcttctggcttatctgaatcccttacccaccccaccccaccaccctactcctatttattcagcaccacactacccaggaaatacactagcaaattgtgcaatggaataaaatccacactttagattcttgcaactgtatcatatgtaatagtatcactttttctacattttggtcaaataaatttttacataaactac

SEQ ID NO: 1991 - DNA, 4716 bp, Homo Sapiens
  NM_003291
ccctcgcccccgcctccggcccgaggccgcacgggtgtcctcgcgctgctagtccgcgcgcagcctggcagtttgccgcttcctcgtcctccatcctgcgtccatggccaccgctgcgactgaggagcccttcccttttcacggtctcctgccgaagaaggagaccggagccgcctccttcctctgccgctacccggagtatgatgggcggggggtgctcatcgcagtcctggacacgggggtcgacccgggggctccgggcatgcaggttacaactgatggaaaaccaaaaatcgttgatatcattgatacaacaggaagtggcgatgtgaatactgctacagaagtagagccaaaggatggtgagattgttggcctttcaggaagagtgcttaagattcctgcaagctggacaaatccctcaggcaaatatcatattggcataaaaaatggctatgacttctatcctaaggcactcaaggaaaggatacagaaagaacggaaggaaaaaatctgggaccctgttcacagagtggcccttgcagaagcctgtagaaaacaggaagaatttgatgttgccaacaacggctcttctcaagcaaataaactaatcaaggaggaacttcaaagtcaagtggaattgctaaattcttttgagaagaaatacagcgatcctggccctgtatatgactgcttggtatggcatgatggcgaagtctggagagcctgcattgattctaatgaagatggggacttgagtaaatctaccgtgttgagaaactacaaagaagcccaagaatatggctcttttggcacagctgagatgttgaattactccgttaatatatacgatgatggaaacctgctctccattgtgaccagtggaggagctcatgggacacatgtagctagtatagctgctggacactttccagaagaacctgaacggaatggggtagctcctggtgctcaaattctttccatcaagattggtgatacaagactaagcacaatggaaacaggcacaggcctcataagagctatgatagaagttataaatcataagtgtgatcttgtcaactacagttacggagaagcaactcactggccaaattctgggagaatttgtgaagtaattaatgaagcagtatggaagcataatataatttatgtttcaagtgctggaaataatggtccatgcctgtctacagttggttgtccaggtggaactacatcaagtgtgataggtgttggtgcttatgtttctcctgatatgatggttgctgagtattcactgagagagaaattacctgcaaatcaatatacttggtcttctagaggacctagtgctgacggggcccttggtgtgagtatcagtgcgccaggaggagccattgcttctgttcctaactggacactgagagggacgcagctgatgaatggaacatctatgtcttcccccaatgcatgtggaggcattgccctgatcctttcaggtctgaaagctaataacattgactacacagttcattcagtcagaagagctctagaaaacactgcagtgaaggctgacaatatagaagtatttgctcaaggacatggtattattcaggttgataaagcctatgactacctcgttcagaatacatcatttgctaataaattaggttttactgttactgttggaaataaccgtggcatctacctccgagatcctgttcaggtggctgcaccttcagatcatggcgttggcattgaacctgtatttccggagaacacagaaaactctgaaaaaatatcccttcagcttcatttagctctgacttcaaattcatcttgggttcagtgtcccagccatttggaactcatgaatcaatgtagacacataaacatacgtgtggatcccaggggcttaagagaaggattgcattatacagaggtatgtggctatgatatagcatcccctaacgcaggtccgctcttcagagttccgatcactgcagttatagcagcaaaagtaaatgaatcatcacattatgatctagcctttacagatgtacactttaaacctggtcaaattcgaaggcattttattgaggttcctgagggtgcaacatgggctgaagtgacagtgtgttcgtgttcttctgaggtgtcagcaaagtttgttctacatgcagtccagcttgtgaagcaaagagcatatcgaagccatgaattctataagttttgttctcttccagagaaaggaacactgactgaagcttttcctgtcctaggtggaaaagcaattgaattttgcattgctcgttggtgggcaagtctcagtgatgtcaacattgattataccatttctttccatgggatagtgtgtactgctcctcagttaaacattcatgcatcggaaggaatcaaccgctttgatgttcagtcctccttgaaatacgaagatctggctccctgcataactttgaagaactgggtccaaacactgcgcccagtgagtgcaaaaacaaaacctttaggatcaagagatgttttgccaaataaccgtcaactttatgagatggtcctgacatataactttcatcaacccaagagtggggaagtaactccaagctgcccactactttgtgaactattatatgaatctgaatttgacagccaactgtggattatttttgaccagaacaaaagacagatgggttcaggcgatgcctatccacatcagtattctttgaaactggagaaaggagattatacaattcgactacagattcgccatgagcaaatcagtgatttggaacgccttaaagaccttccatttattgtttctcatagattgtctaataccttgagcttagatattcatgaaaatcatagttttgcacttctagggaagaagaaatcaagcaatttgacattaccacccaaatataaccagccattctttgttacttccttacctgatgataaaatacctaaaggggcaggacctggatgctatcttgcaggatccttaacattgtcaaagactgaactaggaaagaaagctgatgtaatccctgttcattactacttaatacctccaccaacaaagactaagaatggcagcaaagataaggaaaaagattcagaaaaagagaaagatttaaaagaagagtttactgaagcattacgagatcttaaaattcagtggatgacaaagctggattctagtgacatttataacgaattgaaagaaacatatcctaattatcttcctctgtacgttgcacgacttcatcaattggatgctgaaaaggaacgaatgaaaagacttaatgaaattgttgatgcggcaaatgctgttatttctcatatagatcaaacagccctagcagtttatattgcaatgaagactgatcccaggcctgatgcagctactataaaaaatgacatggacaaacaaaaatccaccctcgtagatgccctttgtaggaaaggttgtgccctggcagaccatcttcttcacacccaggctcaagacggagccatttccactgatgcagaaggaaaggaggaggaaggagaaagtcctttggattctctggcagaaacattttgggaaactactaaatggactgatctctttgacaataaggttttgacatttgcatataaacatgcattagtaaataaaatgtatgggagaggccttaaatttgcaactaaacttgtggaagaaaaaccaacaaaagaaaactggaaaaattgtattcaactgatgaagttacttggatggacccattgtgcatcttttactgaaaactggctccccatcatgtatcctcccgattattgcgtattctaaaataggaaacaagactttaaattttaaaaaaggaagttttatagtgaatgggtataaaaacaaatttgtggcatttttagtctaatgcatgttttcatccactatccagtactgattattaaaatgacatgtatttatcagagaattcactgacgtgtggcttaatacatgtaaatctagacctctgacatcatggtgttttcttaatgcctcacattgctggcacggggatgtgccctgcctgccagcacctaggacttcgagttgggttgcagcttatgacatgcatgataggttttggaaggtaacttttaactgcaaacctataaagtactattttttattttataaatgaacagggttttaacgtgctcaactttaatttttttcaattgtatgaaggccttaaaaaagctacattaagcgtagctaaaattatttattggactaaaaactaacagaacttcatttccagaattttttttttttttttttttttttggcaaatgtttacattcaattaaggggaaaaagtagaaccagcacaaatgagtggcagttgctggagcataactgcttcaataaatcttcatcttggggtaattacaggcaagtcattttcacatcctcttgaggttcagagcatcagaatgaactctatgaatacatgtgtaagtgccagacagctgaatctttatcaggtattgtaaagatacacatatgatatgtttattaaaattgaaataatgtaaaacacatgaataaatttgcaaaaccaagatcacagtacaccatatgcactctggtaccttaatttttttttataaataataaaagtgaatattgaagcttcttaaaaaaaa

SEQ ID NO: 1992 - DNA, 9727 bp, Homo Sapiens
  NM_003292
gcgcaagaggatcagggatagcctctgagctcgggttcccagggttcgtagcttccaacggctgcgcgcgcacttcggtcgcgggcggtgaggtgctgttgctgaaacgctgccgctgagggtggactcgatttcccagggtcccgccgcgggagtctccggcgggcgggcgcgcgcgagccaccgagcgaggtgatagaggcggcggcccaggcgtctgggtcctgctggtcttcgcctttcttctccgcttctaccccgtcggccgctgccactggggtccctggccccaccgacatggcggcggtgttgcagcaagtcctggagcgcacggagctgaacaagctgcccaagtctgtccagaacaaacttgaaaagttccttgctgatcagcaatccgagatcgatggcctgaaggggcggcatgagaaatttaaggtggagagcgaacaacagtattttgaaatagaaaagaggttgtcccacagtcaggagagacttgtgaatgaaacccgagagtgtcaaagcttgcggcttgagctagagaaactcaacaatcaactgaaggcactaactgagaaaaacaaagaacttgaaattgctcaggatcgcaatattgccattcagagccaatttacaagaacaaaggaagaattagaagctgagaaaagagacttaattagaaccaatgagagactatctcaagaacttgaatacttaacagaggatgttaaacgtctgaatgaaaaacttaaagaaagcaatacaacaaagggtgaacttcagttaaaattggatgaacttcaagcttctgatgtttctgttaagtatcgagaaaaacgcttggagcaagaaaaggaattgctacatagtcagaatacatggctgaatacagagttgaaaaccaaaactgatgaacttctggctcttggaagagaaaaagggaatgagattctagagcttaaatgtaatcttgaaaataaaaaagaagaggtttctagactggaagaacaaatgaatggcttaaaaacatcaaatgaacatcttcaaaagcatgtggaggatctgttgaccaaattaaaagaggccaaggaacaacaggccagtatggaagagaaattccacaatgaattaaatgcccacataaaactttctaatttgtacaagagtgccgctgatgactcagaagcaaagagcaatgaactaacccgggcagtagaggaactacacaaacttttgaaagaagctggtgaagccaacaaagcaatacaagatcatcttctagaggtggagcaatccaaagatcaaatggaaaaagaaatgcttgagaaaatagggagattggagaaggaattagagaatgcaaatgaccttctttctgccacaaaacgtaaaggagccatattgtctgaagaagagcttgccgccatgtctcctactgcagcagctgtagctaagatagtgaaacctgggatgaaactaactgagctctataatgcttatgtggaaactcaggatcagttgcttttggagaaactagagaacaaaagaattaataagtacctagatgaaatagtgaaagaagtggaagccaaagcaccaattttgaaacgccagcgtgaggaatatgaacgtgcacagaaagctgtagcaagtttatctgttaagcttgaacaagctatgaaggagattcagcgattgcaggaggacactgataaagccaacaagcaatcatctgtacttgagagagataatcgaagaatggaaatacaagtaaaagatctttcacaacagattagagtgcttttgatggaacttgaagaagcaaggggtaaccacgtaattcgtgatgaggaagtaagctctgctgatataagtagttcatctgaggtaatatcacagcatctagtatcttacagaaatattgaagagcttcaacaacaaaatcaacgtctcttagtggcccttagagagcttggggaaaccagagaaagagaagaacaagaaacaacttcatccaaaatcactgagcttcagctcaaacttgagagtgcccttactgaactagaacaactccgcaaatcacgacagcatcaaatgcagcttgttgattccatagttcgtcagcgtgatatgtaccgtattttattgtcacaaacaacaggagttgccattccattacatgcttcaagcttagatgatgtttctcttgcatcaactccaaaacgtccaagtacatcacagactgtttccactcctgctccagtacctgttattgaatcaacagaggctatagaggctaaggctgcccttaaacagttgcaggaaatttttgagaactacaaaaaagaaaaagcagaaaatgaaaaaatacaaaatgagcagcttgagaaacttcaagaacaagttacagatttgcgatcacaaaataccaaaatttctacccagctagattttgcttctaaacgttatgaaatgctgcaagataatgttgaaggatatcgtcgagaaataacatcacttcatgagagaaatcagaaactcactgccacaactcaaaagcaagaacagattatcaatacgatgactcaagatttgagaggagcaaatgagaagctagctgtcgcagaagtaagagcagaaaatttgaagaaggaaaaggaaatgcttaaattgtctgaagttcgtctttctcagcaaagagagtctttgttagctgaacaaagggggcaaaacttactgctaactaatctgcaaacaattcagggaatactggagcgatctgaaacagaaaccaaacaaaggcttagtagccagatagaaaaactggaacatgagatctctcatctaaagaagaagttggaaaatgaggtggaacaaaggcatacacttactagaaatctagatgttcaacttttagatacaaagagacaactggatacagagacaaatcttcatcttaacacaaaagaactattaaaaaatgctcaaaaagaaattgccacattgaaacagcacctcagtaatatggaagtccaagttgcttctcagtcttcacagagaactggtaaaggtcagcctagcaacaaagaagatgtggatgatcttgtgagtcagctaagacagacagaagagcaggtgaatgacttaaaggagagactcaaaacaagtacgagcaatgtggaacaatatcaagcaatggttactagtttagaagaatccctgaacaaggaaaaacaggtgacagaagaagtgcgtaagaatattgaagttcgtttaaaagagtcagctgaatttcagacacagttggaaaagaagttgatggaagtagagaaggaaaaacaagaacttcaggatgataaaagaagagccatagagagcatggaacaacagttatctgaattgaagaaaacactttctagtgttcagaatgaagtacaagaagctcttcagagagcaagcacagctttaagtaatgagcagcaagccagacgtgactgtcaggaacaagctaaaatagctgtggaagctcagaataagtatgagagagaattgatgctgcatgctgctgatgttgaagctctacaagctgcgaaggagcaggtttcaaaaatggcatcagtccgtcagcatttggaagaaacaacacagaaagcagaatcacagttgttggagtgtaaagcatcttgggaggaaagagagagaatgttaaaggatgaagtttccaaatgtgtatgtcgctgtgaagatctggagaaacaaaacagattacttcatgatcagatcgaaaaattaagtgacaaggtcgttgcctctgtgaaggaaggtgtacaaggtccactgaatgtatctctcagtgaagaaggaaaatctcaagaacaaattttggaaattctcagatttatacgacgagaaaaagaaattgctgaaactaggtttgaggtggctcaggttgagagtctgcgttatcgacaaagggttgaacttttagaaagagagctgcaggaactgcaagatagtctaaatgctgaaagggagaaagtccaggtaactgcaaaaacaatggctcagcatgaagaactgatgaagaaaactgaaacaatgaatgtagttatggagaccaataaaatgctaagagaagagaaggagagactagaacaggatctacagcaaatgcaagcaaaggtgaggaaactggagttagatattttacccttacaagaagcaaatgctgagctgagtgagaaaagcggtatgttgcaggcagagaagaagctcttagaagaggatgtcaaacgttggaaagcacgtaaccagcatctagtaagtcaacagaaagatccagatacagaagaatatcggaagctcctttctgaaaaggaagttcatactaagcgtattcaacaattgacagaagaaattggtagacttaaagctgaaattgcaagatcaaatgcatctttgactaacaaccagaacttaattcagagtctgaaggaagatctaaataaagtaagaactgaaaaggaaaccatccagaaggacttagatgccaaaataattgatatccaagaaaaagtcaaaactattactcaagttaagaaaattggacgtaggtacaagactcaatatgaagaacttaaagcacaacaggataaggttatggagacatcggctcagtcctctggagaccatcaggagcagcatgtttcagtccaggaaatgcaggaactcaaagaaacgctcaaccaagctgaaacaaaatcaaaatcacttgaaagtcaagtagagaatctgcagaagacattatctgaaaaagagacagaagcaagaaatctccaggaacagactgtgcaacttcagtctgaactttcacgacttcgtcaggatcttcaagatagaaccacacaggaggagcagctccgacaacagataactgaaaaggaagaaaaaaccagaaaggctattgtagcagcaaagtcaaaaattgcacacttagctggtgtaaaagatcagctaactaaagaaaatgaggagcttaaacaaaggaatggagccttagatcagcagaaagatgaattggatgttcgcattactgcgctaaagtcccaatatgaaggtcgaattagtcgcttggaaagagaactcagggagcatcaagagagacaccttgagcagagagatgagcctcaagaaccttctaataaggtccctgaacagcagagacagatcacattgaaaacaactccagcttctggtgaaagaggaattgccagcacatcagacccaccaacagccaatatcaagccaactcctgttgtgtctactccaagtaaagtgacagctgcagctatggctggaaataagtcaacacccagggctagtatccgcccaatggttacacctgcaactgttacaaatcccactactaccccaacagctacagtgatgcccactacacaagtggaatcacaggaagctatgcagtcagaagggcctgtggaacatgttccagtttttggaagcacaagtggatccgttcgttctactagtcctaatgtccagccttctatctctcaacctattttaactgttcagcaacaaacacaggctacagcttttgtgcaacccactcaacagagtcatcctcagattgagcctgccaatcaagagttatcttcaaacatagtagaggttgttcagagttcaccagttgagcggccttctacttccacagcagtatttggcacagtttcggctacccccagttcttctttgccaaagcgtacacgtgaagaggaagaggatagcaccatagaagcatcagaccaagtctctgatgatacagtggaaatgcctcttccaaagaagttgaaaagtgtcacacctgtaggaactgaggaagaagttatggcagaagaaagtactgatggagaggtagagactcaggtatacaaccaggattctcaagattccattggagaaggagttacccagggagattatacacctatggaagacagtgaagaaacctctcagtctctacaaatagatcttgggccacttcaatcagatcagcagacgacaacttcatcccaggatggtcaaggcaaaggagatgatgtcattgtaattgacagtgatgatgaagaagaggatgatgatgaaaatgatggagaacatgaggattatgaagaggatgaggaagatgatgatgatgatgaagatgacacagggatgggagatgagggtgaagatagtaatgaaggaactggtagtgccgatggcaatgatggttatgaagctgatgatgctgagggtggtgatgggactgatccaggtacagaaacagaagaaagtatgggtggaggtgaaggtaatcacagagctgctgattctcaaaacagtggtgaaggaaatacaggtgctgcagaatcttctttttctcaggaggtttctagagaacaacagccatcatcagcatctgaaagacaggcccctcgagcacctcagtcaccgagacgcccaccacatccacttcccccaagactgaccattcatgccccacctcaggagttgggaccaccagttcagagaattcagatgacccgaaggcagtctgtaggacgtggccttcagttgactccaggaataggtggcatgcaacagcatttttttgatgatgaagacagaacagttccaagtactccaactcttgtggtgccacatcgtactgatggatttgctgaagcaattcattcgccgcaggttgctggtgtccctagattccggtttgggccacctgaagatatgccacaaacaagttctagtcactctgatcttggccagcttgcttctcaaggaggtttaggaatgtatgaaacacccctgttcctagctcatgaagaagagtcaggtggccgaagtgttcccactactccactacaagtagcagccccagtgactgtatttactgagagcaccacctctgatgcttcggaacatgcctctcaatctgttccaatggtgactacatccactggcactttatctacaacaaatgaaacagcaacaggtgatgatggagatgaagtatttgtggaggcagaatctgaaggtattagttcagaagcaggcctagaaattgatagccagcaggaagaagagccggttcaagcatctgatgagtcagatctcccctccaccagccaggatcctccttctagctcatctgtagatactagtagtagtcaaccaaagcctttcagacgagtaagacttcagacaacattgagacaaggtgtccgtggtcgtcagtttaacagacagagaggtgtgagccatgcaatgggagggagaggaggaataaacagaggaaatattaattaaatggtctgtaaacaataacaactgtgaataagattatcaaatctgttttagtgtaatgattgtcaagtttaaaaacatttttatatataaactggtatactcatgtcaatattctttattaataaaatgtttttcagtgtcaaaatttattattcatttcttcattagttgactcctcctttgctcatcagtctaaggacagttgtaccagactttggataaggtctgcccagaacgagtagtaattgctcttgctgttctactaggcacatcaatgttatagtattgatctaaatggaagagaaaacatttttttagttaaaaagaaaacaatgcccaaactaaaaaataacttatgttgactattatgctcaaagacaatgtttatcattttaatagagatgtttttactaattaatttgaactttataacaaaaagaaaaacaattgcctagacttttcagcttttttgatgtttcaaaagattgacatttcaccatctttttgtaaaatcaggttcagctctcctttatgaagtaaacattaaagagtaaccaagtttgaaaaataatttacttggggttattccttttaaaaaatacatgccaatgtcattcatattatgaaattacaggcagaataacttagatttctgggcatttcaaagaaaagcatcctgagtaatataatttaattaataaaattagtttctcaggaacttctttctgatcttacagactctgcagtgatgcaaatcattataaccttgtgccaaacaaggtatctgttaaatgccacaaatgatagaagtaaaatactattgtcagtagcaagtttactctagtaactggatgttttatcgtaatctcatgaaggttagagcagaattgaattgcagtgccatcattttaattgaaattaaagcaaaagtcttaactcttttccacagcaattagaataagtaccgtagtgtaacttctcacattcagtcatcattgcagccagcatttttactttatcttcatgttttcacaaatgatatcacctccttgggaaactgttagttaataccttacctttagaaaaggcatagtaatcatagccgtcaggttttctgatgttgggcagtgatatagctgaggtaaccacatttggaagtcctctccacagtatactcactttaacttcattatgaaggacacctgtaagtggcatgtttaataaaagataccagattaaaaggcaatgtactatcttggaaagagccagacatctgagttttaatctcagttttagccctctgatgtagaactattgagggttatagactggtatataatgttcttggtaagaagtacttgataaatagtattggttataactaacaaacctgaacaaactgctttacttacccacaaggaaaaagaaagtattggtctttggttattcactaaggcaagtggatgagtttttcatcagtaagcttaaattattagggctgtttgatcagtatccatatttcataagccttactgtataagaaactgtattacatctacttatgtttaaggatttttttaacacaataaaaatgttacctttgtcttgataagccagtctggcaggtgaatattgaattctgatggtgtgtgtttgagaaggtcctatagcacgttcaaagcgacgtctcctaacctgtgtcgtttctccatacactggataatttagagcaggccttcttccagggcacttctgtacaggttcctgtttataaatatactgctgaatgctgccacctgttatgtattagaatatcacatggaaaatgaaaattaattttaataccctcagaaaaggtggaaaacaacttttacaatgtataggaaacagttttgttctcatttttcatataatatattgatattaataatggctattagtcaagggtattataaaaataattattaaactgaaatacttgttgaatgaatagatgcagcaaattacatagttatatatttaatttcaattgaaagtgacaagtgctcagtttggcagcacatatactaaaactggaatgatacagagattagcatggcccttgtgcaaggatgacatgcacatttgtgaagcgaaagtaaatgacattctatcagtgacctgaaaactcaaatgaattgtgacttgcctgtgaagaaatgaaaataaaaattgagggcaataagaatactaccctcaatattgatttttttcactgaaaatatttgatttcagccattaaagatatcttttgacagtaaagtcaataataaatgaaaaaaaaaaaaaaaaaaaaaaa

SEQ ID NO: 1993 - DNA, 829 bp, Homo Sapiens
  NM_003295
ccccccgagcgccgctccggctgcaccgcgctcgctccgagtttcaggctcgtgctaagctagcgccgtcgtcgtctcccttcagtcgccatcatgattatctaccgggacctcatcagccacgatgagatgttctccgacatctacaagatccgggagatcgcggacgggttgtgcctggaggtggaggggaagatggtcagtaggacagaaggtaacattgatgactcgctcattggtggaaatgcctccgctgaaggccccgagggcgaaggtaccgaaagcacagtaatcactggtgtcgatattgtcatgaaccatcacctgcaggaaacaagtttcacaaaagaagcctacaagaagtacatcaaagattacatgaaatcaatcaaagggaaacttgaagaacagagaccagaaagagtaaaaccttttatgacaggggctgcagaacaaatcaagcacatccttgctaatttcaaaaactaccagttctttattggtgaaaacatgaatccagatggcatggttgctctattggactaccgtgaggatggtgtgaccccatatatgattttctttaaggatggtttagaaatggaaaaatgttaacaaatgtggcaattattttggatctatcacctgtcatcataactggcttctgcttgtcatccacacaacaccaggacttaagacaaatgggactgatgtcatcttgagctcttcatttattttgactgtgatttatttggagtggaggcattgtttttaagaaaaacatgtcatgtaggttgtctaaaaataaaatgcatttaaactcatttgagag

SEQ ID NO: 1994 - DNA, 1428 bp, Homo Sapiens
  NM_003296
gtggcgcctggcaagtgaacaatcgcggtgagaggggcgcgccgcagctcctcaacgccgcaacgcgccggcccaactgcaggaaggtctgtgctctggagccagggtaaatggttataaaattatacaccatggccctcctaaagacactctaggaaaaccatgtcatcctgatcttaaaacacctgcaagaaagagcacagtacttcaccattaataaagtagatatttcatcctgctcagaaaaccaacatttccagcaatggctttactaccggtgttgtttctggttactgtgctgcttccatctttacctgcagaaggaaaggatcccgcttttactgctttgttaaccacccagttgcaagtgcaaagggagattgtaaataaacacaatgaactaaggaaagcagtctctccacctgccagtaacatgctaaagatggaatggagcagagaggtaacaacgaatgcccaaaggtgggcaaacaagtgcactttacaacatagtgatccagaggaccgcaaaaccagtacaagatgtggtgagaatctctatatgtcaagtgaccctacttcctggtcttctgcaatccaaagctggtatgacgagatcctagattttgtctatggtgtaggaccaaagagtcccaatgcagttgttggacattatactcagcttgtttggtactcgacttaccaggtaggctgtggaattgcctactgtcccaatcaagatagtctaaaatactactatgtttgccaatattgtcctgctggtaataatatgaatagaaagaataccccgtaccaacaaggaacaccttgtgccggttgccctgatgactgtgacaaaggactatgcaccaatagttgccagtatcaagatctcctaagtaactgtgattccttgaagaatacagctggctgtgaacatgagttactcaaggaaaagtgcaaggctacttgcctatgtgagaacaaaatttactgatttacctagtgagcattgtgcaagactgcatggataagggctgcatcatttaattgcgacataccagtggaaattgtatgtatgttagtgacaaatttgatttcaaagagcaatgcatcttctcccccagatcatcacagaaatcactttcaggcaatgatttacaaaagtagcatagtagatgatgacaactgtgaactctgacataaatttagtgctttataacgaactgaatcaggttgaggattttgaaaactgtataaccataggatttaggtcactaggactttggatcaaaatggtgcattacgtatttcctgaaacatgctaaagaagaagactgtaacatcattgccattcctactacctgagtttttacttgcataaacaataaattcaaagctttacatctgcaaaaaaaaaaaaaaaaaaaa

SEQ ID NO: 1995 - DNA, 4029 bp, Homo Sapiens
  NM_003297
gcttctccccgttgctaatgcgcaggcgctggcgggatagcgcgccgccgagccgagaaagaggtcacgaactctgaccccccagaaatacccaaacacagaaagctctctccgccgtgaatctcgatcccacatcccgtcggctttcttcaacctctcttcccggagcgccccccaatccacgagtggcagccgcgggactgtcgcgtcggcgcccgacgccggagtcagcagggcgcaaaagcgccggtagatcatggcaaccatagaagaaattgcacatcaaattattgaacaacagatgggagagattgttacagagcagcaaactgggcagaaaatccagattgtgacagcacttgatcataatacccaaggcaagcagttcattctgacaaatcacgacggctctactccaagcaaagtcattctggccaggcaagattccactccgggaaaagttttccttacaactccagatgcagcaggtgtcaaccagttattttttaccactcctgatctgtctgcacaacacctgcagctcctaacagataattctccagaccaaggaccaaataaggtttttgatctttgcgtagtatgtggagacaaagcatcaggacgtcattatggagcagtaacttgtgaaggctgcaaaggattttttaaaagaagcatccgaaaaaatttagtatattcatgtcgaggatcaaaggattgtattattaataagcaccaccgaaaccgctgtcaatactgcaggttacagagatgtattgcgtttggaatgaagcaagactctgtccaatgtgaaagaaaacccattgaagtatcacgagaaaaatcttccaactgtgccgcttcaacagaaaaaatctatatccgaaaggaccttcgtagcccattaactgcaactccaacttttgtaacagatagtgaaagtacaaggtcaacaggactgttagattcaggaatgttcatgaatattcatccatctggagtaaaaactgagtcagctgtgctgatgacatcagataaggctgaatcatgtcagggagatttaagtacattggccaatgtggttacatcattagcgaatcttggaaaaactaaagatctttctcaaaatagtaatgaaatgtctatgattgaaagcttaagcaatgatgatacctctttgtgtgaatttcaagaaatgcagaccaacggtgatgtttcaagggcatttgacactcttgcaaaagcattgaatcctggagagagcacagcctgccagagctcagtagcgggcatggaaggaagtgtacacctaatcactggagattcaagcataaattacaccgaaaaagaggggccacttctcagcgattcacatgtagctttcaggctcaccatgccttctcctatgcctgagtacctgaatgtgcactacattggggagtctgcctccagactgctgttcttatcaatgcactgggcactttcgattccttctttccaggctctagggcaagaaaacagcatatcactggtgaaagcttactggaatgaactttttactcttggtcttgcccagtgctggcaagtgatgaatgtagcaactatattagcaacatttgtcaattgtcttcacaatagtcttcaacaagataaaatgtcaacagaaagaagaaaattattgatggagcacatcttcaaactacaggagttttgtaacagcatggttaaactctgcattgatggatacgaatatgcctacctgaaggcaatagtactcttcagtccagatcatccaagcctagaaaacatggaacagatagagaaatttcaggaaaaggcttatgtggaattccaagattatataaccaaaacatatccagatgacacctacaggttatccagactactactcagattgccagctttaagactgatgaatgctaccatcactgaagaattgtttttcaaaggtctcattggcaatatacgaattgacagtgttatcccacatattttgaaaatggagcctgcagattataactctcaaataattggtcacagcatttgaaaactgtgactgcagtgctgtaaacttaactgttctttgccagaacacaagacaccaaattgaactcactgcttttgaggcatctggaaatttttactttaaaaagtaaccagaatccaaggtatttttattttagcttcccttaagaatttttgaagtgactgggcaggcagcagaaattaaatgaatttttcttcctgattcctttaaatgaatatgaaacactacaaatttattcttggtgaagatgatacctgaagctgtcacctcttgattatctaaactaagcgctcattctattttataaaacaaataaattagtctcttttttctgaattgtgttctagtcatatttaacttcattatgaactagtaaaaatacttaatggtcagaaatccctaaggagttagttccttgcattttactctgccataataatttttgtttaattaccatatcaaaataagattattttatgcttactggtataatgacagtattagaactataggaaataattgaatacatattttttgtcttctctaaatatcatggtgtcccttagcatatactactctcattgctggcagtgagacaggccattcatgatcttaagagttgccatttttaatgtatattattagttacaagcactttatatagcagaaaattgtttttgagaataagctagtgttgatattttaatatttttagcttactgctcgtgtttttgtttttgttttcgtttatagaggtgggtttcactgttgcccaggctggtctcaaactcctgggctcaagtgatcctgcctcagcctcccaaagtactgggattacaggcgcgtgccaccgtgcctggcctactgctgtctttgaaaataatagagactagccaggtgtagtggctcatgcctataatcccagcactttgggaggctgaggcaggcagattgcttgagctcaggagttcgagaccagcctgggcaatatagcaagacctcgtctctgtaaaaagaaagaaagtaataaagactaattgagcccaaaatgtttcactatttcaaaaaagatatttaaattgttgctctttcattccataaaaaggatctgatctctctcccacttttctgacctgagttagagcttcccaaacctgtcatgtatgggttttagccaatttcttttagatcactaaaaaaactcacccaatatgtcaaataatggatttatcatagccagtacatgttctcaaggcaagtttaaacattattttgaagctattgataattttttaaaataaagaaatattcactgatttttttcactgtaaagcacgggagggctgctttaacaacagtataagaatcagcctgaagccttgttactgctacaacaaattcattttagactcctcggatgtcttccacagtaatttattcttttagcaaacctgatactgataactgtttctttgctttgatttcttgatgaattattttggtatgtttgttgatttttaaagcaaacacggataatgcactcagagtacattttttgtaaagatttttgcaatagaagaaaagtgaagtttttgtggggatgtggattttattgcttactactttatagtaatcaaaagtttgaaaatatcaacttacagtctttaccagtttactaagggaaacttttttccctatttaaaacatgatcttagtcaacaattttatttataattatcagctaaattacatttagtataatactcaaatggaaaaatcagtagtttatacctttataaatacagtttagtaagccaaggaatcagggaaataatcctttaaaataatgtactaatagttaagatgtttcaggtgttttttctgattaaatttgctactatatttggaagactttaaaactatattaaaatgtgacttgcattacaaaaaaaaaaaaaaaa

SEQ ID NO: 1996 - DNA, 1732 bp, Homo Sapiens
  NM_003310
gatgacacatccgaaaaataggaagtggccactacggaagctgttctgggccagaaagacttccagtttggagtcgtttgctgcggggagggaatgaatgggcgctgggaacacgcccgcgaggtggggacgcgccggccgtagcgaggtccttagcgtgtgagtggccggggtcgggtcgcttccccgcagcatggaggacgatgcaccagtgatctacgggctggagttccaggcacgtgccttaacacctcaaactgcagaaacagatgccattcggtttttggttgggacgcagtctcttaaatatgataatcagatccatatcatagattttgacgatgaaaacaacattataaataaaaatgtcctcctccatcaagcgggtgaaatctggcatattagcgctagccctgcagacagaggtgtgctgacgacctgctacaacagaacttcagacagcaaagtcctgacatgtgcagccgtgtggaggatgccgaaggaattggaatcaggcagccacgagtcccctgatgattcatccagcactgcacagaccctggagctgctctgtcaccttgacaacacagcccatggcaacatggcctgtgtcgtgtgggagccaatgggagatgggaagaaaatcatttccttggctgataaccatatcctgctgtgggatttacaggaaagctcgagccaggctgtgctggccagctcagcgtccctggaagggaagggacaactgaagttcacctcaggacggtggagcccacatcataactgcacccaggtggccacagcgaacgacaccaccctccgtggctgggacacccggagcatgagccagatctactgcatagagaatgcccacggacagctggtgcgggaccttgactttaatcccaataagcagtactacttggccagctgcggagacgactgtaaggtgaagttctgggacacccgaaatgtcaccgaacccgtgaagaccctggaggagcactcccactgggtgtggaacgtccgctacaaccactctcatgaccagctggtcctcacgggcagcagtgacagcagagtcatcctttccaacatggtgtccatctcgtcggagcccttcggccacttggtagacgacgatgacatcagtgaccaggaggaccaccgttctgaagagaagagcaaggagcccctgcaggacaacgtgatcgccacctacgaggagcacgaggacagcgtctatgccgtggactggtcctcggctgacccgtggctgtttgcctccctgagctatgacgggaggctcgtgatcaacagggtgcccagggccctgaagtaccacatcctgctatgactcccgggcctgggttatccaggtcccattgagtggttttcctcttggcagattctcaaacagtcgcagctctttggaggtgactcgtgttccaggtggatccctctctgggagagccgctgttcccttcctgtagcagcagcatttatgaatggggtgaatggggctattgtcgacggcacagctaatgcccgaacccagcccctgtcggcagagacagagccccacattattatgtgaataacaatgttttctgttttaagggtgtcaggagtttcgctttttaaaaaaatgtctgttcctgcaatagtaactcttctttctcttgagagtaaaaaatgaaataaaataaatccacgctgcaaaaaaaaaaaa

SEQ ID NO: 1997 - DNA, 9021 bp, Homo Sapiens
  NM_003316
cctaaagaaaagtattaagtaaatagcagtacagatggcaaatggattgcacaatatatcctctggatccatagtgaccctgcagagataaacctgtgatggtcaaacaatgtgaaaactgctgtcagagacatgggcagggtgctcttgtttacagagaagaggtgcaaaaatcaacttgatggtagtgggaagatcaggaaatgcttcctgaaattgagtattaagaactaatagacattaggtggttgcagaataagttttgtttaggaaggacaagcagttgggtatgactggcttctaggttgtgtgttgtggagtgactggggataaaagcaggagcaagatcacaaaaggtcttctatgcttatattagggaagttggactttattctcaagctgaagggaagctgttgcatggttttaagcagtaaagtgatatgatcagagttttagaggatgccaagattgaaggcaagtctgaccagttaggagactgcttgttaaattagttcagaggagaaacagtgaaggcagtggcactgggcatgaagaagtatatgtgtgctaattttagatttcttagggaagcagaaatgacaagagttagtggtccattggacagaaatattgaaggagactggggagtctaggttgactcccagggtttaggtttgggcagtaaaatgacatgtagaacaattaactgataaacagcatacagaaagaggaaagaacttcatttcatatgtttgtttttgaggaaaagatgtttgtttttgaacttcctgattcagaggggcttgtgggacatcttggttaagatcctgtagtagttctagtagggtctagaagtcaagagatacaaccccgcctggaaggatttgggagtcttcagcatttggaattttggaagccattgtttactgcagtgcatatgagataatttaaactggtacatagataaacacttgaaaaaattttaatagataggaatttaatgtgtatgagaaacataacttgcacatctaacctttgataatcatggacattatcacttaggccaagtgagctcaataaaagggaaatattaactaaaaatatatgtgatacatggaaatggcaaaaatcacggtgaagctatgcaaacgatgcaagttcagaaagtgctgtgttaagtcatgggtgtggtggataaattcacccaaggagagagtaagagtgagaagaaaagagagttgacattgggtggcggggaatggagaagaagaacccatgaaggaaactgaggaagagcagccagacgaataggaggaaaaccaggagaagatggtctttggagtccaaatgaagagttctgaggaggaagtggtccacagcgtcaaacttgtgcaccatggacaattttgctgagggagatttcactgtggcggattatgccttgttagaagattgccctcacgtggatgattgtgtctttgctgctgaatttatgagcaatgattatgttcgtgtgactcagctttactgtgatggggtgggtgtgcaatataaagattatatccaaagtgagaggaatttggaatttgacatctgcagtatatggtgtagtaaaccaatttctgtcctgcaagattattgcgatgccattaaaataaacatcttctggccacttctgtttcaacatcaaaacagttccgtaatatcacgattgcatccctgtgtggacgccaacaattcacgtgcttctgagataaatttgaagaaactacaacatcttgagttgatggaagatattgtggatttggcaaagaaagttgctaatgattcattccttattggaggcttattgagaattggttgtaaaatagaaaataaaatcttggcaatggaagaagctctgaattggataaaatatgcaggcgatgtaacaattctaactaaattaggatcaattgacaattgttggcctatgttaagtattttctttactgaatacaagtaccacataactaaaattgtaatggaagactgcaatttgcttgaagaacttaaaactcaaagttgtatggattgtatagaggaaggagaactaatgaaaatgaaaggaaatgaagagttttccaaagaaagatttgatatagctattatctattacaccagagccattgaatatagacctgaaaactaccttctttatggtaaccgagctctttgttttcttcgtactggacagtttagaaatgcactcggtgatggaaagagagccactattctgaagaacacttggccaaagggtcattatcgttattgtgatgctctttctatgctgggggaatatgactgggccctgcaagcaaacataaaagctcaaaaactctgtaaaaatgaccctgagggaatcaaggatctaattcagcagcatgtaaagttacaaaaacaaatagaagacctacaaggtcgaacagcaaataaggatccaattaaagccttttatgaaaacagggcctacacacctaggagtttatcagcacctatatttactacttcacttaactttgtggagaaggaaagagatttcagaaaaattaatcacgaaatggccaacggtggtaatcagaatctaaaggtggcggatgaggcgttgaaggtagatgattgtgactgtcatcctgaattttcaccaccatcaagtcagcctccaaaacataaaggaaaacaaaaatctcgaaacaatgaatcagaaaagttcagttctagttcaccattgactttaccagcagatttgaagaacatcttggagaaacagttttctaaatcttccagagctgcacaccaggattttgctaatataatgaaaatgctgagaagcttaattcaagatggctatatggccttattggagcagcgttgccgcagcgctgcacaggcctttacagagttgctgaacggtttagatcctcaaaaaataaagcaattgaacctggccatgattaactatgttttggtcgtctatggacttgccatttctctccttggaataggacagcctgaggaattatctgaagccgaaaaccagtttaagaggattattgaacactaccccagtgagggccttgattgcttggcctactgtggaattggaaaagtatatttgaaaaaaaacagatttctagaagctctcaatcactttgagaaagcaagaaccttgatttatcgtcttcctggagtgttaacttggcccacgagtaatgtgattattgaagagtctcagccacaaaaaataaagatgctgttagagaaatttgttgaagaatgcaagttccctccagtgccagatgccatttgttgctatcagaagtgccatggatattctaagatccagatatacataactgatccagactttaagggttttatacgcatcagctgttgccagtactgtaaaatagaatttcacatgaattgctggaagaagttaaaaactacaacctttaatgataaaattgacaaggattttctacaaggaatatgtcttacccctgactgtgaaggtgtcatttctaagattatcatcttcagcagtggtggtgaagttaaatgtgaatttgaacacaaggtcataaaagaaaaggttcctccaagacctattctgaaacagaaatgttctagcctagagaaactaagactgaaagaagacaaaaaattgaagagaaagatccaaaaaaaagaagcaaaaaagttagcacaagaaagaatggaggaggacttaagagaaagtaatccacccaaaaatgaagagcagaaagaaactgtagacaatgttcagcgttgtcagttccttgatgacagaattctacagtgtataaagcagtatgctgacaagattaaatccggcatacagaatacagccatgcttctcaaagaattgctttcttggaaagttttgagcacagaagactatacaacctgtttttctagcagaaattttctaaatgaagcagtggactatgttattcgccacttgattcaagaaaataacagagtaaagacaagaatatttctgcatgttttgagtgagcttaaagaagtggagcccaaattagccgcctggatccaaaaacttaatagctttggcttagatgccacaggaactttcttttctcgttatggagcatctcttaaactgcttgattttagtatcatgactttcctctggaatgagaaatatggtcacaaactagactctatagaaggaaagcaacttgattatttctctgagccagcatcattgaaggaagcccgttgtttaatatggctgctagaagaacacagagacaagttcccagcattgcatagtgctttagatgaattctttgatataatggacagccgctgtactgtgttaaggaaacaagatagtggtgaagcaccgtttagttcaaccaaggtgaaaaacaaaagcaagaaaaagaagccaaaggattcaaagcctatgttagttgggtctggaacaacttcagtaacttcaaataatgagatcatcacttcaagtgaagaccatagcaatcgaaattcagattctgcaggcccatttgcagtgcctgaccatcttcggcaagatgtagaagaattcgaagctctctatgaccaacacagtaacgaatatgttgtccgcaataagaagctatgggacatgaacccaaaacaaaaatgttcaactctatatgattacttctctcagtttttggaggaacatggtcccttggacatgagtaacaagatgttctctgcagaatatgagtttttcccagaagaaactcgacagatactagaaaaagcaggaggtttaaaaccttttctcttgggatgccctcgttttgttgtgattgacaactgtattgcactgaagaaggttgcatcacggctcaagaaaaaaaggaagaagaaaaacattaaaacaaaagtagaagaaatttcaaaagcaggggagtatgtacgagttaaactacaactgaatccagctgctagggaatttaaaccagatgtaaagtctaaaccagtgtcagattcatcttcagcaccagcttttgaaaatgtgaaacccaaacctgtgtctgcaaattctcccaagccagcttgtgaagatgtgaaggccaaaccagtatccgacaattcttctagacaagtttctgaggatgggcaacccaaaggggtctcttctaattctcctaaaccaggctctgaggatgcaaattacaagcgagtctcctgtaattcccccaaaccggttcttgaggatgtgaaaccaacttattgggctcaatcccatttggtcacaggatactgtacgtatcttcctttccagagatttgatatcacccagacaccgccagcatacataaacgtgttaccaggtttgccccagtacaccagcatatatacacccttggccagcctttctcctgaatatcagctaccaagatcagtaccagtggtgccgtcttttgtagccaatgacagagcagataaaaatgctgctgcctattttgagggtcatcatttgaatgctgagaatgttgctggtcaccagattgcctctgaaacacagatccttgagggctctttgggaatatctgtaaagtcacactgcagcacaggtgatgctcatacagtcctgagtgagtctaacagaaatgatgagcactgtggaaattctaacaacaaatgtgaagtaattccagaaagcaccagtgcagtaacaaacattccacacgtgcagatggttgccatacaggtatcttggaacataatacaccaagaagtcaatactgagccatataatccttttgaggaacgacaaggggaaatttcacggattgaaaaggagcaccaagtattacaagaccaacttcaagaagtgtatgaaaattatgagcagataaaacttaagggcttagaagagaccagggacctggaagagaagttgaaaaggcacttagaagaaaacaagatctcaaagacggaattagattggttccttcaagatttggaaagagaaattaaaaaatggcaacaggaaaaaaaagaaatccaagaaagactaaaatcactgaagaagaaaattaaaaaggtttcaaatgccagtgaaatgtatacccagaaaaatgatggaaaggaaaaggaacatgaattacatctggatcagtcccttgaaatcagcaacacacttacaaatgagaaaatgaaaatagaagagtatataaagaaagggaaagaggattatgaagagagtcatcagagagctgtggctgcagaggtatccgtacttgaaaactggaaggagagtgaagtgtataagctacagatcatggagtcacaagcagaagcctttctgaagaagctggggctgattagccgtgatcctgcagcatatcctgacatggagtctgatatacgttcatgggaattgtttctttctaatgttacaaaagaaattgagaaagcaaagtctcagtttgaagaacaaattaaggcaattaaaaatggttctcggctcagtgaactttctaaagtgcagatttctgagctttcatttcctgcctgtaacacggttcatcccgagttactccctgagtcttcaggcgacgatggccaagggcttgtgacttctgcaagcgacgtgactggaaaccacgcagcacttcacagggatcctagtgtgttctctgctggtgattccccaggggaggctccttctgcgctgttgccagggccaccccctggtcagcctgaagccactcagctgacagggccaaaacgggctggccaggcagctctgtcagaacgaagccctgtggctgatcggaagcagcctgttcctccaggacgtgctgcgcgttcaagccagtctccaaaaaagccgttcaatagtattattgagcacctgtcagtggtattcccatgttacaacagcactgagcttgctggttttattaaaaaagtgcgaagcaaaaacaagaactcactctcaggattgagtattgatgaaattgtccaaagagtgacagaacacattctagatgaacagaaaaagaaaaagccaaacccaggaaaggacaagaggacttatgagcccagctctgccacccccgtgaccaggtcctcccagggctcaccctcggtggttgttgcaccatcacccaaaaccaaggggcagaaagcagaagatgtccctgtgaggattgcactgggtgcaagttcctgtgaaatatgccacgaggtgttcaaatcaaaaaacgtgcgtgtgctcaaatgtgggcacaagtatcacaaagggtgctttaagcagtggcttaaagggcagagcgcttgcccggcctgccagggtcgtgatctcctgacagaagagtcaccttctggaagaggctggcccagtcagaatcaggagctgccttcctgctcttctaggtagtcacacttcactaaagtgtcatccaccagtgtgttgaatccgaagaatgacaattttctaccactggtgtaaaaaacaaacatttgaagacccttgtgcattgtgtgtcacaaagctaaatacatggaaatcgttaatatcgctgatattaagtaatttccccactctgagtgaatactttgatgattgccaacagtggctaataaaatgacggctaccacactcatgggtcactggggctgcgcagggctctttgaggtgggtggcttcttttggaaagtactatgaacgtctcgaagcagtattctagtgataagaattcttaacatagccaagcgccccacgtttgttccccacgtttgttccccttttctgtttgaaaaacctgttctggtagctccacaagagagatgatactgactttttaaattttttacaagagtctgtattcctgatatgcctatatttttcctcaaagattctgcattttaaggatgggcataagcaaactatattttaataatttatagttaatgttaaaatattggctgatttagaccaaaagattcaaatctcctctttgtgaaatcccatctgcatttgattttttattattttatgttcccccgttagattgttttaagtgtttgcttttcatcttttatagatgtaatctgattttcaaaaatcattaacactttttaattagtatcgactaagactttttccccctggaatcgaggctgtgtgtccgtcatcccagcccccggttggagcctgctctttgaactccgctgccttccttagcagcttctgtcctcttctgtgagtcagtcagcgagtgcttgggatccgcatccagccgtgctgagcacacaacaggctgtgtgtggaaatggccaccaccattctccttccccaccccaccacaaaaagagaagctgtgtctttagacaaccctgaggtatctgtgttacaatcgttctgtgtttgatatttgtgtaaagtatgcatgcagtcttgtactgtgacctaagaacaaaactgtaactgcattagaaaccatgaaaaaattagatattgttttgtgacttttagacagtggtaaatatagaaccatgaattctggtcacattccatttctctccaacatgaaggatcaaaaaatgtttttcaatgtgttctttgttccactggaaacttagagtcatgagtttatgagctgatttggtcaccttcctctgcctttgttcactgtgagttctgatgtcttagtgacttagttcttagaagctcacgccttagtttgaaacagattctccacggtggtccccaaaacactgtctgcatatccataagaattgagcgctatgggtgttaacgtgcatgaggatcagtttgcagcagcaagtacaaaaggagaagaggaacatccgttgaatgagtgtgttttgtacataacttcagatacttgtgaacatgccttatatttgtccaacaactgtcagaataaagaacattctaaaatgagaaaaaaaaaaaaaaaa

SEQ ID NO: 1998 - DNA, 3010 bp, Homo Sapiens
  NM_003318
agcattgaccaataggagaccgtagtgatagcgacggggaaattcaaacgtgtttgcggaaaggagtttgggttccatcttttcatttccccagcgcagctttctgtagaaatggaatccgaggatttaagtggcagagaattgacaattgattccataatgaacaaagtgagagacattaaaaataagtttaaaaatgaagaccttactgatgaactaagcttgaataaaatttctgctgatactacagataactcgggaactgttaaccaaattatgatgatggcaaacaacccagaggactggttgagtttgttgctcaaactagagaaaaacagtgttccgctaagtgatgctcttttaaataaattgattggtcgttacagtcaagcaattgaagcgcttcccccagataaatatggccaaaatgagagttttgctagaattcaagtgagatttgctgaattaaaagctattcaagagccagatgatgcacgtgactactttcaaatggccagagcaaactgcaagaaatttgcttttgttcatatatcttttgcacaatttgaactgtcacaaggtaatgtcaaaaaaagtaaacaacttcttcaaaaagctgtagaacgtggagcagtaccactagaaatgctggaaattgccctgcggaatttaaacctccaaaaaaagcagctgctttcagaggaggaaaagaagaatttatcagcatctacggtattaactgcccaagaatcattttccggttcacttgggcatttacagaataggaacaacagttgtgattccagaggacagactactaaagccaggtttttatatggagagaacatgccaccacaagatgcagaaataggttaccggaattcattgagacaaactaacaaaactaaacagtcatgcccatttggaagagtcccagttaaccttctaaatagcccagattgtgatgtgaagacagatgattcagttgtaccttgttttatgaaaagacaaacctctagatcagaatgccgagatttggttgtgcctggatctaaaccaagtggaaatgattcctgtgaattaagaaatttaaagtctgttcaaaatagtcatttcaaggaacctctggtgtcagatgaaaagagttctgaacttattattactgattcaataaccctgaagaataaaacggaatcaagtcttctagctaaattagaagaaactaaagagtatcaagaaccagaggttccagagagtaaccagaaacagtggcaatctaagagaaagtcagagtgtattaaccagaatcctgctgcatcttcaaatcactggcagattccggagttagcccgaaaagttaatacagagcagaaacataccacttttgagcaacctgtcttttcagtttcaaaacagtcaccaccaatatcaacatctaaatggtttgacccaaaatctatttgtaagacaccaagcagcaataccttggatgattacatgagctgttttagaactccagttgtaaagaatgactttccacctgcttgtcagttgtcaacaccttatggccaacctgcctgtttccagcagcaacagcatcaaatacttgccactccacttcaaaatttacaggttttagcatcttcttcagcaaatgaatgcatttcggttaaaggaagaatttattccatattaaagcagataggaagtggaggttcaagcaaggtatttcaggtgttaaatgaaaagaaacagatatatgctataaaatatgtgaacttagaagaagcagataaccaaactcttgatagttaccggaacgaaatagcttatttgaataaactacaacaacacagtgataagatcatccgactttatgattatgaaatcacggaccagtacatctacatggtaatggagtgtggaaatattgatcttaatagttggcttaaaaagaaaaaatccattgatccatgggaacgcaagagttactggaaaaatatgttagaggcagttcacacaatccatcaacatggcattgttcacagtgatcttaaaccagctaactttctgatagttgatggaatgctaaagctaattgattttgggattgcaaaccaaatgcaaccagatacaacaagtgttgttaaagattctcaggttggcacagttaattatatgccaccagaagcaatcaaagatatgtcttcctccagagagaatgggaaatctaagtcaaagataagccccaaaagtgatgtttggtccttaggatgtattttgtactatatgacttacgggaaaacaccatttcagcagataattaatcagatttctaaattacatgccataattgatcctaatcatgaaattgaatttcccgatattccagagaaagatcttcaagatgtgttaaagtgttgtttaaaaagggacccaaaacagaggatatccattcctgagctcctggctcatccatatgttcaaattcaaactcatccagttaaccaaatggccaagggaaccactgaagaaatgaaatatgttctgggccaacttgttggtctgaattctcctaactccattttgaaagctgctaaaactttatatgaacactatagtggtggtgaaagtcataattcttcatcctccaagacttttgaaaaaaaaaggggaaaaaaatgatttgcagttattcgtaatgtcagataccacctataaaatatattggactgttatactcttgaatccctgtggaaatctacatttgaagacaacatcactctgaagtgttatcagcaaaaaaaattcagtagattatctttaaaagaaaactgtaaaaatagcaaccacttatggcactgtatatattgtagacttgttttctctgttttatgctcttgtgtaatctacttgacatcattttactcttggaatagtgggtggatagcaagtatattctaaaaaactttgtaaataaagttttgtggctaaaatgacactaacattt

SEQ ID NO: 1999 - DNA, 2089 bp, Homo Sapiens
  NM_003321
agacactggcggctagaggggcccggacttgccctcccagctctaacttccgccggaagtgccttccagccgcaggcgcccttcttcttctgtgcgctcgggctcctggtcccggctccccggttaccggggcgcgagtatgaccacaatggcggccgccaccctgctgcgcgcgacgccccacttcagcggtctcgccgccggccggaccttcctgctgcagggtctgttgcggctgctgaaagccccggcattgcctctcttgtgccgcggcctggccgtggaggccaagaagacttacgtgcgcgacaagccacatgtgaatgtgggtaccatcggccatgtggaccacgggaagaccacgctgactgcagccatcacgaagattctagctgagggaggtggggctaagttcaagaagtacgaggagattgacaatgccccggaggagcgagctcggggtatcaccatcaatgcggctcatgtggagtatagcactgccgcccgccactacgcccacacagactgcccgggtcatgcagattatgttaagaatatgatcacaggcactgcacccctcgacggctgcatcctggtggtagcagccaatgacggccccatgccccagacccgagagcacttattactggccagacagattggggtggagcatgtggtggtgtatgtgaacaaggctgacgctgtccaggactctgagatggtggaactggtggaactggagatccgggagctgctcaccgagtttggctataaaggggaggagaccccagtcatcgtaggctctgctctctgtgcccttgagggtcgggaccctgagttaggcctgaagtctgtgcagaagctactggatgctgtggacacttacatcccagtgcccgcccgggacctggagaagcctttcctgctgcctgtggaggcggtgtactccgtccctggccgtggcaccgtggtgacaggtacactagagcgtggcattttaaagaagggagacgagtgtgagctcctaggacatagcaagaacatccgcactgtggtgacaggcattgagatgttccacaagagcctggagagggccgaggccggagataacctcggggccctggtccgaggcttgaagcgggaggacttgcggcggggcctggtcatggtcaagccaggttccatcaagccccaccagaaggtggaggcccaggtttacatcctcagcaaggaggaaggtggccgccacaagccctttgtgtcccacttcatgcctgtcatgttctccctgacttgggacatggcctgtcggattatcctgcccccagagaaggagcttgccatgcccggggaggacctgaagttcaacctaatcttgcggcagccaatgatcttagagaaaggccagcgtttcaccctgcgagatggcaaccggactattggcaccggtctagtcaccaacacgctggccatgactgaggaggagaagaatatcaaatggggttgagtgtgcagatctctgctcagcttcccttgcgtttaaggcctgccctagccagggctccctcctgcttccagtaccctctcatggcataggctgcaacccagcagagggcagctagatggacatttcccctgctcggaagggttggcctgcctggctggggaggtcagtaaactttgaatagtaagccagcctgtgtcctgtgtcctttgtgcaaattggagaggataggggaggacaaaaagggtgttgaaccccagacagatggggagcttgtgagatcccagagcagttttaacggataaatcaagtccagtgagcttagtgattgcctagacacagtaggatgccgttattcagcctcctgggagatagtgggaaagaatgttctatcgctctggagccagcatggcttcagctcaggtgccaaacccatcttgtttcctcggaatactaagtgaatgtctagcatccattcacattctgtgggaacagggactggacaggcatacctcagatgctgtaggtttgcttccagactaccacaataaagcaggtcacaaatttaaaaaaaaaaaaaaaaaa

SEQ ID NO: 2000 - DNA, 1120 bp, Homo Sapiens
  NM_003327
ccgcaaggaaaacccagactctggcgacagcagagacgaggatgtgcgtgggggctcggcggctgggccgcgggccgtgtgcggctctgctcctcctgggcctggggctgagcaccgtgacggggctccactgtgtcggggacacctaccccagcaacgaccggtgctgccacgagtgcaggccaggcaacgggatggtgagccgctgcagccgctcccagaacacggtgtgccgtccgtgcgggccgggcttctacaacgacgtggtcagctccaagccgtgcaagccctgcacgtggtgtaacctcagaagtgggagtgagcggaagcagctgtgcacggccacacaggacacagtctgccgctgccgggcgggcacccagcccctggacagctacaagcctggagttgactgtgccccctgccctccagggcacttctccccaggcgacaaccaggcctgcaagccctggaccaactgcaccttggctgggaagcacaccctgcagccggccagcaatagctcggacgcaatctgtgaggacagggaccccccagccacgcagccccaggagacccagggccccccggccaggcccatcactgtccagcccactgaagcctggcccagaacctcacagggaccctccacccggcccgtggaggtccccgggggccgtgcggttgccgccatcctgggcctgggcctggtgctggggctgctgggccccctggccatcctgctggccctgtacctgctccggagggaccagaggctgccccccgatgcccacaagccccctgggggaggcagtttccggacccccatccaagaggagcaggccgacgcccactccaccctggccaagatctgacctgggcccaccaaggtggacgctgggccccgccaggctggagcccggagggtctgctgggcgagcagggcaggtgcaggccgcctgccccgccacgctcctgggccaactctgcaccgttctaggtgccgatggctgcctccggctctctgcttacgtatgccatgcatacctcctgccccgcgggaccacaataaaaaccttggcagacgggagtctccgaccggcaaaaaaaaaaaaaaaaa

SEQ ID NO: 2001 - DNA, 2914 bp, Homo Sapiens
  NM_003328
gatttcagttgaaagatgtgtttttgtgagtagagcaccgcagaagaactgaagactgttgtgtgctccccgcagaaggggctaccatgatcctttcctcctataacaccatccagtcggttttctgttgctgctgttgctgttcagtgcagaagcgacaaatgagaacacagataagcctgagcacagatgaagagcttccagaaaaatacacccagcgtcgcaggccgtggctcagccaattgtcaaataagaagcaatccaacacgggccgtgtgcagccgtcaaaacgaaagccactgcctcccctcccaccctctgaggttgctgaagagaagatccaagtcaaggcactttatgattttctgcccagagaaccctgtaatttagccttaaggagagcagaagaatacctgatactggagaaatacaatcctcactggtggaaggcaagagaccgtttggggaatgaaggcttaatcccaagcaactatgtgactgaaaacaaaataactaatttagaaatatatgagtggtaccatagaaacattaccagaaatcaggcagaacatctattgagacaagagtctaaagaaggtgcatttattgtcagagattcaagacatttaggatcctacacaatttccgtatttatgggagctagaagaagtacggaggctgccataaaacattatcagataaaaaagaatgactcaggacagtggtatgtggctgaaagacacgcctttcaatcaatccctgagttaatctggtatcaccagcacaatgcagccggtctcatgactcgtctccgatatccagttgggctgatgggcagttgtttaccagccacagctgggtttagctacgaaaagtgggagatagatccatctgagttggcttttataaaggagattggaagcggtcagtttggagtggtccatttaggtgaatggcggtcacatatccaggtagctatcaaggccatcaatgaaggctccatgtctgaagaggatttcattgaagaggccaaagtgatgatgaaattatctcattcaaagctagtgcaactttatggagtctgtatacagcggaagcccctttacattgtgacagagttcatggaaaatggctgcctgcttaactatctcagggagaataaaggaaagcttaggaaggaaatgctactgagtgtatgccaggatatatgtgaaggaatggaatatctggagaggaatggctatattcatagggatttggcggcaaggaattgtttggtcagttcaacatgcatagtaaaaatttcagactttggaatgacaaggtacgttttggatgatgagtatgtcagttcttttggagccaagttcccaatcaagtggtcccctcctgaagtttttcttttcaataagtacagcagtaaatctgatgtctggtcatttggagttttaatgtgggaagtttttacagaaggaaaaatgccttttgaaaataagtcaaatttgcaagtcgtggaagctatttctgaaggcttcaggctatatcgccctcacctggcaccaatgtccatatatgaagtcatgtacagctgctggcatgagaaacctgaaggccgccctacatttgccgagctgctgcgggctgtcacagagattgcggaaacctggtgaccggaaacagaatgccaacccaaagagtcatcttgcaaaactgtcatttattgtgaatatcttcaccatatggggtcacttatggtgaatatctttcttcagagttgctgactcttgaaaacagtgcaaagatcacagtttttaaaagttttaaaaatttaagaatattcacacaatcgtttttctatgtgtgagagggatttgcacactcttatttttctgtaaaatatttcacatcccaaatgtgaagaagtgaaaaagacttcgcagcagtcttcattgtggtgctcttcatgatcatagccccaggaacccttgaggttcttcttcacaaggctgagagtgcttccttcttgaagacgagtgacattcatcacttcagtgatccatgcatagaatatgaaaataaattcttccaactcatgggataaaggggactcccttgaagaatttcatgtttttgggctgtatagctctttacagaaaatgcacctttataaatcacatgaatgttagtattctggaaatgtcttttgttaatataatcttcccatgttatttaacaaattgtttttgcacatatctgattatattgaaagcagttttttgcattcgagttttaaacactgttataaaatgtagccaaagctcacctttgaacagatcccggtgacattctatttccaggaaaatccggaacctgattttagttctgtgattttacactttttacatgtgagattggacagtttcagaggccttattttgtcatactaagtgtctcctgtaattttcaggaagatgatttgttctttccagaagaggagacaaaagcaagatagccaaatgtgacatcaagctccattgtttcggaaatccaggattttgaattcgagatgaaacaaccagcaatcacagttaaatcttaactttgcctgcactctttgtaggaatgatcagaaatttatctttatcattctgagtgcttcaggagtacaataggaagaaagatactggagaaagcactaatgtaatcaccatgaagtctgacaacaggagcccattatttgcgtactgtcccaccctgtatcatggttctctgggaacaagctttatgattctcattagagtttatttgttgattgtcagtagttgcgacttttaaattatatttcccccactcaaagaatggtatctttatatatcaatgacattcaataaatgtgtattatttctaatgagaa

SEQ ID NO: 2002 - DNA, 508 bp, Homo Sapiens
  NM_003329
tttggtgctttggatccatttccatcggtccttacagccgctcgtcagactccagcagccaagatggtgaagcagatcgagagcaagactgcttttcaggaagccttggacgctgcaggtgataaacttgtagtagttgacttctcagccacgtggtgtgggccttgcaaaatgatcaagcctttctttcattccctctctgaaaagtattccaacgtgatattccttgaagtagatgtggatgactgtcaggatgttgcttcagagtgtgaagtcaaatgcatgccaacattccagttttttaagaagggacaaaaggtgggtgaattttctggagccaataaggaaaagcttgaagccaccattaatgaattagtctaatcatgttttctgaaaatataaccagccattggctatttaaaacttgtaatttttttaatttacaaaaatataaaatatgaagacataaacccagttgccatctgcgtgacaataaaacattaatgct

SEQ ID NO: 2003 - DNA, 608 bp, Homo Sapiens
  NM_003332
agacttcctccttcacttgcctggacgctgcgccacatcccaccggcccttacactgtggtgtccagcagcatccggcttcatggggggacttgaaccctgcagcaggctcctgctcctgcctctcctgctggctgtaagtggtctccgtcctgtccaggcccaggcccagagcgattgcagttgctctacggtgagcccgggcgtgctggcagggatcgtgatgggagacctggtgctgacagtgctcattgccctggccgtgtacttcctgggccggctggtccctcgggggcgaggggctgcggaggcagcgacccggaaacagcgtatcactgagaccgagtcgccttatcaggagctccagggtcagaggtcggatgtctacagcgacctcaacacacagaggccgtattacaaatgagcccgaatcatgacagtcagcaacatgatacctggatccagccattcctgaagcccaccctgcacctcattccaactcctaccgcgatacagacccacagagtgccatccctgagagaccagaccgctccccaatactctcctaaaataaacatgaagcacaaaaacaaaaaaaaaaaaaaaaaa

SEQ ID NO: 2004 - DNA, 2801 bp, Homo Sapiens
  NM_003333
gctccgtgcgcaagcgctttcggcggcgattaggtggtttccggttccgctatcttctttttcttcagcgaggcggccgagctgacgcaaacatgcagatctttgtgaagaccctcactggcaaaaccatcacccttgaggtcgagcccagtgacaccattgagaatgtcaaagccaaaattcaagacaaggagggtatcccacctgaccagcagcgtctgatatttgccggcaaacagctggaggatggccgcactctctcagactacaacatccagaaagagtccaccctgcacctggtgttgcgcctgcgaggtggcattattgagccttctctccgccagcttgcccagaaatacaactgcgacaagatgatctgccgcaagtgctatgctcgccttcaccctcgtgctgtcaactgccgcaagaagaagtgtggtcacaccaacaacctgcgtcccaagaagaaggtcaaataaggtggttctttccttgaagggcagcctcctgcccaggccccgtggccctggagcctcaataaagtgtccctttcattgactggagcagcaattggtgtcctcatggctgatctgtccagggaggtggctgaagagtgggcatctcccttagggactctactcagcactccattctgtgccacctgtggggtcttctgtcctagattctgtcacatcggcattggtccctgccctatgcccctgactctggatttgtcatctgtaaaactggagtaaaaacctcagtcgtgtaattggtgggactgaggatcagttttgtcattgctgggatcctgtcaggcactttgaggtgtccctcaggccttggccctgaagtgtctaggtgtgtggagatgggtagaaaattaggtacacccaatggtgtagaacgttgattctcaaatttttttattttatacaaatggggtctcactatgttgtccaggctggtcttgaactcctgggctcaagccatccgcccatctcagcccctcaaagtgttgggattacaagcaagaactgccatgcctgacccagttctcagttttttgtttgtttgtttgtttgtttgttttgagacggagtcttgctctgtcgcccaggctggagtgcagtggcgcagtctcggcttactacaacctctgcctccggggttcacatccttctcctgcctcagcctcccgagtagctgggactacaggtgcccgccacaactcctggctaattttttgtatttttagtagagacggggtttcactgggttagccaggttggtctcgatctcctgaccttgtgatccattcgccttggcctcccagaatgctggtattacaggcgtgagccagcacgcctggcccagttactcagttttgaatctgaggccgtgacatcactcatggtctgcagtcagtgctctgcccctgagctgtaccctctcctatgataatcactcttaagaagggcaacccttggtgttttccccttaaggtcacccaggctggaatgcagtggtgtggtcatggctccctgtaccctggaactcaggcttgggtgatcctctctcctttgcctccgaagtagccaggactacaggtgtgcacccaccaccacactcagataattgctttggtgtttttaaagcttgtaatgatcagtaggctgaggtgggcaaatcataaggtcaagagttttttagatggggtgagcacagaccaattcctgttttatttactgatttaaaattttgagacagtctcactgtcacccaggttggggtgcagtggtaggatcatagcttgctgcagccttgatctcccaggatcttgcctcagcctcccgagtagctgggactgcatgcttgtgccaccacactcggttaatattttgtagagatggggtcttgctatgttgcccaggctggcttcaaactcctgaacttaaaagcctcctgtttagttttggttttttatcactttttttttttttttttgagatggagccttgctcccatcgtgcaggctggagtgcggtggcgcagtctcggctcactgcagcttctgcctctcgggttcaagcgattctcctttctcagcctcttgagtagctggaattaccagtgtgcgccaccaccaccacgcctggctagtttttctgtttttagtagagacagggttttgctatgttggccaggctggtcttgaactactgacctcttgtgatctacctgtcttggccttccaaagtgctaggattacaagcgtaagccacagcgcctggccttgctacatttttttttttttttttttttttacagacatggtctcgctatgttgcccagaatggttttgcactgggtccaagcagttctgccgcagcctcccaaagtgctgggattacaggggtgaggcaccttgctggcccctgttttgattagggtgcagtgctggtgaagccggtgcacgaggccagtgatgcatcctaatgaggggtggagttggcgggacttcctgggccagtttggggactttcacaaaagacccccatgactcagggttttgagttcttaactgatcgaatgaaggattcaaaattaaccactccaaggggggattgaaggaagaaccactcttaatggacaaaaagaaagaaaggggagggagtaacagggatatgagctctagccgcccaagctagcaatggcaacccttctgggtccccttccagcatgtggaagctttcctttcgcttcattcaataaacagctgctgctcaaaaaaaaaaaaa

SEQ ID NO: 2005 - DNA, 3330 bp, Homo Sapiens
  NM_003335
cttttcttttctccaggaagagagctgtgaccagcagcgtcccttattcgcttggccttggttcctgtttgcactggctacagcagggcactggcccctactgtcaccgccacctacacaaagaccctatctctgagcgctgcagcctactgttcagccccaggtttgaggatggatgccctggacgcttcgaagctactggatgaggagctgtattcaagacagctgtatgtgctgggctcacctgccatgcagaggattcagggagccagggtcctggtgtcaggcctgcagggcctgggggccgaggtggccaagaacttggttctgatgggtgtgggcagcctcactctgcatgatccccaccccacctgctggtccgacctggctgcccagtttctcctctcagagcaggacttggaaaggagcagagccgaggcctctcaagagctcttggctcagctcaacagagctgtccaggtcgtcgtgcacacgggtgacatcactgaggacctgctgttggacttccaggtggtggtgctgactgctgcaaagctggaggagcagctgaaggtgggcaccttgtgtcataagcatggagtttgctttctggcggctgacacccggggcctcgtggggcagttgttctgtgactttggtgaggacttcactgtgcaggaccccacagaggcagaacccctgacagctgccatccagcacatctcccagggctcccctggcattctcactctgaggaaaggggccaatacccactacttccgtgatggagacttggtgactttctcgggaattgagggaatggttgagctcaacgactgtgatccccggtctatccacgtgcgggaggatgggtccctggagattggagacacaacaactttctctcggtacttgcgtggtggggctatcactgaagtcaagagacccaagactgtgagacataagtccctggacacagccctgctccagccccatgtggtggcccagagctcccaggaagttcaccatgcccactgcctgcatcaggccttctgtgcactgcacaagttccagcacctccatggccggccaccccagccctgggatcctgttgatgcagagactgtggtgggcctggcccgggacctggaaccactgaagcggacagaggaagagccactggaagagccactggatgaggccctagtgcggacagtcgccctaagcagtgcaggtgtcttgagccctatggtggccatgctgggtgcagtagctgcccaggaagtgctgaaggcaatctccaggaagttcatgcctctggaccagtggctttactttgatgccctcgattgtcttccggaagatggggagctccttcccagtcctgaggactgtgccctgagaggcagccgctatgatgggcaaattgcagtgtttggggctggttttcaggagaaactgagacgccagcactacctcctggtgggcgctggtgccattggttgtgagctgctcaaagtctttgccctagtgggactgggggccgggaacagcgggggcttgactgttgttgacatggaccacatagagcgctccaatctcagccgtcagttcctcttcaggtcccaggacgttggtagacccaaggcagaggtggctgcagcagctgcccggggcctgaacccagacttacaggtgatcccgctcacctacccactggatcccaccacagagcacatctatggggataactttttctcccgtgtggatggtgtggctgctgccctggacagtttccaggcccggcgctatgtggctgctcgttgcacccactatctgaagccactgctggaggcaggcacatcgggcacctggggcagtgctacagtattcatgccacatgtgactgaggcctacagagcccctgcctcagctgcagcttctgaggatgccccctaccctgtctgtaccgtgcggtacttccctagcacagccgagcacaccctgcagtgggcccggcatgagtttgaagaactcttccgactgtctgcagagaccatcaaccaccaccaacaggcacacacttccctggcagacatggatgagccacagacactcaccttactgaagccagtgcttggggtcctgagagtgcgtccacagaactggcaagactgtgtggcgtgggctcttggccactggaaactctgctttcattatggcatcaaacagctgctgaggcacttcccacctaataaagtgcttgaggatggaactcccttctggtcaggtcccaaacagtgtccccagcccttggagtttgacaccaaccaagacacacacctcctctacgtactggcagctgccaacctgtatgcccagatgcatgggctgcctggctcacaggactggactgcactcagggagctgctgaagctgctgccacagcctgacccccaacagatggcccccatctttgctagtaatctagagctggcttcggcttctgctgagtttggccctgagcagcagaaggaactgaacaaagccctggaagtctggagtgtgggccctcccctgaagcctctgatgtttgagaaggatgatgacagcaacttccatgtggactttgtggtagcggcagctagcctgagatgtcagaactacgggattccaccggtcaaccgtgcccagagcaagcgaattgtgggccagattatcccagccattgccaccactacagcagctgtggcaggcctgttgggcctggagctgtataaggtggtgagtgggccacggcctcgtagtgcctttcgccacagctacctacatctggctgaaaactacctcatccgctatatgccttttgccccagccatccagacgttccatcacctgaagtggacctcttgggaccgtctgaaggtaccagctgggcagcctgagaggaccctggagtcgctgctggctcatcttcaggagcagcacgggttgagggtgaggatcctgctgcacggctcagccctgctctatgcggccggatggtcacctgaaaagcaggcccagcacctgcccctcagggtgacagaactggttcagcagctgacaggccaggcacctgctcctgggcagcgggtgttggtgctagagctgagctgtgagggtgacgacgaggacactgccttcccacctctgcactatgagctgtgacaaggcagccaccctgtcacctagctcaatggagccccggatcccaagccctgcattgtaagcccacagtaggcactcaataaatgcttgttaaaggaaggcaaaaaaaaaaaaaaaaaa

SEQ ID NO: 2006 - DNA, 3400 bp, Homo Sapiens
  NM_003343
acggtggcccggaagcagtccccggtgtcggggcaggaggcacgcgcgcggctgaggcgaggtcgctcggcgcagctgttgcggggccatggcggggaccgcgctcaagaggctgatggccgagtacaaacaattaacactgaatcctccggaaggaattgtagcaggccccatgaatgaagagaacttttttgaatgggaggcattgatcatgggcccagaagacacctgctttgagtttggtgtttttcctgccatcctgagtttcccacttgattacccgttaagtcccccaaagatgagatttacctgtgagatgtttcatcccaacatctaccctgatgggagagtctgcatttccatcctccacgcgccaggcgatgaccccatgggctacgagagcagcgcggagcggtggagtcctgtgcagagtgtggagaagatcctgctgtcggtggtgagcatgctggcagagcccaatgacgaaagtggagctaacgtggatgcgtccaaaatgtggcgcgatgaccgggagcagttctataagattgccaagcagatcgtccagaagtctctgggactgtgagacctggcctcgcacaggcgcgcacacaccgccaagcagctcagcattctcccccggcacacttagtgacagtgatgctctgtgctggtaccaaacaaggcagacttgcaagaaccatggcatcttttttttttttcaaacctttcctacttcaaacaggcttctcttctgaaatgatgacttaatgtcgaatattgacagcttactgcagttttacagtattcctcacaaagggcttcaggtagattatcagagctgtcagcactacctctccccgctgaaaccagcagttcatggcttcctgtggattccctccctccctggagtgttgagggggttgtacctgccagacttccaggggacgatggaatacccagaacgctccttctgaagaaatggggccctgtagctgcagcacaggggaagggcccggcaccctttctgggtccttcctggttccctgtgggccccatgaggagtccattacttcctttcttccttcatattttacaggcagatgcttttcttataatctaattacatcttttcatttgttatatattacaaaccatcacacttagaaatacttccaggaaatgcttttttgaagtgtgaattaataagaaatggggtaaatagaaaagaaatttattgctgattggccaggtgcggtggttcgtgcctgtaatcccagctctttgggaggccaaggcaggtagatcacaaggtcaggaaattgagaccatcctggctaatacagtgaaaccccatgtctgctaaaattacaaaaaattagctgggcgtggtggtgcacgcctgtagtctcagctactcaggaggctgaggcaggagaatcgcttgaacccgggaggcagaggtagcagtgagctgaagtcccgccactgcactccagcctgggcaacagagcgagactcagtctcaaaaagaaaaaagaaatttattgctgatcacaaggacagacagttttttcccgaccatactcatcaaagatttacgtttgtatattagtaactagtgcattactagagcaggtgcaggtgaggtctttaaagtttcaatgaaagtttcttctggatctacagaaaaaatttttttttttcaatctaaaaactggaaattctagggtttttgtacattttggatgcactgggaatttattagcacaaaatcattctttgcaactcaaaattcagaagggactctaccatatcttagctcagagcacagaggagtgccttatccccacacttgactgggctgtggaggtgggcatgtgggcccctgggcccaggctggggacagagcccttgttttgtgacttaggattttgatgtggttcccatgttctctaacagggccagctgagcagcacaggccaggaggccacagtgtaagcaataacagatctgccacatgcagaagcaaatatcaggcctgtcgcacacgggcggcatttaaataggaatttctatttttgaaataagggatggtctatgaggcatacagtagatttgatgtgatccttttctccctcccttccataatggatcgtggtctgtgtgactgaacccacacagagtgtcatgggtgacagtttctggttgaagtagctccacgcctggcttctgtggacagcagattcttttccttctcacaaggggctcatttaaaatttggaggctgggtgctgtggctcacgcctgcaatcccagcactttgggagactgaggcgggcggatcatgaggtcaggagatcgcgaccatcctggctaacagtgaaaccctgtctccactaaaaatacaaaaaattagccgggcgtggtggcgggcgcctgtagtcccagctactctgaagactgaggcaggagaatggcgtgaacccaggaggcggagcttgcagtgagctgagatcacgccactgcactccagcctgggcaacagagtgagactctgtctcaaaaaaaaaaaaaaaaaaaatggaacgcagggcaagaactcgtatttggaaggagatgggggaaaggagcggtattatacctatgttgtatttgcaggcaaatgagatggagccctctctgtaaagaagagtcatttgtgcaagtagacggggtctgtgggtgcaggccctggaggggcacacaattgcctggaggcttctgtgagatcgggagagggaggagaggcagtctcttgacaaaataaagtatttttattcatttgtatttattaaatgaaaaaacaatcccatggtgtccctgttgtgtggtggaacctaatgactgttgaaataaagttctgtgttttccctgccctgcagtgtgtgtccctttgtcgtattgtcagaggagcctgtggccactgcccccagggagcacaccagatcatcccagctgggattcctcacggtgggggcttttctgcagacttgggttagctctggcatgttttcttctgtttctgatctcccttctgtcattctgtggtcttcctctggaattctcaggttagttggggtctgtgagacggatgtgttcactaacctataaatgacattttgcagctttttcagcagatgccattgtgtgagtggcacatttgaccactagaagccagcaggctgttccgactgcgcttccctcctgcagttgcttagaagcacagctccctgtcatcactcctctgtggtcctctgtggtcacggttggttgcgatgagacctgcctctgcgtcttgttacttagcatgtcaataaagaggcagattcctgtgtcagtgaaaaaaaaaaaaaaaaaa

SEQ ID NO: 2007 - DNA, 5174 bp, Homo Sapiens
  NM_003344
agagcgaggctggggtagggaggccgactgagcaggagtcgtccgcttatagtggaggctgctaggagccggtcagagggtgagtggggagcaggcgagcgagccacagcaggcaggagggagcgtcgcgcggcgcagaggagcgccggggcagggccgcggcggaaccacagccggagaggggcagcccgagccgggcgccgcagggtccccacccccacccggccggacagtgcccggtgttcccccgtgcggggggcggcggcggcggctgacgggaccgccgggaccgcgggggtgttgccacctccaccgaggagccggcgcggccgcgggctcctcagagccggggccccgggcccgtgacagacgggccgaggaagggagagaggcggcggcgacaccatgtcatctcccagtccgggcaagaggcggatggacacggacgtggtcaagctcatcgagagtaaacatgaggttacgatcctgggaggacttaatgaatttgtagtgaagttttatggaccacaaggaacaccatatgaaggcggagtatggaaagttagagtggacctacctgataaataccctttcaaatctccatctataggattcatgaataaaattttccatcccaacattgatgaagcgtcaggaactgtgtgtctagatgtaattaatcaaacttggacagctctctatgatcttaccaatatatttgagtccttcctgcctcagttattggcctatcctaaccccatagatcctctcaatggtgacgctgcagccatgtacctccaccgaccagaagaatacaagcagaaaattaaagagtacatccagaaatacgccacggaggaggcgctgaaagaacaggaagagggtaccggggacagctcatcggagagctctatgtctgacttttccgaagatgaggcccaggatatggagttgtagtagaaaaagcacctgcttttcagaaagactattatttcctaaccatgagaagcagactataatattcatatttaaacaaagcaattttttttattactaaacaaggtttttatgaataatagcattgatatatatatattatatatcaccctttagatcttgatttcttggtcatttctcaacctgaggtgcatagcatattcccacattccatttggtagcaatatgcggtctgaatgcatgcattcatgagtccatgtggccaagtcagcctgtgtgctactgaactgtcgaaggaaatagccgctctgataggtagatgtgagtaaaaagaacaggaaaaaattgcttcttttattggtttccaaagaaacaaaccaaaccaaccagctcttggatgtgaagataaaatagtgcttttttgaaatggagaggaaaaacttggggaggaagaggcctgctgtgggggcatcggagccagccatgtaagaatcagagctgctccttcctgtgaatcctaggtggccctatgtcttctgtggagttacagtataaagcagggagctaattaagagtattaaaacttaaaaccattttttgactctgattttaagtacatttttatatgtcagttgctgcccttcacactaccaggccctgcagccacagtgttctgttggagaaacttggggaagtgttttctgaaccagttctttttcttggggtagagcgtgaaatccagacctgtttttgaaaggacagcacaggaggagaaaagtgactgggacgatgcttcctctcatccaaaacacatgcagagtcacatcctcatcctagtgtttggcagtttgagaccgctaccctgaacttaagagctttaaatatgagggttgtgtttctgggggggttatttttttggtgtgtgtgtgtgtgtattgtgcttagaaaggttgcagatttcatcttcacctaccaagaggcggccgcctccttggacaagccgctcatggaccattagacttgagaagacgacccacgtggtgactgcaaagccctgggtacttgccttcatgttctggtttggttttccctttttctgctgctcttggcagcagcctggtcatcatctgcttgtgggagtgggaaatgggtattttagacccaacacaggttctaaatttaaaacaaataataattggaacaaataaaggttcttgtacccagagtgattctacatgggaaaaacaaaccagcttttttcagagagtgaccgaataggaagaagggattcagaaatatgatgtagtagaacatgccctgcaggaagaaaatgttttctctcctgcgtatgttaagaggaaatcagtttaaaatgcctgctaatcaaatgtcgactcagctaaccatatgtccaggttgctgcagagtttctttcaaatctgagtgttgcctgctgaactcggaggggagtttggagaaattttagacagcagctctgtgttctttttttgccgcagccaataagataatagcagaattagccaatcctaaaaccttctaaagacgatttttgagcatcccactgggattatttaatttttctttttgacgtgtgtttttagtttagaagtgctgtattccacaaggtttaagtcagtgaggttggaagataccctatcttttttattcaaaaagcacaatcaatcttttgtttgaaaatctatataaagtacaacttgcttttagcatgattattttcctaaataaaaagacaaagaatttacttactttatgttaattacgggcatgaagcaaaaggttttctttaaaaaaaaaaaaaagtgcagtgatgtagggctgtggttagttaaccgtactgagttatccatctagcatctgtggcttgctggaagggtagtattaactatttaacatgtaatggtgtacttcactcttacctagcacgctgtcttctcattgctttgggggagggagggtctctctgctggcactgtctaacttgcttacctgctgactttgcagtttgcttgtgctatgacatttattgtaggtgctatttagggtaggcttaaagtgctgggtggtgatttgagttcaaacaataaaaaattgtattttttcaatattgtataaacaatagtgttctaattaccttaaaaaaaaataatgaccagttaagaattgcttttgatcttgtcaaaaaactgaatagaccccagtttcgggaaggtgtgtgagcagtgccatgactctgccccttacctaatcccacatctctctaatgataagacattggctcgcctctgaccagagccccagcaccagagagcggaagatgcagaattgtcaaatgacctgctgggggaggttgtaggagtttagcagatttgagtgtggctgcagagagagagagtgtgtgtatgtgtgcacatgtgtgagagtgtgagcgagagtgtgtgtgtgtccatctaagtgtgtgtgatgaaggtgggataaggctcctctgttagtgctggaagctcctgtaattgccgcatggatcccactgtgccctcttgttctgtgcaagtctgtcctgtctgggcactaaccttggtcccatgcatgtttatgttctgggtggggctttgcctctccactgggaaactgacttttgctgggttgaacagagtcccttatgctttttgtcctctccctgcgcctgggagaggtgggagtaggagcccaaacacacaggtacagaaagatctggaagaaggcctggcagtgaatccaaggactctgggcccccaacaatagatggtagcgtaagtctggagcagcggtgtttcaccaccaaatgcctttccaggctgcccttccaacactcaggagagcatccagatccctgggcagaggctctacattcttggctttagaggtggtggcagcggcagcaggtcagagccacttctggcggtttccctcccctttttagtgcccatagtttttggatcctcccttgagttttaccagcacaagccattctttgcccctgttcacataactgagctcaagctcttgccaaacaccaacaagcaagatggttgcaacctggcaacattgaatccaccacccttgggctccctctggaagccccagcaccggggggcttttgggcacagggtcagtggtagccatcttagacactgacatttggctttgtcgtcaatttcatcaccctccttgaggttactgtgcagtttcaaccagcattttatcctagtgaggtcattatcaggagttgccatatcatctctccagtacctaacatttctcatccacttcaaaagctgttctgactgccagctggctgatctaagctcctgaggaatgtctcctctcaaaggaatttttccctccaaaggccccctgaagtcctagttggcattggcctggcacatgctttatgttaggcctcccgttgggatggctgagaatcatgaaagacagatcctccgctagcctctgtgggtcaagtttctggacaccaagtctctgggaactagtgtttgattttaaatggcatgtggcccttccttgtttcagtgacttagaaaagtaaaagccatttaaaaaagttagcaagattttttatcgacttcccaactgggcttccagccttgttgaatgaaatcatctatctctgattgggcgcaacgaactgcatttctttggacttctgaatccatgtttgtgctttctctggcccgtgaacacctcggcgattctgttagggatgggatgagtgggaggaagccctttgagaagggggagccggccctgtcatgcgcaggttttccactcatctgaggaagagccagggctctgaatttagcctaacactcatcttggctgtgggcttgggaagaaatggccattatttacagattgtatttggtacatattgtgtgatacttgaaaagataaaagggactgccagcccctaactgaaatctgaagctttttatcgcttatttttcctcgccctgtctcctcccttccacctttctccttgcattgtgatgatctagtaggcacgtctgtcaacaggacacatgcctcctctgactataacctcttaatagttgtgtataatgaaaactgtaaacttttttaaataaacgtgtatataccttggcaaaaaaaaaaaaaaa

SEQ ID NO: 2008 - DNA, 2568 bp, Homo Sapiens
  NM_003348
cgcgcgcgcagtcgcgcgcgggtcgtgccgtaccaccgtcgcgggcaggctcggccacgagcgccagagccccgcgcctcccctcgcggcctgtcccaagtccctgccccgcaacagagcgtcacttccgccatccccggcagcggttggggcggggcgcacgggggagggggccaggtcggagggaagcccgcccgtgcccgagcccgcgcccgagcagggactacatttcccgaggggcctcggcggcggctgcggcgacgggcgcggcaacgtcccccggaagtggagcccgggacttccactcgtgcgtgaggcgagaggagccggagacgagaccagaggccgaactcgggttctgacaagatggccgggctgccccgcaggatcatcaaggaaacccagcgtttgctggcagaaccagttcctggcatcaaagccgaaccagatgagagcaacgcccgttattttcatgtggtcattgctggccctcaggattccccctttgagggagggacttttaaacttgaactattccttccagaagaatacccaatggcagcccctaaagtacgtttcatgaccaaaatttatcatcctaatgtagacaagttgggaagaatatgtttagatattttgaaagataagtggtccccagcactgcagatccgcacagttctgctatcgatccaggccttgttaagtgctcccaatccagatgatccattagcaaatgatgtagcggagcagtggaagaccaacgaagcccaagccatagaaacagctagagcatggactaggctatatgccatgaataatatttaaattgatacgatcatcaagtgtgcatcacttctcctgttctgccaagacttcctcctctttgtttgcatttaatggacacagtcttagaaacattacagaataaaaaagcccagacatcttcagtcctttggtgattaaatgcacattagcaaatctatgtcttgtcctgattcactgtcataaagcatgagcagaggctagaagtatcatctggattgttgtgaaacgtttaaaagcagtggcccctccctgcttttattcatttcccccatcctggtttaagtataaagcactgtgaatgaaggtagttgtcaggttagctgcaggggtgtgggtgtttttattttattttattttattttatttttgaggggggaggtagtttaattttatgggctcctttcccccttttttggtgatctaattgcattggttaaaagcagctaaccaggtctttagaatatgctctagccaagtctaactttatttagacgctgtagatggacaagcttgattgttggaaccaaaatgggaacattaaacaaacatcacagccctcactaataacattgctgtcaagtgtagattccccccttcaaaaaaagcttgtgaccattttgtatggcttgtctggaaacttctgtaaatcttatgttttagtaaaatattttttgttattctactttgcctttgtacagtttattttactgtgtttatttcattttcccaatttgacaatcgtattttaaaattgaaactgatggaacattctttcttggtcttcaccatctgacaaattgaatggcaagaggtggattttgccagtttcttttcactgatgcagatttgtgttaagatagtactgaatggagtatttataaactggccctgagcatgcataaagcatcagtatctgacctttttttaaccttctaggaatttgaaataaatgtgtttgtgttgtctgattagatgatcattggtgtcttgccacaatgtttaaaaattactgtacaggaaagtcacagcaaagatagcagttgtgactgacatgtaggactttcacagttgtgccacatttttgcctaaaatttgggttatgacatttttcttggttcttatctgaaaatttcatctgtaacctttcatgtgtgttaagaaacactgatctgatcatttgggatttgctgaggcatttgtgagtcttccttataaacctgatgagcagatctcaactatctagcttgtgtgtcatcagaaaggtttatccctttgagagtatcaagtcctcagttaatgattcttgctttcatccctccagtatttgctgtgggagctcgttttattctttaatttggaattcagtaatttttcttctttattgacgaattcctcccctcacaaaactgttctttcccacctctctccatatctaattcctgattcttgttatttttaagtcataaatgtagccagtcataaatacataaatgttaaccttcgggttgcaaccttgtctcttgcagtttaaggtaatggatattgtagcccatttgaattttcttcactcttattctcgtaattctggagtttcttcagattgtggtgtattttattgtgctcctatgtaagatgaagaattaactattaaaattacattttcaacatacaaaagcttttgatgactggtaactggtatccttccaaataaatgcattgcttggtaaaaaaaaaaaaaaaaaa

SEQ ID NO: 2009 - DNA, 2388 bp, Homo Sapiens
  NM_003349
atcacacggcacgacttcatcgagaccaacggggacaactgcctggtgacactgctgccgctgctaaacatggcctacaagttccgcacccacagccctgaagccctggagcagctatacccctgggagtgcttcgtcttctgcctgatcatcttcggcaccttcaccaaccagatccacaagtggtcgcacacgtactttgggctgccacgctgggtcaccctcctgcaggactggcatgtcatcctgccacgtaaacaccatcgcatccaccacgtctcaccccacgagacctacttctgcatcaccacaggagtaaaagtccctcgcaatttccgactgttggaagaactcgaagaaggccagaaaggagtaggagatggcacagttagctggggtctagaagatgacgaagacatgacacttacaagatggacagggatgataattgggcctccaagaacaatttatgaaaaccgaatatacagccttaaaatagaatgtggacctaaatacccagaagcacccccctttgtaagatttgtaacaaaaattaatatgaatggagtaaatagttctaatggagtggtggacccaagagccatatcagtgctagcaaaatggcagaattcatatagcatcaaagttgtcctgcaagagcttcggcgcctaatgatgtctaaagaaaatatgaaactccctcagccgcccgaaggacagtgttacagcaattaatcaaaaagaaaaaccacaggcccttccccttccccccaattcgatttaatcagtcttcattttccacagtagtaaattttctagatacgtcttgtagacctcaaagtaccggaaaggaagctcccattcaaaggaaatttatcttaagatactgtaaatgatactaattttttgtccatttgaaatatataagttgtgctataacaaatcatcctgtcaagtgtaaccactgtccacgtagttgaacttctgggatcaagaaagtctatttaaattgattcccatcataactggtggggcacatctaactcaactgtgaaaagacacatcacacaatcaccttgctgctgattacacggcctggggtctctgccttctccccttaccctcccgcctcccaccctccctgcaacaacagccctctagcctggggggcttgttagagtagatgtgaaggtttcaggtcgcagcctgtgggactactgctaggtgtgtggggtgtttcgcctgcacccctggtttctttaagtcttaagtgatgccccttccaaaccatcatcctgtccccacgctcctccactcccgcccttggccgaagcatagattgtaacccctccactcccctctgagattggccttcggtgaggaattcagggctttccccatatcttctctcccccacctttatcgaggggtgctgctttttctccctcctcctcaagttcctttttgcaccgtcaccacccaacaccttccatgacacttccttgctttggccagaagccatcaggtaaggttggaaagagcctctgacctcccttgtttagttttggaaccatactcactcactctccaccagcctgggaaatgaatattgggtcctcagccctgccaccctctgctgtcatcagctgatgcattgtttttagctcaggttttgataaggtgaaaagaatagtcaccagggttactcagacctgccagctctcggagtccttggtggttgaacttggagaaagaccgcatgaagatacttgtaagcacacatgatccctctgaattgttttactttcctgtaactgcttttgcttttaaaaattgaagaagttttaaacagggctttcatttggtcatccttgcaatccattggggtctagtttggaatctgacaactggaacaaaaagaaccttgaatccggtgcatgccttggttttggtgctgctgctgcttcccaagatcctcagcagggattaagaaggaacccggtgtgcacagcagatccccgaaattggtgggcttgacctcctggcaaattgctgcgtctttccacttgctgttcaggaccactaaatgctgaaatgtggatgcataccgaaataaaagcaattcattgtgtactaaaggttttttttttttttttaatttagtatttgtgtaaaaccaccttttgaagcagcaactatcaagtctgaaaagcaattgatgtttccattaatctttttctggggggaaaaccttagttctaaggatttaacatcctgtaagtgaagtttaacataacagtattccataagcagcctttttattgtcagaccattgcctgattttaatataataaaaaaaaagtgtgcgttaatatttaaaaaaaaaaa

SEQ ID NO: 2010 - DNA, 2438 bp, Homo Sapiens
  NM_003356
gaaccagatctggaactcactcacctcccctctcacctcactgccctcaccagccagcctcttgtcaagtgatcaggctgtcaaccaacttctctaggataaggtttcaggtcagcccgtgtgtataagaccagtgccaagccagaagcagcagagacaacagtgaatgacaaggaggggccatccaatccctgctgccacctcctgggatggagccctagggagcccctgtgctgcccctgccgtggcaggactcacagccccaccgctgcactgaagcccagggctgtggagcagcctctctccttggacctcctctcggccctaaagggactgggcagagccttccaggactatggttggactgaagccttcagacgtgcctcccaccatggctgtgaagttcctgggggcaggcacagcagcctgttttgctgacctcgttacctttccactggacacagccaaggtccgcctgcagatccagggggagaaccaggcggtccagacggcccggctcgtgcagtaccgtggcgtgctgggcaccatcctgaccatggtgcggactgagggtccctgcagcccctacaatgggctggtggccggcctgcagcgccagatgagcttcgcctccatccgcatcggcctctatgactccgtcaagcaggtgtacacccccaaaggcgcggacaactccagcctcactacccggattttggccggctgcaccacaggagccatggcggtgacctgtgcccagcccacagatgtggtgaaggtccgatttcaggccagcatacacctcgggccatccaggagcgacagaaaatacagcgggactatggacgcctacagaaccatcgccagggaggaaggagtcaggggcctgtggaaaggaactttgcccaacatcatgaggaatgctatcgtcaactgtgctgaggtggtgacctacgacatcctcaaggagaagctgctggactaccacctgctcactgacaacttcccctgccactttgtctctgcctttggagccggcttctgtgccacagtggtggcctccccggtggacgtggtgaagacccggtatatgaactcacctccaggccagtacttcagccccctcgactgtatgataaagatggtggcccaggagggccccacagccttctacaagggatttacaccctcctttttgcgtttgggatcctggaacgtggtgatgttcgtaacctatgagcagctgaaacgggccctgatgaaagtccagatgttacgggaatcaccgttttgaacaagacaagaaggccactggtagctaacgtgtccgaaaccagttaagaatggaagaaaacggtgcatccacgcacacatggacacagacccacacatgtttacagaactgttgtttacttgttgctgattcaagaaacagaagtagaagaggaggagggattctggtcttcactgccatgcctcaagaacacctttgttttgcactgacaagatggaaaataaattatattaatttttgaaacccattaggcatgcctaatatttaggcaagagaaaataaaccaagatagatccatttggacaaaatggaaggttggagacgtgtatccccgtgaaatctggttagataatgaatgataagcaggaaggatggcaagcacgggacaggaggggcccacaatggagtgggagatcagccacggagcctggagggatgccacccagcaacacagagctggcgactgcagctgcaccatcacacatgcatcatcagcctatttgtaatatgtctgccacagagagtcctttgggattctaggaaacccaaggaacaagagaaaaaactagagcctgtgctaaagaagccctgctgggcccatgtgaggctggggctcgtaaatattccctgacgacactgaagaatcaagagggcagcccccactttcctacaaaatggagggagccatcccttccctgtccacctcaccaggggtgctatgacatgcaagtgagaagctgggcatgaacgcactttataaaagcaaaagctctgtgtaaatctaactacaaggacaatgccttgggagagattttgtcgggacagagaggagttgccagggaagaaggtttgaaagatacggttgtctagaggtgagaccaaaggatccagagacttggggaccagaggtgacagtggatgacgtgaagccacaggagccccacccccatgcagcctcttccccaccccccccaccacgtgctcaatcatgagtacctcaaaggattgttgggcttgggggaaaagaggtggattcctgggcaagaacctaaagtagcaggactcggaattctcgggaaattattatgactcaataaaagaattcacaccttaggtgtgggagtaagaacaaaaaaaaaaaaaa

SEQ ID NO: 2011 - DNA, 1637 bp, Homo Sapiens
  NM_003358
gaggcgaaccggagcgcggggccgcggtcgccccgaccagagccgggagaccgcagcacccgcagccgcccgcgagcgcgccgaagacagcgcgcaggcgagagcgcgcgggcgggggcgcgcaggccctgcccgccccttccgtccccacccccctccgccctttcctctccccaccttcctctcgcctcccgcgcccccgcaccgggcgcccaccctgtcctcctcctgcgggagcgttgtccgtgttggcggccgcagcgggccgggccggtccggcgggccgggggatggcgctgctggacctggccttggagggaatggccgtcttcgggttcgtcctcttcttggtgctgtggctgatgcatttcatggctatcatctacacccgattacacctcaacaagaaggcaactgacaaacagccttatagcaagctcccaggtgtctctcttctgaaaccactgaaaggggtagatcctaacttaatcaacaacctggaaacattctttgaattggattatcccaaatatgaagtgctcctttgtgtacaagatcatgatgatccagccattgatgtatgtaagaagcttcttggaaaatatccaaatgttgatgctagattgtttataggtggtaaaaaagttggcattaatcctaaaattaataatttaatgccaggatatgaagttgcaaagtatgatcttatatggatttgtgatagtggaataagagtaattccagatacgcttactgacatggtgaatcaaatgacagaaaaagtaggcttggttcacgggctgccttacgtagcagacagacagggctttgctgccaccttagagcaggtatattttggaacttcacatccaagatactatatctctgccaatgtaactggtttcaaatgtgtgacaggaatgtcttgtttaatgagaaaagatgtgttggatcaagcaggaggacttatagcttttgctcagtacattgccgaagattactttatggccaaagcgatagctgaccgaggttggaggtttgcaatgtccactcaagttgcaatgcaaaactctggctcatattcaatttctcagtttcaatccagaatgatcaggtggaccaaactacgaattaacatgcttcctgctacaataatttgtgagccaatttcagaatgctttgttgccagtttaattattggatgggcagcccaccatgtgttcagatgggatattatggtatttttcatgtgtcattgcctggcatggtttatatttgactacattcaactcaggggtgtccagggtggcacactgtgtttttcaaaacttgattatgcagtcgcctggttcatccgcgaatccatgacaatatacatttttttgtctgcattatgggacccaactataagctggagaactggtcgctacagattacgctgtgggggtacagcagaggaaatcctagatgtataactacagctttgtgactgtatataaaggaaaaaagagaagtattataaattatgtttatataaatgcttttaaaaatctaccttctgtagttttatcacatgtatgttttggtatctgttctttaatttatttttgcatggcacttgcatctgtgaaaaaaaa

SEQ ID NO: 2012 - DNA, 2166 bp, Homo Sapiens
  NM_003362
aaaagaccacgtggggacgcggtggggcgggtctggcgggggcggggcacctctgtgcagggttcccagtcaccgcgacgctcctcgggaagccatagggcgcctcccagcccgtctccccgctccagtttagaacctaattcccaattcccggaccgggcccagccctgggctcttactgtccgcttttgctgggacctgttccacaaatgggcgtcttctgccttgggccgtgggggttgggccggaagctgcggacgcctgggaaggggccgctgcagctcttgagccgcctctgcggggaccacttgcaggccatcccagccaagaaggccccggctgggcaggaggagcctgggacgccgccctcctcgccgctgagtgccgagcagttggaccggatccagaggaacaaggccgcggccctgctcagactcgcggcccgcaacgtgcccgtgggctttggagagagctggaagaagcacctcagcggggagttcgggaaaccgtattttatcaagctaatgggatttgttgcagaagaaagaaagcattacactgtttatccacccccacaccaagtcttcacctggacccagatgtgtgacataaaagatgtgaaggttgtcatcctgggacaggatccatatcatggacctaatcaagctcacgggctctgctttagtgttcaaaggcctgttccgcctccgcccagtttggagaacatttataaagagttgtctacagacatagaggattttgttcatcctggccatggagatttatctgggtgggccaagcaaggtgttctccttctcaacgctgtcctcacggttcgtgcccatcaagccaactctcataaggagcgaggctgggagcagttcactgatgcagttgtgtcctggctaaatcagaactcgaatggccttgttttcttgctctggggctcttatgctcagaagaagggcagtgccattgataggaagcggcaccatgtactacagacggctcatccctcccctttgtcagtgtatagagggttctttggatgtagacacttttcaaagaccaatgagctgctgcagaagtctggcaagaagcccattgactggaaggagctgtgatcatcagctgaggggtggcctttgagaagctgctgttaacgtatttgccagttacgaagttccactgaaaattttcctattaattcttaagtactctgcataagggggaaaagcttccagaaagcagccatgaaccaggctgtccaggaatggcagctgtatccaaccacaaacaacaaaggctaccctttgaccaaatgtctttctctgcaacatggcttcggcctaaaatatgcagaagacagatgaggtcaaatactcagttggctctctttatctcccttgcctttatggtgaaacaggggagatgtgcacctttcaggcacagccctagtttggcgcctgctgctccttggttttgcctggttagactttcagtgacagatgttggggtgtttttgcttagaaaggtccccttgtctcagccttgcagggcaggcatgccagtctctgccagttccactgcccccttgatctttgaaggagtcctcaggcccctcgcagcataaggatgttttgcaactttccagaatctggcccagaaattagggctcaatttcctgattgtagtagaggttaagattgctgtgagctttatcagataagagaccgagagaagtaagctgggtcttgttattccttgggtgttggtggaataagcagtggaatttgaacaaggaagaggagaaaagggaattttgtctttatggggtggggtgattttctcctagggttatgtccagttggggtttttaaggcagcacagactgccaagtactgttttttttaaccgactgaaatcactttgggatattttttcctgcaacactggaaagttttagttttttaagaagtactcatgcagatatatatatatatatttttcccagtcctttttttaagagacggtctttattgggtctgcacctccatccttgatcttgttagcaatgctgtttttgctgttagtcgggttagagttggctctacgcgaggtttgttaataaaagtttgttaaaagtttaaaaaaaaaaaaaaaaaa

SEQ ID NO: 2013 - DNA, 1796 bp, Homo Sapiens
  NM_003364
ggtcagctgagttcgccggcccagggcaggcggggcccgagcctagcggtaacccccgggcagggcggggccgctcgcagactccatatgagattcacctcgcaggtggttccctcattcgagtgctccggcgcacagacccgcgccccgccgtctgcgagcctcccgagagccgtcccttcgtccggccctggagcattgcgtttgtcgccggtgtcgcagtgcgaggatggcgccgcgggtgtagcggctctctgcgcaggccgagtgggcccagagaagcgaggaactccgcagctcgtcgacacgtctcgtctcctgtcccaattcagggcttggtgaggtgactcgcggtcgcgggtgactcgccggcaggacactgcctggaacgcctggagcgcctcccactgcagacgtctgtccgcctccagccgctctcctctgacgggtcctgcctcagttggcggaatggcggccacgggagccaatgcagagaaagctgaaagtcacaatgattgccccgtcagacttttaaatccaaacatagcaaaaatgaaagaagatattctctatcatttcaatctcaccactagcagacacaatttcccagccttgtttggagatgtgaagtttgtgtgtgttggtggaagcccctcccggatgaaagccttcatcaggtgcgttggtgcagagctgggccttgactgcccaggtagagactatcccaacatctgtgcgggaactgaccgctatgccatgtataaagtaggaccggtgctgtctgtcagtcatggtatgggcattccttctatctcaatcatgttgcatgagctcataaagctgctgtactatgcccggtgctccaacgtcactatcatccgcattggcacttctggtgggataggtctggagcccggcactgtggtcataacagagcaggcagtggatacctgcttcaaggcagagtttgagcagattgtcctggggaagcgggtcatccggaaaacggaccttaacaagaagctggtgcaggagctgttgctgtgttctgcagagctgagcgagttcaccacagtggtggggaacaccatgtgcaccttggacttctatgaagggcaaggccgtctggatggggctctctgctcctacacggagaaggacaagcaggcgtatctggaggcagcctatgcagccggcgtccgcaatatcgagatggagtcctcggtgtttgccgccatgtgcagcgcctgcggcctccaagcggccgtggtgtgtgtcaccctcctgaaccgcctggaaggggaccagatcagcagccctcgcaatgtgctcagcgagtaccagcagaggccgcagcggctggtgagctacttcatcaagaagaaactgagcaaggcctgagcgctgccctgcacctccgcagacctgctgtgatgacttgccattaaaagcattgtccaaaatcccctgttgtgtggactttgagcacactttacacaagaatctagaaaatcagatcgcgattaagagacagagaatcttggattaaccgcatgggagatgttcttccttttgaagtttcattggagcattttcaatgatgttagcctgatttggggtttcttcaagaacattctaccaaatttttgtactatttctagggaaatttttcagactttaaaattctaatggtagtcagatttcatgtcactaaacaagaaatctgacaatagtgccaggaaactaatttcctgatacattaaaaaaattccatgcaaaaaaaaaaaaaaaaaaaa

SEQ ID NO: 2014 - DNA, 3949 bp, Homo Sapiens
  NM_003368
ctcgcgcgcacgaatggttaaaaaaagggtgtgaggctcgagcccgccagccaggccgctagcacctcgcgcgcgccctcagcgaggacccgcacgagctgcccggctctgtgcctgcgttgtttgaaactgtggaacccgttaggcttttggggaactacagtcccagctggctccggagcccgtgcgtgccaggggcgagtggccgtcgcgagacggctcctgcctttcgtgtctctgcagcgtggagactggaaccggcaatttcaaaggacgccacgttcaatcgcagcgctggcgcgggcggaggctaaaacacgggggtcctgagactgaggaaaacgcgccaagttcccctcggtggcggagtgctaaagaccctagcggttcaggcgttcggcgagcggggccgctgcttgttgcgctcctggctctcccggggcgggcgcagatgggcgccgctcccgggatgtagttggtgttggtgcaagacgggagcgagcggcggtcggggttcccgctcttgggagcggatggtcactcccccgcggggagggcgagccgaccagattttcctggggccggggacccggcgggctcggggcagggactcacctgtcgcacccacactcattcgggttggacttgccggcgtcaccgccgcggacttcgctttgggccatgaccagatataattggtgattacaactttcctctataaattaactcttgacactccttgggatttgaagaaaaaaatgcctggtgtcatacctagtgaaagtaatggactttcaagaggtagcccttcaaagaaaaacagactttccttaaagttttttcagaaaaaggaaactaagagagctttggatttcacagattctcaagaaaatgaagaaaaagcttctgaatatagagcatctgaaattgatcaagttgttcctgcagcacagtcttcacctataaactgtgagaagagagaaaacttgttaccatttgtgggactgaataatctcggcaatacttgctatcttaatagtatacttcaggtattatatttttgtcccggttttaaatctggagtaaagcacttatttaatattatttcaaggaagaaagaagctctaaaggatgaagccaatcaaaaagacaagggaaattgcaaagaagattctttggcaagttatgaattgatatgcagtttacagtccttaatcatttcggttgaacagctccaggctagttttctcttaaatccagagaaatatactgatgaacttgccactcagccaaggcgactgcttaacacactgagggaactcaaccctatgtatgaaggatatctacagcatgatgcacaggaagtattacaatgtattttgggaaacattcaagaaacatgccaactcctaaaaaaagaagaagtaaaaaatgtggcagaattacctactaaggtagaagaaatacctcatccgaaagaggaaatgaatggtattaacagcatagagatggacagtatgaggcattctgaagactttaaagagaaactcccaaaaggaaatgggaaaagaaaaagtgacactgaatttggtaacatgaagaaaaaagttaaattatccaaggaacaccagtcattggaagagaaccagagacaaactagatcaaaaagaaaagctacaagtgatacattagagagtcctcctaaaataattcccaagtatatttctgaaaatgagagtccaagaccctcacaaaagaaatcaagagttaaaataaattggttaaagtctgcaactaagcaacccagcattctttctaaattttgtagtctgggaaaaataacaacaaaccaaggagtcaaaggacaatctaaagaaaatgaatgtgatcctgaagaggacttggggaagtgtgaaagtgataacacaactaatggttgtggacttgaatctccaggaaatactgttacacctgtaaatgttaatgaagttaaacccataaacaaaggtgaagaacaaattggttttgagctagtggagaaattatttcaaggtcagctggtattaaggacgcgttgcttggaatgtgaaagtttaacagaaagaagagaagattttcaagacatcagtgtgccagtacaagaagatgagctttccaaagtagaggagagttctgaaatttctccagagccaaaaacagaaatgaagaccctgagatgggcaatttcacaatttgcttcagtagaaaggattgtaggagaagataaatatttctgtgaaaactgccatcattatactgaagctgaacgaagtcttttgtttgacaaaatgcctgaagttataactattcatttgaagtgctttgctgctagtggtttggagtttgattgttatggtggtggactttccaagatcaacactcctttattgacacctcttaaattgtcactagaagaatggagcacaaagccaactaacgacagctatggattatttgcggttgtgatgcatagtggcattacaattagtagtgggcattacactgcttctgttaaagtcactgaccttaacagtttagaactagataaaggaaattttgtggttgaccaaatgtgtgaaataggtaagccagaaccattgaatgaggaggaagcaaggggtgtggttgagaattataatgatgaagaagtgtcaattagagttggtggaaatacacagccaagtaaagttttgaacaaaaaaaatgtagaagctattggacttcttggaggacaaaagagcaaagcagattatgagctatacaacaaagcctctaatcctgataaggttgctagtacagcgtttgctgaaaatagaaattctgagactagtgatactactgggacccatgaatctgatagaaacaaggaatccagtgaccaaacaggcattaatattagtggatttgagaacaaaatttcatacgtagtgcaaagcttaaaggagtatgaggggaagtggttgctttttgatgattctgaagtcaaagttactgaagagaaggactttctgaattctctttccccttctacatctcctacttctactccttacttgctattttataagaaattatagagtgagtgtattttccttgtgtatatattaaacacacccatacaaacattggtaaagttgattacatcaaagaatctttagcttatcttttgaagctactggatattattggtctctctaggtttttatataaatagtgaaatttgaattactgaaaaccatgttaatttttagaactcattttcctcagtagagactagtgatgcattagcttctgggaacaaacttgtatcggttcttaattaaattatccaaaacggaggcatttaaacacttggatttacaccagtcttttgtgtttgctttttaaaataaagtgctcgtatttgtattctccatattttggagtaattatctacatgatgtttatagttcctgtggtttttcacccaagaagcagaatctcattcagtacatttagttttataagagtcatgaagctaaatccttgggctatgtcagaggcacaaagtctagaatgtgtgtattcacaatggtgtatgtacattttgtgccttgattcacttagaagtgtctcagaaaacctggacagttcgcttctacacaagaattttatatgtatttatgaagatgattctgtaccctagtatatctttttgggcatggactaatttgtatctgtttaactcatattctgcacgatctgtatatagtacatcaaacttagaggtgtgaccttaaatttaactttttttaaaaactgggaggtcaataaaatttaaactgcttaactatgtatatgaatatttgaattttttacttgtatatttttataaatacagctgagttttcttaaagcgaaaaaaaaaaaa

SEQ ID NO: 2015 - DNA, 5166 bp, Homo Sapiens
  NM_003369
aatgagcgctccgggtctcagcggggtggaggggttgcactgcggtaatatggctcttccttagccagcggcggcaacggcggcagcggcggcagcggcggcggctactgtctgggctgagcagtagtgcctctcgggtggcgggtttctaggctgcaggggcttggtaggtggtggcaagggggcggcggcggatgccggaagagtgcccgccccgccgcttggcggcccctggatcgagatgagcgcctccgcgtcggtcgggggccccgtcccccagccacccccgggcccggccgctgctctgcctcccggttctgccgcgcgggccctgcatgtggagctgccgtctcagcagcggcgtcttcgacatcttcggaacattgctgcccggaacattgttaatagaaatggccatcagctccttgatacctactttacacttcacttgtgtagtactgaaaagatatataaagaattttatagaagtgaagtgattaagaattccttgaatcccacgtggcgaagtctcgattttggaattatgccagaccgtcttgatacatctgtgtcttgtttcgtggtgaagatatggggtggaaaggagaacatctaccagctgttgattgaatggaaagtctgtttggatgggctgaaatacttgggtcagcagattcatgcccgaaaccaaaatgaaataatttttgggctgaatgatggatactatggtgctccatttgaacataagggttattcaaatgctcagaagactattcttctgcaggtggatcagaactgtgttcgcaattcttacgatgtcttctctttgctacggcttcatagagcccagtgtgcaattaaacagactcaggtaactgttcagaaaattggaaaggaaattgaagaaaaactaagactcacatctacaagcaatgaactgaaaaaaaaaagtgaatgcctgcagttaaaaattttggtgcttcagaatgaactggaacggcagaagaaagctttgggacgggaggtggcattactgcataagcaacaaattgcattacaagacaaaggaagtgcattttcagctgagcacctcaaacttcaactccagaaggaatccctaaatgagctgaggaaggagtgcactgcaaaaagagaactcttcttgaagactaatgctcagttgacaattcgttgcaggcagttactctctgagctttcctacatttaccctattgatttgaatgaacataaggattactttgtatgcggtgtcaagttgcctaattctgaggacttccaagcaaaagatgatggaagcattgctgttgcccttggttatactgcacatctggtctccatgatttcctttttcctacaagtgcccctcagatatcctataattcataaggggtctagatcaacaatcaaagacaatatcaatgacaaactgacggaaaaggagagagagtttccactgtatccaaaaggaggggagaagttgcagtttgattatggtgtctatcttctgaacaaaaatatagcacagctaagatatcaacatggactagggactccagacttgcggcaaacccttcccaacctgaaaaacttcatggagcatggactaatggtcaggtgtgacagacatcacacctccagtgcaatccctgttcctaagagacaaagctccatatttgggggtgcagatgtaggcttctctggggggatcccttcaccagacaaaggacatcgaaaacgggccagctctgagaatgagagacttcagtacaaaacccctcctcccagttacaactcagcattagcccagcctgtgaccaccgtcccctccatgggagagaccgagagaaagataacatctctatcctcctccttggatacctccttggacttctccaaagaaaacaagaaaaaaggagaggatctagttggcagcttaaacggaggccacgcgaatgtgcaccctagccaagaacaaggagaagccctctccgggcaccgggccacagtcaatggcactctcctacccagcgagcaggccgggtccgccagtgtccagcttccaggcgagttccacccagtctcagaagctgagctctgctgtactgtggagcaagcagaagaaatcatcgggctggaagccacaggtttcgcctcaggtgatcagctagaagcatttaactgcatcccagtggacagtgctgtggcagtagagtgtgacgaacaagttctgggagaatttgaagagttctcccgaaggatctatgcactgaatgaaaacgtatccagcttccgccggccgcgcaggagttccgataagtgaagtgagcaggtcaacagtaggactggggcagaagctctgcctaaaatgaagtgaaagctgcacttaaccctttgtgataatgatgacacaaaatgaatattaatggaggatattcctcggaaaaacagactttgggaatgaaggagggactcaggatcattgttatcagtgggccaaagttagattttgctttcaagatttgcttttcgggcctgatgattttaaagcaaaaatcaccctctagttgaaagagcttacagctcgagtcaccttttagctatttgtctgctttttatttacccttgtatgttatcctcagagggaagatgataatatataaataatataatgaacacacccttagtttctcataagcatttgccctcaccatggtttataaaactttgggaaaacggaatattcagaaataggtttccgccatgtactgaaaggtctgtggccatctgtgaggtagatgaagaagcagcatagtggtctccttacatctaggcctaactgtccctcttcctgcccccgggtaccacagtccacctttagaccctactgtcgccccatcttctccgtggatgggccatgcgtcctgaaaacaggacatcagattcactggttctgtaacccagtagctgtgacgttccatctcttctaaccagccatggccttcccctcctctgccatacccttaatgcggccctcagattagatgaaaaacttgctcctggtggatcccaagggaccctcaaggacctcgaggttactgcagtcagatgccatctcatcccctgtgggggccaaagtttttatgtgggcagatgctgtggtcaggaactaggcatgctttctggcaatgcactcaccagacaaaaatcccttgatgtaaatcccatgttaatttattaaatttcagtcagaaggtcagcatttacatgacagaatgtatgtagagagttggggtgtctggtaggcaaactgcaaggcagttgagatagttggattaagaggctagacgagacatagaatactattggtatgtgtgcaatttcatgaatattaaattatgtttcgaagtccagttgtcattcccgcattcagatttcatttgctgttgctttatacgttacgtacccaaggacattgcctcagggttgcaaactctttaaaggaaaatttatccatatatccatgtattatatagaagaataaaaattgagtttacttcacccgacctgatttttttttaccagcttggaaattcctcttgaacctacgtctccatatgtcacatcatgacaggactagcctgaacaaaagccatgtctatctaagcggaggctgttgacttcattcagtttgcatattgtatatagcaacacaaacacttgacaggtatatactccagtcgccacatttgtcctgcataacagcttcactcacaggcctcaccgtcactttattttgtgtccaagcattcctgggctcaagtttaatgtatagctacattgttgttttccatgtagagaactcacaggatgactacatcacaaataaacccaactctcaggcagtcgaaagctttaactggatctgcagaagcccatcttcctccacatgaagaagtggggctccttcacctagagcaggagcttctctgcagtgtactgtctgtcgctcattttggagtcagtgtgggtggagacagcatcgtggatatgcacgtgctgcggggccctccagggaagtaacatttaccaaaaaaaaagaaaagttctgaagggcagtgttaggattgcagaatggaaggtcaaccccgtgggacttacgattgccccaggtgcgggatggacttaaatgtcacaccaaactcaaagtaggtacactgggttgcagggcatccagcctggcgctggcaccaccaaggagcaggactcctcatgattacagtgtccatctcaggcccacacaaccatgagagcctggactctggggtctacccgtcagtgccccccaccgctgtgcagactccctggttgatcctgggcttgtggcttttcaccgcacggcggggagccctgctcttgaatgtcatcgggctgctcagagctgattgctaggtgcctacacatttgcctcgacccacacagccccgtggtgatgcctcaaaacaccacttaggtttgggttcgtttagttcgagtttggggttttcatttgaacttgtttgatgtctgcagtttctgccatgacctgggtagaacctatgggattacccgtctcctggaataactgtttgacgttttccaaagttgtagagttagtatggcctctgtttaaagtggctggggccaaaataagggatgagttattatctcctactaaccttttagttttgtaaatcactaagaaaattgtttgcttggaagatataagttgaattggaaactcattactatctatttctgaactgctaagaaccctttcagttttcttacagctgagacacttttaaacagcgggcaaatgttatcaaatgaatatttgattgtgttttttctcttcacttccccttaaccactttagaaattccagagatttttttcccctcagaatattagttttggaagattgtgcccagctatatattttttagcagttctaatggtgcccatttatcctgacctaaccagttatttaaataattttttaaaccaccacgaataataaatggcatgtgaaactgatctgttggtaactggaagaaaactcagcatctgtatttatacaataaaattgattagtatttattttga

SEQ ID NO: 2016 - DNA, 2298 bp, Homo Sapiens
  NM_003370
tgtgggtgcggggagtggaattttggaacgaaatgtaacgaagagaagtacagtagtaagagtaacactgtagccgccaccggcaaggggtgcgcgctggggagcggacgctgcatcccctttctgctgcaggaacctctcatcagaccgcctgagggaagcggcgcccggagacccgccccggcccggtccacattctccccaggaagccggactctatggggcgggaccctgggggagcctgagccgagcccggagccagccccgaacccctgaacctccagccaggggcgccccgggagcagccagcccgtgggcgagccgcccgcccgccgagcagccatgagcgagacggtcatctgttccagccgggccactgtgatgctttatgatgatggcaacaagcgatggctccctgctggcacgggtccccaggccttcagccgcgtccagatctaccacaaccccacggccaattcctttcgcgtcgtgggccggaagatgcagcccgaccagcaggtggtcatcaactgtgccatcgtccggggtgtcaagtataaccaggccacccccaacttccatcagtggcgcgacgctcgccaggtctggggcctcaacttcggcagcaaggaggatgcggcccagtttgccgccggcatggccagtgccctagaggcgttggaaggaggtgggccccctccacccccagcacttcccacctggtcggtcccgaacggcccctccccggaggaggtggagcagcagaaaaggcagcagcccggcccgtcggagcacatagagcgccgggtctccaatgcaggaggcccacctgctccccccgctgggggtccacccccaccaccaggacctccccctcctccaggtccccccccacccccaggtttgcccccttcgggggtcccagctgcagcgcacggagcagggggaggaccaccccctgcaccccctctcccggcagcacagggccctggtggtgggggagctggggccccaggcctggccgcagctattgctggagccaaactcaggaaagtcagcaagcaggaggaggcctcaggggggcccacagcccccaaagctgagagtggtcgaagcggaggtgggggactcatggaagagatgaacgccatgctggcccggagaaggaaagccacgcaagttggggagaaaacccccaaggatgaatctgccaatcaggaggagccagaggccagagtcccggcccagagtgaatctgtgcggagaccctgggagaagaacagcacaaccttgccaaggatgaagtcgtcttcttcggtgaccacttccgagacccaaccctgcacgcccagctccagtgattactcggacctacagagggtgaaacaggagcttctggaagaggtgaagaaggaattgcagaaagtgaaagaggaaatcattgaagccttcgtccaggagctgaggaagcggggttctccctgaccacagggacccagaagacccgcttctcctttccgcacacccggcctgtcaccctgctttccctgcctctacttgacttggaattggctgaagactacacaggaatgcatcgttcccactccccatcccacttggaaaactccaagggggtgtggcttccctgctcacacccacactggctgctgattggctggggaggcccccgcccttttctccctttggtccttcccctctgccatccccttggggccggtccctctgctggggatgcaccaatgaaccccacaggaagggggaaggaaggagggaatttcacattcccttgttctagattcactttaacgcttaatgccttcaaagttttggtttttttaagaaaaaaaaatatatatatatttgggttttgggggaaaagggaaatttttttttctctttggttttgataaaatgggatgtgggagtttttaaatgctatagccctgggcttgccccatttggggcagctatttaaggggaggggatgtctcaccgggctgggggtgagatatccccccaccccagggactccccttccctctggctccttccccttttctatgaggaaataagatgctgtaactttttggaacctcagttttttgattttttatttgggtaggttttggggtccaggccattttttttaccccttggaggaaataagatgagggagaaaggagaaggggaggaaacttctcccctcccaccttcacctttagcttcttgaaaatgggcccctgcagaataaatctgccagtttttataaaaaaaaaa

SEQ ID NO: 2017 - DNA, 1643 bp, Homo Sapiens
  NM_003372
aatcacggaatcccggcggccggcggcccgggaggcagtcgcgcgctcgcatccccaagatggcggccgttaaggacagttgtggcaaaggagaaatggccacagggaatgggcggcggctccacctggggattcctgaggccgtgtttgtggaagatgtagattccttcatgaaacagcctgggaatgagactgcagatacagtattaaagaagctggatgaacagtaccagaagtataagtttatggaactcaaccttgctcaaaagaaaagaaggctaaaaggtcagattcctgaaattaaacagactttggaaattctaaaatacatgcagaagaaaaaagagtccaccaactcaatggagaccagattcttgctggcagataacctgtattgcaaagcttcagttcctcctaccgataaagtgtgtctgtggttgggggctaatgtaatgcttgaatatgatattgatgaagctcaggcattgttggaaaagaatttatcgactgccacaaagaatcttgattccctggaggaagaccttgactttcttcgagatcaatttactaccacagaagtcaatatggccagggtttataattgggatgtaaaaagaagaaacaaggatgactctaccaagaacaaagcataatgctggcaattaaaaatgtggtttagttttccaaacatgttatcttaaatacccctttatccttacaggttgacataactttgaatgttttaacagcaagaattttaagaaaagataaacaccattttatttatttataaaaacaaaattagtttcaaatatttttgacattgtgatttttttttccacatttctcagcaaagctaatggtattttaatcattatttttgcctgtcataagaaaactcttagctgaaatggccgaaaactgtgagacatgctatggaagctgaatgccggacgctagcacagtttactttttccctttctaatcggctgatgttactctcacttgatgtggttaaaccattttagaggtagagaagacagacagtttgaatatttgtaaacttgtttttctttggtatatttaggacttagtggtcctctgttgctattgtcttctataagtggagtttcatgacttactgcttaacgaataactaactactatgatattctggacattttaggaaatggtaatttgccttgctacacattaagagggctattaagactacattttttctaacctcagataagtgcagtgtctttgcaatgccaacataagggagatcttggccaacgtgaaataaaattactcattcaaaactctgcctaaggtgattttgtagttcttaacagttctccagagcatcttgaacaggaatattaagataaatgtgaatctgcaatggctgaaaagagttgtgagcttttttattcatgataaaaccttataggaatagtataaaaaatccctgtggaaagctactagtacattgaccagcgctgggtgatacagattctgataaaaacataaatgtattagttcatctccatgtagtaaaaagtatacttatacaatgttttgtacttgtatttcatgaaattaaaacagtgatgctaaaactaaaaaaaaaaaaaaaa

SEQ ID NO: 2018 - DNA, 1993 bp, Homo Sapiens
  NM_003374
attagcgcagggacctccgggccacagctcagagaatcggaaggcctcctcccccttcccgagcgctgccactggggccgaggtttccagcaagaacccgcgtgtccctgcgcacgcacacacggtgcacacgtcagtccggcgcctccccgtgccccgactcacgcaggtcctcccgcgcgcccgcaacacgcccgcaggctcctgtgtctgctgccggggcagcggggcccggaaggcagaagatggctgtgccacccacgtatgccgatcttggcaaatctgccagggatgtcttcaccaagggctatggatttggcttaataaagcttgatttgaaaacaaaatctgagaatggattggaatttacaagctcaggctcagccaacactgagaccaccaaagtgacgggcagtctggaaaccaagtacagatggactgagtacggcctgacgtttacagagaaatggaataccgacaatacactaggcaccgagattactgtggaagatcagcttgcacgtggactgaagctgaccttcgattcatccttctcacctaacactgggaaaaaaaatgctaaaatcaagacagggtacaagcgggagcacattaacctgggctgcgacatggatttcgacattgctgggccttccatccggggtgctctggtgctaggttacgagggctggctggccggctaccagatgaattttgagactgcaaaatcccgagtgacccagagcaactttgcagttggctacaagactgatgaattccagcttcacactaatgtgaatgacgggacagagtttggcggctccatttaccagaaagtgaacaagaagttggagaccgctgtcaatcttgcctggacagcaggaaacagtaacacgcgcttcggaatagcagccaagtatcagattgaccctgacgcctgcttctcggctaaagtgaacaactccagcctgataggtttaggatacactcagactctaaagccaggtattaaactgacactgtcagctcttctggatggcaagaacgtcaatgctggtggccacaagcttggtctaggactggaatttcaagcataaatgaatactgtacaattgtttaattttaaactattttgcagcatagctaccttcagaatttagtgtatcttttaatgttgtatgtctgggatgcaagtattgctaaatatgttagccctccaggttaaagttgattcagctttaagatgttacccttccagaggtacagaagaaacctatttccaaaaaaggtcctttcagtggtagactcggggagaacttggtggcccctttgagatgccaggtttcttttttatctagaaatggctgcaagtggaagcggataatatgtaggcactttgtaaattcatattgagtaaatgaatgaaattgtgatttcctgagaatcgaaccttggttccctaaccctaattgatgagaggctcgctgcttgatggtgtgtacaaactcacctgaatgggacttttttagacagatcttcatgacctgttcccaccccagttcatcatcatctcttttacaccaaaaggtctgcagggtgtggtaactgtttcttttgtgccattttggggtggagaaggtggatgtgatgaagccaataattcaggacttattccttcttgtgttgtgtttttttttggcccttgcaccagagtatgaaatagcttccaggagctccagctataagcttggaagtgtctgtgtgattgtaatcacatggtgacaacactcagaatctaaattggacttctgttgtattctcaccactcaatttgttttttagcagtttaatgggtacattttagagtcttccattttgttggaattagatcctccccttcaaatgctgtaattaacaacacttaaaaaacttgaataaaatattgaaacctcatccttcttctgttgtctttattaataaaatataaataaac

SEQ ID NO: 2019 - DNA, 1172 bp, Homo Sapiens
  NM_003377
gcgatgcgggcgcccccggcgggcggccccggcgggcaccatgagccctctgctccgccgcctgctgctcgccgcactcctgcagctggcccccgcccaggcccctgtctcccagcctgatgcccctggccaccagaggaaagtggtgtcatggatagatgtgtatactcgcgctacctgccagccccgggaggtggtggtgcccttgactgtggagctcatgggcaccgtggccaaacagctggtgcccagctgcgtgactgtgcagcgctgtggtggctgctgccctgacgatggcctggagtgtgtgcccactgggcagcaccaagtccggatgcagatcctcatgatccggtacccgagcagtcagctgggggagatgtccctggaagaacacagccagtgtgaatgcagacctaaaaaaaaggacagtgctgtgaagccagacagggctgccactccccaccaccgtccccagccccgttctgttccgggctgggactctgcccccggagcaccctccccagctgacatcacccatcccactccagccccaggcccctctgcccacgctgcacccagcaccaccagcgccctgacccccggacctgccgctgccgctgccgacgccgcagcttcctccgttgccaagggcggggcttagagctcaacccagacacctgcaggtgccggaagctgcgaaggtgacacatggcttttcagactcagcagggtgacttgcctcagaggctatatcccagtgggggaacaaagaggagcctggtaaaaaacagccaagcccccaagacctcagcccaggcagaagctgctctaggacctgggcctctcagagggctcttctgccatcccttgtctccctgaggccatcatcaaacaggacagagttggaagaggagactgggaggcagcaagaggggtcacataccagctcaggggagaatggagtactgtctcagtttctaaccactctgtgcaagtaagcatcttacaactggctcttcctcccctcactaagaagacccaaacctctgcataatgggatttgggctttggtacaagaactgtgacccccaaccctgataaaagagatggaaggaaaaaaaaaaaaaaaaaaaaaaaaaaaaaaaaaaaaaaaaaaaaaaaaaaaaaaa

SEQ ID NO: 2020 - DNA, 3172 bp, Homo Sapiens
  NM_003379
agtgctgggcggggcgctgactcacccgggcccgggctggccggttcttaagcggcagcgcgctgcgggcgccgagtgtcgggcgcggcaggaggacgaggcagggcgggcgggcgctctaagggttctgctctgactccaggttgggacagcgtcttcgctgctgctggatagtcgtgttttcggggatcgaggatactcaccagaaaccgaaaatgccgaaaccaatcaatgtccgagttaccaccatggatgcagagctggagtttgcaatccagccaaatacaactggaaaacagctttttgatcaggtggtaaagactatcggcctccgggaagtgtggtactttggcctccactatgtggataataaaggatttcctacctggctgaagctggataagaaggtgtctgcccaggaggtcaggaaggagaatcccctccagttcaagttccgggccaagttctaccctgaagatgtggctgaggagctcatccaggacatcacccagaaacttttcttcctccaagtgaaggaaggaatccttagcgatgagatctactgcccccctgagactgccgtgctcttggggtcctacgctgtgcaggccaagtttggggactacaacaaagaagtgcacaagtctgggtacctcagctctgagcggctgatccctcaaagagtgatggaccagcacaaacttaccagggaccagtgggaggaccggatccaggtgtggcatgcggaacaccgtgggatgctcaaagataatgctatgttggaatacctgaagattgctcaggacctggaaatgtatggaatcaactatttcgagataaaaaacaagaaaggaacagacctttggcttggagttgatgcccttggactgaatatttatgagaaagatgataagttaaccccaaagattggctttccttggagtgaaatcaggaacatctctttcaatgacaaaaagtttgtcattaaacccatcgacaagaaggcacctgactttgtgttttatgccccacgtctgagaatcaacaagcggatcctgcagctctgcatgggcaaccatgagttgtatatgcgccgcaggaagcctgacaccatcgaggtgcagcagatgaaggcccaggcccgggaggagaagcatcagaagcagctggagcggcaacagctggaaacagagaagaaaaggagagaaaccgtggagagagagaaagagcagatgatgcgcgagaaggaggagttgatgctgcggctgcaggactatgaggagaagacaaagaaggcagagagagagctctcggagcagattcagagggccctgcagctggaggaggagaggaagcgggcacaggaggaggccgagcgcctagaggctgaccgtatggctgcactgcgggctaaggaggagctggagagacaggcggtggatcagataaagagccaggagcagctggctgcggagcttgcagaatacactgccaagattgccctcctggaagaggcgcggaggcgcaaggaggatgaagttgaagagtggcagcacagggccaaagaagcccaggatgacctggtgaagaccaaggaggagctgcacctggtgatgacagcacccccgcccccaccaccccccgtgtacgagccggtgagctaccatgtccaggagagcttgcaggatgagggcgcagagcccacgggctacagcgcggagctgtctagtgagggcatccgggatgaccgcaatgaggagaagcgcatcactgaggcagagaagaacgagcgtgtgcagcggcagctgctgacgctgagcagcgagctgtcccaggcccgagatgagaataagaggacccacaatgacatcatccacaacgagaacatgaggcaaggccgggacaagtacaagacgctgcggcagatccggcagggcaacaccaagcagcgcatcgacgagttcgaggccctgtaacagccaggccaggaccaagggcagaggggtgctcatagcgggcgctgccagccccgccacgcttgtgtctttagtgctccaagtctaggaactccctcagatcccagttcctttagaaagcagttacccaacagaaacattctgggctgggaaccagggaggcgccctggtttgttttccccagttgtaatagtgccaagcaggcctgattctcgcgattattctcgaatcacctcctgtgttgtgctgggagcaggactgattgaattacggaaaatgcctgtaaagtctgagtaagaaacttcatgctggcctgtgtgatacaagagtcagcatcattaaaggaaacgtggcaggacttccatctgtgccatacttgttctgtattcgaaatgagctcaaattgattttttaatttctatgaaggatccatctttgtatatttacatgcttagaggggtgaaaattattttggaaattgagtctgaagcactctcgcacacacagtgattccctcctcccgtcactccacgcagctggcagagagcacagtgatcaccagcgtgagtggtggaggaggacacttggatttttttttttgttttttttttttttgcttaacagttttagaatacattgtacttatacaccttattaatgatcagctatatactatttatatacaagtgataatacagatttgtaacattagttttaaaaagggaaagttttgttctgtatattttgttaccttttacagaataaaagaattacatatgaaaaaccctctaaaccatggcacttgatgtgatgtggcaggagggcagtggtggagctggacctgcctgctgcagtcacgtgtaaacaggattattattagtgttttatgcatgtaatggactatgcacacttttaattttgtcagattcacacatgccactatgagctttcagactccagctgtgaagagactctgtttgcttgtgtttgtttgtttgcagtctctctctgccatggccttggcaggctgctggaaggcagcttgtggaggccgttggttccgcccactcattccttctcgtgcactgctttctccttcacagctaagatgccatgtgcaggtggattccatgccgcagacatgaaataaaagctttgcaaaggcacgaagcaaaaaaaaaaaaaaaaaaaaaaaa

SEQ ID NO: 2021 - DNA, 2151 bp, Homo Sapiens
  NM_003380
gcctctccaaaggctgcagaagtttcttgctaacaaaaagtccgcacattcgagcaaagacaggctttagcgagttattaaaaacttaggggcgctcttgtcccccacagggcccgaccgcacacagcaaggcgatggcccagctgtaagttggtagcactgagaactagcagcgcgcgcggagcccgctgagacttgaatcaatctggtctaacggtttcccctaaaccgctaggagccctcaatcggcgggacagcagggcgcgtcctctgccactctcgctccgaggtccccgcgccagagacgcagccgcgctcccaccacccacacccaccgcgccctcgttcgcctcttctccgggagccagtccgcgccaccgccgccgcccaggccatcgccaccctccgcagccatgtccaccaggtccgtgtcctcgtcctcctaccgcaggatgttcggcggcccgggcaccgcgagccggccgagctccagccggagctacgtgactacgtccacccgcacctacagcctgggcagcgcgctgcgccccagcaccagccgcagcctctacgcctcgtccccgggcggcgtgtatgccacgcgctcctctgccgtgcgcctgcggagcagcgtgcccggggtgcggctcctgcaggactcggtggacttctcgctggccgacgccatcaacaccgagttcaagaacacccgcaccaacgagaaggtggagctgcaggagctgaatgaccgcttcgccaactacatcgacaaggtgcgcttcctggagcagcagaataagatcctgctggccgagctcgagcagctcaagggccaaggcaagtcgcgcctgggggacctctacgaggaggagatgcgggagctgcgccggcaggtggaccagctaaccaacgacaaagcccgcgtcgaggtggagcgcgacaacctggccgaggacatcatgcgcctccgggagaaattgcaggaggagatgcttcagagagaggaagccgaaaacaccctgcaatctttcagacaggatgttgacaatgcgtctctggcacgtcttgaccttgaacgcaaagtggaatctttgcaagaagagattgcctttttgaagaaactccacgaagaggaaatccaggagctgcaggctcagattcaggaacagcatgtccaaatcgatgtggatgtttccaagcctgacctcacggctgccctgcgtgacgtacgtcagcaatatgaaagtgtggctgccaagaacctgcaggaggcagaagaatggtacaaatccaagtttgctgacctctctgaggctgccaaccggaacaatgacgccctgcgccaggcaaagcaggagtccactgagtaccggagacaggtgcagtccctcacctgtgaagtggatgcccttaaaggaaccaatgagtccctggaacgccagatgcgtgaaatggaagagaactttgccgttgaagctgctaactaccaagacactattggccgcctgcaggatgagattcagaatatgaaggaggaaatggctcgtcaccttcgtgaataccaagacctgctcaatgttaagatggcccttgacattgagattgccacctacaggaagctgctggaaggcgaggagagcaggatttctctgcctcttccaaacttttcctccctgaacctgagggaaactaatctggattcactccctctggttgatacccactcaaaaaggacacttctgattaagacggttgaaactagagatggacaggttatcaacgaaacttctcagcatcacgatgaccttgaataaaaattgcacacactcagtgcagcaatatattaccagcaagaataaaaaagaaatccatatcttaaagaaacagctttcaagtgcctttctgcagtttttcaggagcgcaagatagatttggaataggaataagctctagttcttaacaaccgacactcctacaagatttagaaaaaagtttacaacataatctagtttacagaaaaatcttgtgctagaatactttttaaaaggtattttgaataccattaaaactgcttttttttttccagcaagtatccaaccaacttggttctgcttcaataaatctttggaaaaactcaaaaaaaaaaaaaaa

SEQ ID NO: 2022 - DNA, 5657 bp, Homo Sapiens
  NM_003389
cacaggggcactgacatctttgctggactcttttaatcctcataaacccaggctgctggcacttgaaatttgagaagggcaatcagtctggcctcctgcctttctggcctgcaggcccagcctggacaaacaatttaggtggagctcctggaggctggaagcagagaggaggtacctcaccatcctctcctgccagctgttgcagactctgcctggggaactgattaagggtgagcagaggcatttatctccatgttaacaagcagatgtcatggcacccccagtaccggagctccaagttccgtcatgtctttggcaaaccagccagcaaggagaactgctacgactccgtgcctatcacccgcagcgttcacgacaaccacttctgtgccgtgaacccccacttcattgcagttgtgactgagtgtgctggtggaggggccttcctcgtcatccccctgcaccagacagggaagttggacccccactacccaaaagtctgcgggcacagaggcaacgttttggatgtcaagtggaacccttttgatgattttgagatcgcctcctgttctgaagatgccacaattaagatctggagcatccccaagcagctgctgaccaggaacctcacggcctacaggaaggaactcgtgggccacgcgcgcagagtaggcctggtggagtggcaccccacggccgccaacatcctcttcagtgctggctatgactacaaggtgatgatctggaacctggatacaaaggagtctgtcatcacaagccccatgagtacgattagctgtcaccaagatgtgatcctctccatgtccttcaacaccaacggcagcctgttggccaccacctgcaaagaccgcaagattcgggttattgacccccgagcagggaccgtcctccaggaggccagctacaaagggcaccgggccagcaaagtgctgtttctggggaacctgaagaagctgatgtccacaggcacatcccgatggaacaaccggcaggtggccttgtgggaccaggataacctctctgtgcctctgatggaggaggacctggacggctcctcgggcgtgctgtttcccttctatgacgcggacaccagcatgctctacgtggtggggaagggagatggcaacatccgctactacgaggtgagcgccgacaagcctcacctgagctacctgactgagtaccgctcctataacccacagaaggggatcggtgtcatgccaaagagaggactcgacgtgtcctcctgcgagatcttccgcttctacaagctgatcacaaccaaaagcctcatcgagcccatctccatgattgtgccccggcggtcagaatcctaccaagaggacatataccctccaacagcaggggcccagccctccctgacggcccaggagtggctcagcgggatgaatcgagacccaatcctggtgtcccttaggcctggctctgagctgctgagaccccacccactgcctgcagagagacctatcttcaattccatggccccagcctcaccccggctcttgaatcagacagaaaagctggctgcagaagatggctggaggtcttcctccctgttggaggagaagatgccaaggtgggcagcagaacacaggctggaggagaagaaaacctggctgacaaatggctttgacgttttcgaatgccccccaccaaagacagagaatgagttgctgcagatgttctaccggcaacaggaggagatccgaaggctccgggagctgttgacccagcgagaggtccaggccaaacagttggaactggagatcaaaaacttgcggatgggctcagagcagctctgagcagagacctctgccctcctcaccctcagggacaccactcggctccatggggaggtttagaaccaaaccacaagtcccctcaaggacaaccactatttctatattttttaccagaaaacaaaactctccatcgctgaaagagattccagtgggacatggtgccgtttttctgtttgccttcttgcaacaacagtttctgaattgactttgttttcagatgatgccttctgttgaattctgttattaagggcccatgatgagctgtaacttctcaagaggaaagaacacagtagaaaactagagctggaaggatctaggttgacctgtctgtgattttcaaactgtggtccagagaataggggaagactgggccagacgcagtggctcatgcctgtaatcccagcactctgggaggctgaggtgggcggattgcttgaggtcgggagtttgaaaccagtctcaccaggcgcagtggctcacgcctgtaattccagcatgttgggaggccgaggctggtggatcacgaggtcagcagttcgagaccagcctgaccaacatggtgaaaccccatctctactaaaaatacaaaaaaattagctgggcgtggtggcaggcgcctgtaattccagcgacttgggaggctgaggcaggagaattgcttgaaaccggaaggcgggggttgcagtgagctgagattgtgccactgcactctaacctgggcaataagagcaaaagtctgtctcaaaaaaaaaaaaaaaagaaagaaaccagcctggccaacatggtgaaaccccgtctctactaaaaatacaaaaattaggcagggcgtggtggttcacgcctataatcccagaactttgggaggccaagctgggcggatcttctgaggtcaggagttcaagaccagcctggccaacatggtgaaaccccgtctccactaaaaataaaaaattaaccaggcatggtggtgcatgcctgtaatcccagctatttgggaggctgaggcaggagaatcgcttgagcctgggaggcggaggttgcagtgaaccaagatcatgccacttcactccagcctgggtgacagagtgagactccgtctcaaaaaaaaaaagttggccagccgtggtggtgagcgtctgtagtccctgctattcgggaggctgagataggagaattgcttgaacctgggaggtggaggttgctatgagccacgattgcggactgcactgcagcctgggtgacagagcgagactccatctccaaaaaaaaaaaaaaaaagagagagagaataggggaagactaagcaggaaggctgtgtctcccttccccacactgtattccaaccagacagctcccttctattttatatgttgggctagtatgaaaaacaattctgctaggaaaaaaaaatttttttagaagtttgaaagctagtgatttgacccaagttcctcattttacagctggggaaactaaggcctagagagaggcaagtgatatttgtttcatggcagggctgggctgagatcctgcttttctgggtctgtctttttgctcttttgggtctgatgcagttctcagcccaaagagtagaaatctgttgcttctggcctcagctgtgccccagcttactcagtgacctcttgcaagtcctgccctctctggtctcagtttcttcatctgaaccaggggtaccctggaacaagctgctctctgcaggatctgccacctgaaaccttgacctaagagaaaactacctgtggggtgatctgggtttgctacagaaactaacggacactggcaaggggtcagaggcattcaacccaattctacaacacaggcaggtggtcaaaaccaacctttccaaccagaatcagcctgatatggatagatgctgtcccttatggagggacgcagacttcagaactgtgcccatgactgctgactgccaccaccaaggccctcaggtacacagcctgcctcctgcaggatgatgtgggcagatttcagccctagttaacagaagagtcccccaggaggtagggggcccccatcactggagacatgccagcagagcctctggccacctaaccaggaggtcttctgaaatgactatacgaggtaaagaagtagtaccagatggtcccaaagttcccttttagcctgaaagcttttctttgtccctccttagtgaatctgtgttccgagccctactctaaagttcagtggtcaatacaatagtccaccaagagactgggaatgattagaagtgaaattggtccctccttaccaaggaggggcagatgatctccattgcacagggcgattagattctggagctgaggtggggactgcaggaggccacctagtctggtaggtttcaacccaagctgtgtacattagaattcccttgggagcgtgcaggaaatacagatgcccatgccacattccagaccaactgaagctgaatctccagagtagggcctgtatggtcatataagctccacaggtgatctgcagtacagtgaagatggaagactgcatgtgtacctatttgcaataaagatgaagaggacagcaagctccagacaggagctgggactcaacccagatctcttaagtcctgcctggtggctccttaaaagtccagaagtgttgccccaagccctccctcaacatctctgggaaccgcagctgcagcacgatgggggttcagtgcccctgtttgccccttacccagctgtggtttattctgcttgtatgtctgcacaggccggatgctcgtgttccttgtcttattctccatttactcagtcactggggctcactcccgtctgatgcactagccaagattgccttagtgtgctccagaaaagaaggccaaatcccaggcattgtcagggcagcagagctctacaggataggcttacctttcccacctgtgtggctagcacttcacagtttacaaattcctcccacctccactcagtgacacatgctgttctaacacaggtcaggcaggcattacagtccccatgttcagaatcaaagacctagcctcagagaagtgaagaaacatcatgccaaggtcattgactgccaagcggtagaggtggggttgcatccagagagcttcccggtatgcctctgcacaatgccattccttggccagctccctccaccccaagggacccagactgcacacttaacaaacaggacacaggtgtctttgaacaaacttttttgtattattatttttacatctagaataaattatttaaattatttcacagcaagggagagggataggtaatttttatcagatatttttttaaaccatctgttttttaaattacatttttgtttatgttcttgagctgatgtagtggaacttgcctagcacattcaggtcccagccagttggcagagcatgctctcatctccttattccataccctgggcgtcccctttctgttgactcaggaactttctgagaatgaggacagcactaggagatgagctttggcaggtatccaccttaacgctacaataattgtgcttcctgaaacaaaacttgagattgtatcatagaaggaaacaggaagtcagaaatcaaatctatgcttttaattgaaaccgtgcctgaaacagtttgaatgattgttttaatgttgtttctgaaattccttgtacctttgtgaaaaataatgataataaataaaagtgaaaataaatagatgtggaatatgcaatggaaataatgtaacaaaataataaacatctggccattttactacaaaaaaaaaaaaaaaa

SEQ ID NO: 2023 - DNA, 2370 bp, Homo Sapiens
  NM_003394
gcgcgcgcgcgcgcgcgcgctgggaggagggggaggctgcattcgcctggtcaaggctgggagtggagggtagggtggggaagccccaggctcggggaggggctgcagctccgtcagcccggcagagccaccctgagctcggtgagagcaaagccagagcccccagtcctttgctcgccggcttgctagctctctcgatcactccctcccttcctccctcccttcctcccggcggccgcggcggcgctggggaagcggtgaagaggagtggcccggccctggaagaatgcggctctgacaaggggacagaacccagcgcagtctccccacggtttaagcagcactagtgaagcccaggcaacccaaccgtgcctgtctcggaccccgcacccaaaccactggaggtcctgatcgatctgcccaccggagcctccgggcttcgacatgctggaggagccccggccgcggcctccgccctcgggcctcgcgggtctcctgttcctggcgttgtgcagtcgggctctaagcaatgagattctgggcctgaagttgcctggcgagccgccgctgacggccaacaccgtgtgcttgacgctgtccggcctgagcaagcggcagctaggcctgtgcctgcgcaaccccgacgtgacggcgtccgcgcttcagggtctgcacatcgcggtccacgagtgtcagcaccagctgcgcgaccagcgctggaactgctccgcgcttgagggcggcggccgcctgccgcaccacagcgccatcctcaagcgcggtttccgagaaagtgctttttccttctccatgctggctgctggggtcatgcacgcagtagccacggcctgcagcctgggcaagctggtgagctgtggctgtggctggaagggcagtggtgagcaggatcggctgagggccaaactgctgcagctgcaggcactgtcccgaggcaagagtttcccccactctctgcccagccctggccctggctcaagccccagccctggcccccaggacacatgggaatggggtggctgtaaccatgacatggactttggagagaagttctctcgggatttcttggattccagggaagctccccgggacatccaggcacgaatgcgaatccacaacaacagggtggggcgccaggtggtaactgaaaacctgaagcggaaatgcaagtgtcatggcacatcaggcagctgccagttcaagacatgctggagggcggccccagagttccgggcagtgggggcggcgttgagggagcggctgggccgggccatcttcattgatacccacaaccgcaattctggagccttccagccccgtctgcgtccccgtcgcctctcaggagagctggtctactttgagaagtctcctgacttctgtgagcgagaccccactatgggctccccagggacaaggggccgggcctgcaacaagaccagccgcctgttggatggctgtggcagcctgtgctgtggccgtgggcacaacgtgctccggcagacacgagttgagcgctgccattgccgcttccactggtgctgctatgtgctgtgtgatgagtgcaaggttacagagtgggtgaatgtgtgtaagtgagggtcagccttaccttggggctggggaagaggactgtgtgagaggggcgccttttcagccctttgctctgatttccttccaaggtcactcttggtccctggaagcttaaagtatctacctggaaacagctttaggggtggtgggggtcaggtggactctgggatgtgtagccttctccccaacaattggagggtcttgaggggaagctgccacccctcttctgctccttagacacctgaatggactaagatgaaatgcactgtattgctcctcccacttctcaactccagagcccctttaaccctgattcatactccttttggctggggagtccctatagtttcaccactcctctcccttgagggataaccccaggcactgtttggagccataagatctgtatctagaaagagatcacccactcctatgtactatccccaaactcctttactgcagcctgggctccctcttgtgggataatgggagacagtggtagagaggtttttcttgggaaagagacagagtgctgaggggcactctcccctgaatcctcagagagttgtctgtccaggcccttagggaagttgtctccttccattcagatgttaatggggaccctccaaaggaaggggttttcccatgactcttggagcctctttttccttcttcagcaggaagggtgggaagggataatttatcatactgagacttgttcttggttcctgtttgaaactaaaataaattaagttactggaa

SEQ ID NO: 2024 - DNA, 4830 bp, Homo Sapiens
  NM_003400
caaccggttccgagtttgaggcactaggaggagggggagaagcggctgcagcggccgcggcaggagcagcgggagctacagcatcagcaagagcaacagtagctacagccccggcggcggtgcctgttccagtctttgctgctgcagtccgtgcaaccacccagagggggaggggggaaccaccagtcgctgaggaacaagagaaggggggaaagtttaggcgagccttgggggggggggggccagcgccggagccgcgtgagagagggagccgtgttttggtaggggggagtcggactgcaactggcagcagagcgtctccccggccgtgtggactctacaccccctactcctgccgcttctgctgctgcctgtggctggagggtccccctggggctgaatctttgggacttgaccccgttccctcccccttccctcactccccagccgggcgggagcatttattccccagattaattccccttttgggggggggcgggtgtgtgtgtgtgtgtgtgtgtgtgtgtgtgttgggggaagcgtccctgaaatagtaaatattattgagctctttttgcccttttcctgtccgtttttttaatttccttttttgaggtgggaaaactgaaacccaccttgattcgtcccctctcccccctccccaccttccctcgccctaatcccccaacgaggaaggaaggagcagttggttcaatctctggtaatctatgccagcaattatgacaatgttagcagaccatgcagctcgtcagctgcttgatttcagccaaaaactggatatcaacttattagataatgtggtgaattgcttataccatggagaaggagcccagcaaagaatggctcaagaagtactgacacatttaaaggagcatcctgatgcttggacaagagtcgacacaattttggaattttctcagaatatgaatacgaaatactatggactacaaattttggaaaatgtgataaaaacaaggtggaagattcttccaaggaaccagtgcgaaggaataaaaaaatacgttgttggcctcattatcaagacgtcatctgacccaacttgtgtagagaaagaaaaggtgtatatcggaaaattaaatatgatccttgttcagatactgaaacaagaatggcccaaacattggccaacttttatcagtgatattgttggagcaagtaggaccagcgaaagtctctgtcaaaataatatggtgattcttaaactcttgagtgaagaagtatttgatttctctagtggacagataacccaagtcaaatctaagcatttaaaagacagcatgtgcaatgaattctcacagatatttcaactgtgtcagtttgtaatggaaaattctcaaaatgctccacttgtacatgcaaccttggaaacattgctcagatttctgaactggattcccctgggatatatttttgagaccaaattaatcagcacattgatttataagttcctgaatgttccaatgtttcgaaatgtctctctgaagtgcctcactgagattgctggtgtgagtgtaagccaatatgaagaacaatttgtaacactatttactctgacaatgatgcaactaaagcagatgcttcctttaaataccaatattcgacttgcgtactcaaatggaaaagatgatgaacagaacttcattcaaaatctcagtttgtttctctgcacctttcttaaggaacatgatcaacttatagaaaaaagattaaatctcagggaaactcttatggaggcccttcattatatgttgttggtatctgaagtagaagaaactgaaatctttaaaatttgtcttgaatactggaatcatttggctgctgaactctatagagagagtccattctctacatctgcctctccgttgctttctggaagtcaacattttgatgttcctcccaggagacagctatatttgcccatgttattcaaggtccgtttattaatggttagtcgaatggctaaaccagaggaagtattggttgtagagaatgatcaaggagaagttgtgagagaattcatgaaggatacagattccataaatttgtataagaatatgagggaaacattggtttatcttactcatctggattatgtagatacagaaagaataatgacagagaagcttcacaatcaagtgaatggtacagagtggtcatggaaaaatttgaatacattgtgttgggcaataggctccattagtggagcaatgcatgaagaggacgaaaaacgatttcttgttactgttataaaggatctattaggattatgtgaacagaaaagaggcaaagataataaagctattattgcatcaaatatcatgtacatagtaggtcaatacccacgttttttgagagctcactggaaatttctgaagactgtagttaacaagctgttcgaattcatgcatgagacccatgatggagtccaggatatggcttgtgatactttcattaaaatagcccaaaaatgccgcaggcatttcgttcaggttcaggttggagaagtgatgccatttattgatgaaattttgaacaacattaacactattatttgtgatcttcagcctcaacaggttcatacgttttatgaagctgtggggtacatgattggtgcacaaacagatcaaacagtacaagaacacttgatagaaaagtacatgttactccctaatcaagtgtgggatagtataatccagcaggcaaccaaaaatgtggatatactgaaagatcctgaaacagtcaagcagcttggtagcattttgaaaacaaatgtgagagcctgcaaagctgttggacacccctttgtaattcagcttggaagaatttatttagatatgcttaatgtatacaagtgcctcagtgaaaatatttctgcagctatccaagctaatggtgaaatggttacaaagcaaccattgattagaagtatgcgaactgtaaaaagggaaactttaaagttaatatctggttgggtgagccgatccaatgatccacagatggtcgctgaaaattttgttccccctctgttggatgcagttctcattgattatcagagaaatgtcccagctgctagagaaccagaagtgcttagtactatggccataattgtcaacaagttagggggacatataacagctgaaatacctcaaatatttgatgctgtttttgaatgcacattgaatatgataaataaggactttgaagaatatcctgaacatagaacgaactttttcttactacttcaggctgtcaattctcattgtttcccagcattccttgctattccacctacacagtttaaacttgttttggattccatcatttgggctttcaaacatactatgaggaatgtcgcagatacgggcttacagatactttttacactcttacaaaatgttgcacaagaagaagctgcagctcagagtttttatcaaacttatttttgtgatattctccagcatatcttttctgttgtgacagacacttcacatactgctggtttaacaatgcatgcatcaattcttgcatatatgtttaatttggttgaagaaggaaaaataagtacatcattaaatcctggaaatccagttaacaaccaaatctttcttcaggaatatgtggctaatctccttaagtcggccttccctcacctacaagatgctcaagtaaagctctttgtgacagggcttttcagcttaaatcaagatattcctgctttcaaggaacatttaagagatttcctagttcaaataaaggaatttgcaggtgaagacacttctgatttgtttttggaagagagagaaatagccctacggcaggctgatgaagagaaacataaacgtcaaatgtctgtccctggcatctttaatccacatgagattccagaagaaatgtgtgattaaaatccaaattcatgctgttttttttctctgcaactcgttagcagaggaaaacagcatgtgggtatttgtcgaccaaaatgatgccaatttgtaaattaaaatgtcacctagtggccctttttcttatgtgtttttttgtataagaaattttctgtgaaatatccttccattgtttaagcttttgttttggtcatctttatttagtttgcatgaagttgaaaattaaggcatttttaaaaattttacttcatgcccatttttgtggctgggctggggggaggaggcaaattcgatttgaacatatacttgtaattctaatgcaaaattatacaatttttcctgtaaacaataccaatttttaattagggagcattttccttctagtctatttcagcctagaagaaaagataatgagtaaaacaaattgcgttgtttaaaggattatagtgctgcattgtctgaagttagcacctcttggactgaatcgtttgtctagactacatgtattacaaagtctctttggcaagattgcagcaagatcatgtgcatatcatcccattgtaaagcgacttcaaaaatatgggaacacagttagttatttttacacagttctttttgtttttgtgtgtgtgtgctgtcgcttgtcgacaacagctttttgttttcctcaatgaggagtgttgctcatttgtgagccttcattaactcgaagtgaaatggttaaaaatatttatcctgttagaataggctgcatctttttaacaactcattaaaaaacaaaacaactctggcttttgagatgacttatactaatttacattgtttaccaagctgtagtgctttaagaacactacttaaaaagcaaaataaacttggtttacattta

SEQ ID NO: 2025 - DNA, 1807 bp, Homo Sapiens
  NM_003405
gcggccgcgtctcctccctcggcgttgtccgcggcgcgagccacagcgcgcggggcgagccagcgagagggcgcgagcggcggcgctgcctgcagcctgcagcctgcagcctccggccggccggcgagccagtgcgcgtgcgcggcggcggcctccgcagcgaccggggagcggactgaccggcgggagggctagcgagccagcggtgtgaggcgcgaggcgaggccgagccgcgagcgacatgggggaccgggagcagctgctgcagcgggcgcggctggccgagcaggcggagcgctacgacgacatggcctccgctatgaaggcggtgacagagctgaatgaacctctctccaatgaagatcgaaatctcctctctgtggcctacaagaatgtggttggtgccaggcgatcttcctggagggtcattagcagcattgagcagaaaaccatggctgatggaaacgaaaagaaattggagaaagttaaagcttaccgggagaagattgagaaggagctggagacagtttgcaatgatgtcctgtctctgcttgacaagttcctgatcaagaactgcaatgatttccagtatgagagcaaggtgttttacctgaaaatgaagggtgattactaccgctacttagcagaggtcgcttctggggagaagaaaaacagtgtggtcgaagcttctgaagctgcctacaaggaagcctttgaaatcagcaaagagcagatgcaacccacgcatcccatccggctgggcctggccctcaacttctccgtgttctactatgagatccagaatgcacctgagcaagcctgcctcttagccaaacaagccttcgatgatgccatagctgagctggacacactaaacgaggattcctataaggactccacgctgatcatgcagttgctgcgagacaacctcaccctctggacgagcgaccagcaggatgaagaagcaggagaaggcaactgaagatccttcaggtcccctggcccttccttcacccaccacccccatcatcaccgattcttccttgccacaatcactaaatatctagtgctaaacctatctgtattggcagcacagctactcagatctgcactcctgtctcttgggaagcagtttcagataaatcatgggcattgctggactgatggttgctttgagcccacaggagctccctttttgaattgtgtggagaagtgtgttctgatgaggcattttactatgcctgttgatctatgggaaatctaggcgaaagtaatggggaagattagaaagaattagccaaccaggctacagttgatatttaaaagatccatttaaaacaagctgatagtgtttcgttaagcagtacatcttgtgcatgcaaaaatgaattcacccctcccacctctttcttcaattaatggaaaactgttaagggaagctgatacagagagacaacttgctcctttccatcagctttataataaactgtttaacgtgaggtttcagtagctccttggttttgcctctttaaattatgacgtgcacaaaccttcttttcaatgcaatgcatctgaaagttttgatacttgtaacttttttttttttttggttgcaattgtttaagaatcatggatttattttttgtaactctttggctattgtccttgtgtatcctgacagcgccatgtgtgtcagcccatgtcaatcaagatgggtgattatgaaatgccagacttctaaaataaatgttttggaattcaatgggtaaataaatgctgctttggggatattaaaaaaaaaaaaaaa

SEQ ID NO: 2026 - DNA, 3003 bp, Homo Sapiens
  NM_003406
ctttctccttccccttcttccgggctcccgtcccggctcatcacccggcctgtggcccactcccaccgccagctggaaccctggggactacgacgtccctcaaaccttgcttctaggagataaaaagaacatccagtcatggataaaaatgagctggttcagaaggccaaactggccgagcaggctgagcgatatgatgacatggcagcctgcatgaagtctgtaactgagcaaggagctgaattatccaatgaggagaggaatcttctctcagttgcttataaaaatgttgtaggagcccgtaggtcatcttggagggtcgtctcaagtattgaacaaaagacggaaggtgctgagaaaaaacagcagatggctcgagaatacagagagaaaattgagacggagctaagagatatctgcaatgatgtactgtctcttttggaaaagttcttgatccccaatgcttcacaagcagagagcaaagtcttctatttgaaaatgaaaggagattactaccgttacttggctgaggttgccgctggtgatgacaagaaagggattgtcgatcagtcacaacaagcataccaagaagcttttgaaatcagcaaaaaggaaatgcaaccaacacatcctatcagactgggtctggcccttaacttctctgtgttctattatgagattctgaactccccagagaaagcctgctctcttgcaaagacagcttttgatgaagccattgctgaacttgatacattaagtgaagagtcatacaaagacagcacgctaataatgcaattactgagagacaacttgacattgtggacatcggatacccaaggagacgaagctgaagcaggagaaggaggggaaaattaaccggccttccaacttttgtctgcctcattctaaaatttacacagtagaccatttgtcatccatgctgtcccacaaatagttttttgtttacgatttatgacaggtttatgttacttctatttgaatttctatatttcccatgtggtttttatgtttaatattaggggagtagagccagttaacatttagggagttatctgttttcatcttgaggtggccaatatggggatgtggaatttttatacaagttataagtgtttggcatagtacttttggtacattgtggcttcaaaagggccagtgtaaaactgcttccatgtctaagcaaagaaaactgcctacatactggtttgtcctggcggggaataaaagggatcattggttccagtcacaggtgtagtaattgtgggtactttaaggtttggagcacttacaaggctgtggtagaatcataccccatggataccacatattaaaccatgtatatctgtggaatactcaatgtgtacacctttgactacagctgcagaagtgttcctttagacaaagttgtgacccattttactctggataagggcagaaacggttcacattccattatttgtaaagttacctgctgttagctttcattatttttgctacactcattttatttgtatttaaatgttttaggcaacctaagaacaaatgtaaaagtaaagatgcaggaaaaatgaattgcttggtattcattacttcatgtatatcaagcacagcagtaaaacaaaaacccatgtatttaacttttttttaggatttttgcttttgtgatttttttttttttgatacttgcctaacatgcatgtgctgtaaaaatagttaacagggaaataacttgagatgatggctagctttgtttaatgtcttatgaaattttcatgaacaatccaagcataattgttaagaacacgtgtattaaattcatgtaagtggaataaaagttttatgaatggacttttcaactactttctctacagcttttcatgtaaattagtcttggttctgaaacttctctaaaggaaattgtacattttttgaaatttattccttattccctcttggcagctaatgggctcttaccaagtttaaacacaaaatttatcataacaaaaatactactaatataactactgtttccatgtcccatgatcccctctcttcctccccaccctgaaaaaaatgagttcctattttttctgggagagggggggattgattagaaaaaaatgtagtgtgttccatttaaaattttggcatatggcattttctaacttaggaagccacaatgttcttggcccatcatgacattgggtagcattaactgtaagttttgtgcttccaaatcactttttggtttttaagaatttcttgatactcttatagcctgccttcaattttgatcctttattctttctatttgtcaggtgcacaagattaccttcctgttttagccttctgtcttgtcaccaaccattcttacttggtggccatgtacttggaaaaaggccgcatgatctttctggctccactcagtgtctaaggcaccctgcttcctttgcttgcatcccacagactatttccctcatcctatttactgcagcaaatctctccttagttgatgagactgtgtttatctccctttaaaaccctacctatcctgaatggtctgtcattgtctgcctttaaaatccttcctctttcttcctcctctattctctaaataatgatggggctaagttatacccaaagctcactttacaaaatatttcctcagtactttgcagaaaacaccaaacaaaaatgccattttaaaaaaggtgtattttttcttttagaatgtaagctcctcaagagcagggacaatgttttctgtatgttctattgtgcctagtacactgtaaatgctcaataaatattgatgatgggaggcagtgagtcttgatgataagggtgagaaactgaaatcccaaacactgttttgttgcttgttttattatgacctcagattaaattgggaaatattggcccttttgaataattgtcccaaatattacattcaaataaaagtgcaatggagaaaaaaaaaaa

SEQ ID NO: 2027 - DNA, 1745 bp, Homo Sapiens
  NM_003407
agcctgacttcagcgctcccactctcggccgacacccctcatggccaaccgttacaccatggatctgactgccatctacgagagcctcctgtcgctgagccctgacgtgcccgtgccatccgaccatggagggactgagtccagcccaggctggggctcctcgggaccctggagcctgagcccctccgactccagcccgtctggggtcacctcccgcctgcctggccgctccaccagcctagtggagggccgcagctgtggctgggtgcccccaccccctggcttcgcaccgctggctccccgcctgggccctgagctgtcaccctcacccacttcgcccactgcaacctccaccaccccctcgcgctacaagactgagctatgtcggaccttctcagagagtgggcgctgccgctacggggccaagtgccagtttgcccatggcctgggcgagctgcgccaggccaatcgccaccccaaatacaagacggaactctgtcacaagttctacctccagggccgctgcccctacggctctcgctgccacttcatccacaaccctagcgaagacctggcggccccgggccaccctcctgtgcttcgccagagcatcagcttctccggcctgccctctggccgccggacctcaccaccaccaccaggcctggccggcccttccctgtcctccagctccttctcgccctccagctccccaccaccacctggggaccttccactgtcaccctctgccttctctgctgcccctggcacccccctggctcgaagagaccccaccccagtctgttgcccctcctgccgaagggccactcctatcagcgtctgggggcccttgggtggcctggttcggaccccctctgtacagtccctgggatccgaccctgatgaatatgccagcagcggcagcagcctggggggctctgactctcccgtcttcgaggcgggagtttttgcaccaccccagcccgtggcagccccccggcgactccccatcttcaatcgcatctctgtttctgagtgacaaagtgactgcccggtcagatcagctggatctcagcggggagccacgtctcttgcactgtggtctctgcatggaccccagggctgtggggacttgggggacagtaatcaagtaatccccttttccagaatgcattaacccactcccctgacctcacgctggggcaggtccccaagtgtgcaagctcagtattcatgatggtgggggatggagtgtcttccgaggttcttgggggaaaaaaaattgtagcatatttaagggaggcaatgaaccctctcccccacctcttccctgcccaaatctgtctcctagaatcttatgtgctgtgaataataggccttcactgcccctccagtttttatagacctgaggttccagtgtctcctggtaactggaacctctcctgagggggaatcctggtgctcaaattaccctccaaaagcaagtagccaaagccgttgccaaaccccacccataaatcaatgggccctttatttatgacgactttatttattctaatatgattttatagtatttatatatattgggtcgtctgcttcccttgtatttttcttcctttttttgtaatattgaaaacgacgatataattattataagtagactataatatatttagtaatatatattattaccttaaaagtctatttttgtgttttgggcatttttaaataaacaatctgagtgt

SEQ ID NO: 2028 - DNA, 2752 bp, Homo Sapiens
  NM_003408
cgctaaggccgccctccgggtagccgccatgtcggtctccagcggcgtccagattctgacaaagccagagaccgtggaccggaggagaagtgcggaaacgaccaaagaggccgggcgaccactggagatggctgtgtccgagcccgaggccagcgccgcggaatggaagcaactggatcctgctcagagcaacctgtataatgatgtgatgctggagaactactgcaaccaagcctcaatggggtgtcaagctcccaaaccagacatgatctccaagttggaaaaaggagaagcaccatggttggggaaggggaaaagacccagtcaaggttgtccaagtaaaatagcaagacccaagcaaaaagaaactgatggaaaagtccagaaagatgatgaccagcttgaaaatatccagaaatctcaaaacaaactcctcagggaagttgcagtcaagaagaaaactcaagctaagaagaatggcagtgactgtggttcactggggaaaaaaaataatttgcataaaaaacatgttccttcaaagaaaaggcttcttaaatttgagtcatgtggaaaaattttgaaacagaatttagatttacctgatcactcaagaaactgtgtaaaaaggaaatctgatgcagctaaagaacacaagaagtcattcaaccatagcttatctgatacaaggaaaggcaaaaagcaaactggaaagaaacatgagaaattatccagccatagctcatctgataagtgtaacaaaactggcaaaaaacatgacaaattatgctgtcatagttcatcccatattaaacaggacaaaattcaaactggagagaaacatgagaaatcacccagccttagctcatctactaagcatgaaaaacctcaagcttgtgtgaaaccctatgaatgtaatcaatgtggaaaggttctcagccataaacaaggactcattgaccatcagagagttcatactggggagaaaccatatgaatgtaatgaatgtgggatagcctttagccaaaagtcacaccttgttgtacatcagagaactcacaccggagaaaaaccatatgaatgtattcagtgtggcaaagcccatggtcataaacatgcactcactgaccatctaagaattcatactggagaaaagccctatgaatgtgctgaatgtgggaaaaccttcagacacagctcaaaccttattcaacatgtgagatctcacacaggtgagaagccatatgaatgtaaggaatgtgggaagtcttttaggtataactcatctcttaccgaacatgtgagaacacatacaggtgaaataccatatgaatgcaatgaatgtggaaaagcctttaagtatagctcatcccttactaaacacatgagaattcatacaggtgagaaaccctttgaatgtaatgaatgtgggaaagctttcagcaagaagtcacacctcattatacatcaaagaactcatactaaggagaaaccttataaatgtaatgagtgtggaaaagcctttggacatagctcatctcttacttaccatatgagaactcatacaggtgaaagtccctttgaatgtaatcaatgtgggaaaggctttaaacaaattgaaggccttactcaacatcagagagttcatactggagagaaaccgtatgagtgtaatgaatgtgggaaagcctttagccaaaagtctcacctcattgtacatcagagaactcatactggggagaaaccttatgaatgtaacgaatgtgaaaaagcctttaatgcaaaatcacagcttgttatacatcagcgatcccacactggagaaaaaccctatgaatgtaatgaatgtgggaaaactttcaaacaaaatgcatccctaaccaaacatgtgaaaactcattcagaagataaatctcatgagtgaagttaatgtgggaaatttgttaactaaatttaaggttttgttgaaccttggaaatatgctgattttaaagagtgttagaaagcctttagcaagatgtcacaccttgttgtacatgagaaactttgaaaatggatcttcatatagaatcagtggatggaaacaagggtttaaacttgatacaaaaccttttataaaaaatattgttttaactactcaattattataaatgatctacatgttcagattgaaattgaaagctttaaaaattgtgaattatttgaatattcaaagcaatggagaaacaagttatatatgctgacagttcctgtgtttcttcttgttttgtacttaagcaccatatattagagttgaatttgcatatctgtttattgccttatgtaaatgagtgtggccatctgtataagcctctttgacattttcacccagctctttcttaatgtctgtgttggcttctgcatcagcagaaatctttttaaaagggttgttatatatgtaaaaaatgttaacaggaaaatgagagaaaataaagcagctgaggatacaaatgtgctggtagggagcgatattcaagatatattgtgaagtgtgaaaaagtaggttgctgaaccatgtatatagtatgttcccctttgtgtacaaaagggtatgtttgtttaacctctgtctcttatctctgtatgtgtatgtatctttgtatgcatatatacatgtatctgtatgtgaatagactttgaaaaaatacagaataaacttcatggtggttgccattgggcagaggagtataggactggggtctaggataggagcaag

SEQ ID NO: 2029 - DNA, 3510 bp, Homo Sapiens
  NM_003409
gtgttcacggccggctagacattctgtgctcgtgcaggaggagggctgctaccatcagggacgtgcacgatttcccccaccccgccccctccccaaactccaaaaaaaaatccaaaacacactgccacccaccgtgcccccgcgccccgagcccctccggtcccggcctgcgtttgctagcgagcgcggggaacccacggcagtgtctgtgcctgtgccaggctgcaggtctggcgtgctcctgatcagagttactctgatctgaagattttggcgttcaaggcattaagataatagcctgagttgttcatggagtttttcatcagtatgtctgaaaccattaaatataatgacgatgatcataaaactctgtttctgaaaacactaaatgaacaacgcctggaaggagaattttgtgatattgctattgtggttgaggatgtgaaattcagagcacacagatgtgttcttgctgcctgcagcacttactttaaaaagcttttcaagaagcttgaggttgatagttcttcggtcatagaaatagattttcttcgttctgatatatttgaagaggtcctgaactacatgtacacagcaaagatttccgtgaaaaaagaagatgttaacttaatgatgtcatcgggtcagattcttggtatccgatttttggataaactgtgttctcagaagcgtgatgtgtccagtcccgatgaaaacaatggtcagtccaaaagtaagtattgccttaaaataaatcgccccattggagatgctgctgacacccaggatgatgatgtagaggaaatcggggatcaggatgacagtccttctgatgacacagtagaaggcacacccccgagtcaggaggacggcaagtcgcccaccacaacgctcagggttcaggaagcgatcctgaaagagctggggagtgaggaagttcggaaggtcaattgctacggccaggaagtagaatccatggagaccccagaatcaaaagacttggggtcccagacccctcaagccttaacatttaatgatgggatgagtgaagtgaaagatgaacagacaccaggctggacaacagccgccagtgacatgaagtttgagtatttgctttatggtcaccatcgggagcagattgcctgccaggcgtgtgggaagacgttttctgatgaaggcagattgaggaagcatgagaaactccacacggcggacaggccatttgtttgtgaaatgtgcacaaaaggtttcaccacacaggcccacctgaaagaacacctaaaaatccacacaggatataagccctatagctgtgaggtgtgtggaaaatcatttatccgtgccccagacttaaagaagcatgagagagttcacagtaatgaaagaccgtttgcgtgccacatgtgtgacaaagccttcaaacacaagtctcacctcaaggatcatgaaagaagacacagaggggaaaagccttttgtgtgtggctcctgcaccaaggcatttgccaaggcatctgatctgaaaaggcacgagaacaatatgcacagtgaaaggaagcaggttacccccagtgccatccagagcgagacagaacagttgcaggcggcagcgatggctgcggaagcagaacagcagctggagacgatagcctgtagctagaggcggtgggacagggacactttgcctggaaagtggagactgagatgacgtggatcataatgagtgaatgccagttacaatatttttgtggaaacgtatggaacattgtactcactggacttaaggcagtgcttggttagctatttttaagacttttcaaggaaatggtgttcctcagttctgaccaaaccgtttcactgtcttgtctggtgtctagtattaatgttgcccagtaagcacctctctcccttttttttttttattattttaatttgagaactcctgtgtccagtttagaagtgagagacttccatttttagttcctttacactcaccaccctagcaagtgccctgcacagagtaataagtaaattgatttcctaatcacaattctatgtgacttatggtcaaaagagcagttttaataactttaaaagtacttcagatagacgcagaaaattggtgagtggttgaccaagaacactgcacaaatataaaaaaagttctggaaatgcagaatggcgttagatttatatttggtttgttaattttatatcactgtttttcactgtttttgtggacaaataatggttgctttgctgaagtgttcttcctcaatcttgattgccctgtacctacccaaaagctgtagtcacacatcctaaaggccaagcaaacccaccgggatggtggggggtcttggagccaagctcttaggttcctcttatttggggcagtaccagtccataccagctgcgatttgtgagtggacctgtggtaagaagaatagaaaaggctctcagagataaggttttttacatgtgtaacaatcccaagatttcctagattaaaatcttaattgattttgaaattggatttttatttagaatcaaaattaggacaagaacagataacttcttcagatacatttgtgtaactttacagaatgtcatcaagctttggggctctgtggggcacatgatttatccataaaggagatgcagtatgcttacttaaattaataaatttaaaatcttttaagtgtgtaaatagtagtgttggtcttacgtatttcaagtaaaaagtagacagctgcactttttttgcacattggattaaaataacttccatcagcaacaaacatcagactgtttttaacaaatattaaagattgtcagaccaaatgtttatgttttcgaaatatatttcatcactggttacagttttaaatagaagttgattgccttttcatagccgtaaatgagaattataaactctattccagttttggtatactaaatgttcttttaaccatctttaggaatatattgaaatgccaacaatagtttgaattgtgttctgtaaaaaagtattagtcaattatttttcaaaatgtagaattgtagaaaatgtcaatttttcaaactcatttttcattgctaggatttcttttaaaaaaattaaagtaatttcacttcatagcttgttgcattaacacctgtaattctattgtgaaagaaatttgattttttaattggtgtgtgttatgcccaagatgttaggatgaagatgctacctttttaaaaattttagttattggtaaaatgtttaattttacttaaaattaatttcttttcttgaaagttgtttattctgttctaaaagtagtcctgtcactgtgtttttatgctacttatagaaggggaactgattgccgttcctaggctgttttaaccaaagcaaaggaaaaataattttaacatcttgtcaatagctacttcaacaaaccatattttgggacttcattttttgtatataaaagaaaatatacttctatcaaaaaaaaaaaaa

SEQ ID NO: 2030 - DNA, 5756 bp, Homo Sapiens
  NM_003415
ccggcgcgggagtaactcctcgcagaggcctctgggagttgtagtttttttgcctttgcctctccatgacgcaattcctgtgcgacatacgtagcggccgccattgttccgcgccgatggcgagatccttgttcctcagatagcgttcatcgcccgtcgtggtcaacgggccagccgagtctggagtggttgcgaacccttctggctgcagatctggaggtggaggcagtaccctggactctattctgctgccccttcagggtttggaggagccggagcatccctcgcgtcctgtcacttccagcgaggcacacaaaactgaccgtagggatggccaccagggtccggacagcttctatttgggtcccacctctccaagaacgaaacagttcatgggataggatcagaaagctccaaggtcaggaatccatcttgggccaagggactcctggtctgcaacctctccctggaacacccaggcagaagcagaagagtcgcagaatagagaaagtcctagagtggctgtttatttcccaagagcagccaaaaatcaccaagtcctggggacctttgtcattcatggatgtgtttgtggattttacctgggaggagtggcagctgctagacccagcacagaagtgcctgtacaggagtgtgatgttggagaactatagcaacctggtgtccctagggtaccaacacaccaaacctgatatcatcttcaagttggaacaaggagaagagctgtgtatggtgcaggcccaagttccaaatcagacctgtccaaacacagtctggaaaattgatgatcttatggattggcatcaggaaaataaagacaagctgggaagtacggcaaaaagctttgaatgcactacatttggaaaactatgtcttcttagtacaaagtatctttcaagacaaaaacctcataaatgtggcacgcatggaaagagtttgaaatatatagatttcactagtgattatgctagaaataatcctaatgggtttcaggtacatggaaaatcattcttccattctaaacatgagcaaactgttattggaataaaatactgtgaaagtattgaatctggaaaaaccgtcaataagaaatcgcaacttatgtgccaacaaatgtatatgggcgaaaaaccctttggatgcagctgttgtgagaaagccttcagcagcaagtcataccttctagtgcatcagcaaactcatgccgaagagaaaccctatggttgtaatgaatgtgggaaagacttcagtagtaaatcatacctcattgtacatcagagaattcatacaggagagaaactacatgaatgcagtgaatgcaggaaaacattcagtttccattcacagcttgttatacatcagagaattcacacaggtgagaatccctatgagtgctgtgaatgtgggaaagtcttcagtaggaaagaccagcttgtttcacaccagaaaactcattcaggacagaaaccatatgtgtgtaatgaatgtgggaaagcttttggtttaaaatcacagctcattatacatgaaagaattcatacaggagagaaaccatatgaatgcaatgaatgtcagaaagcctttaatacaaagtcaaaccttatggtacatcagagaacccatacaggggagaaaccttatgtttgtagtgattgtggaaaagcctttacattcaagtcacagctcattgtacatcaggggattcacacaggagtaaagccctatgggtgtattcagtgtggtaaaggattcagtttgaaatcacagctcattgtacatcagagaagtcacacaggaatgaaaccttatgtatgcaatgaatgtggcaaagccttcaggagcaagtcataccttattatacatacaaggactcatacaggagaaaaactccatgaatgcaacaattgtgggaaagccttcagttttaaatcacagctcattatacatcagaggattcatacaggagagaacccctatgaatgccatgaatgtgggaaagccttcagtcggaaataccagcttatttcacaccagagaactcatgcaggagagaagccttatgaatgcaccgactgtggaaaggcttttggtttaaagtcacagcttattatacaccagagaactcatacaggggagaaaccatttgaatgtagtgagtgtcagaaagcctttaatacaaagtcaaacctgattgtacatcagagaactcatacaggagagaaaccctatagttgtaatgaatgtggaaaagcctttacgttcaaatcacagctcattgtacataaaggagtgcacactggagtaaaaccctatggatgcagtcaatgtgcaaaaacctttagtttgaagtcccagctcattgtacatcagagaagtcacacaggagtaaaaccatatggatgcagtgagtgtgggaaagccttcaggagcaagtcataccttattatacatatgagaactcatacaggagagaaaccacatgagtgcagggaatgcgggaaatcctttagtttcaattcacaactcattgtgcatcagagaattcacacaggagaaaatccctatgaatgcagtgaatgtgggaaagcctttaataggaaagaccagctcatttcacatcagcgaactcatgcaggggaaaagccttatgggtgcagtgaatgtgggaaagcttttagcagcaagtcatacctaattatacacatgagaactcattcaggtgaaaaaccatatgaatgtaatgaatgtgggaaagccttcatttggaaatcactactcattgtacatgagcgaactcatgcaggggtcaacccttataaatgcagtcaatgtgagaaatccttcagtgggaaattacgccttcttgtacaccagagaatgcacacaagagagaaaccatatgaatgcagtgagtgtggaaaagccttcattaggaattctcaactcattgtacatcaaagaactcattcaggagagaaaccctatgggtgcaatgaatgtgggaaaaccttctctcaaaaatcaattctcagtgcacatcagagaacacatacaggagagaagccttgtaagtgcactgaatgtgggaaagccttttgttggaagtcacagctcattatgcatcagagaactcatgtagatgacaaacattgataattttacgaaactctgaaaagtggattcacaagagatagaaacaatcatatataaagagaaactctgtaagtggaatcatcttgtcatcttccagaaaactcatactgaatagaaactttatgaatgcacagcatatggaaaggcatccacagaaagctgttctttacatgcaaaaagatagtagacaatacacaggaaaactgaatttagtaaccactctgaaaatttttagcagcaagtcatacctttttttaaaaagttcatacaggtgaggaaccatgttaaacgttgtaaagtcattttactaaaataagattcacaaagaggaaacttcatgaaccagatgaatatagaatagacttctttgaaattcatagtttacagaattttaatgagagaaattattgagctaatgaatggcagaattaacaaaattacaaacattttatgtatcggaagcatataccttggagggaccatgctataagggaaagtgtaaatctagaaatgagaaacccctagggaaaaaatatatataggagtgaacatcttatgaatgtaccaaataaaccacagctggactgttaacctcaccttagaagcttcattctaaaaaaaaaaaaaaaaaaaaaaaaaaaaaccaacctgttattatatcttaatattaattttgaagaattatttcttttaggaatcattttaagaaattttattccaggtgttccaaaatttcaggaaaaggtttgagaaaattctcaattataaataataagatacagattatttcattgtacaagtgaatctagtaaggaggttaagaataagaaataacatcccagagcctacagggatatttagatatcttcctatgtgtactacataatatgaattttgcagtttggcattttacttgcgaatgccatatgtgagacaaaaatcatcttccagagatttcagtatctctgatactgacaatatctctgatatgacaatatcatcttccagagatttctactctgcataccaacattgtttctttgtgtcttaccaaatgcaacttgttactagaatatgacttactaaaaatgcatttccacactgcaaacattttttagggctatcttctgccctttggaagcagtcttggcagcaacctctttagtaatcaatataaggcacacttcatgtgtttgtgtagcctggaatctattctaccttcacaggttagaacatcttgatttcctcttaacgaaacattccctaacggtgtatgtagtcatgagggaaccaccattcaagatgccctgctcaggacttggcatgagcactatggtcagctgaggctcagaactgtacattgttaatgggtttttcaagttcagaaaagcaacatgagcttttgttctgtggtagcatgttgatgtaataagtagctatttcaatagaggttcccagaacagcttttgttactgtcattttcttaactttgttcacttgtcttttattttgagctattgggtgtgcttttaatacattccttgtttgattgcattagccattgtgtatcttttgcatacagcttactaaatcagatggcttcagaaatgggtggtagaggagtaggcagaaacttgcaaggatatgtggatatttggaaatggttgtttcccaagacaggatggaagtcttttaagcaagaaacttggcccatgctatgaagtcatgaaatgaattgttggcatcatgtgctcactgaggctttggggaaatggataagttgtcattgaaaaattttaaacagaattctggagtggtcaagaggggaatgcttttgatacccatgtataacatggagaataatgatcttaaaacttcaatttaagattatgtgtcagtgatactacttagttacatgtagctatagagtcacagtggtgaaaaactctgccagttgcttactcacaaagttagttttcttcactacctcatcaggtttgttatgtgagtgggcattaatctgggaagagtgggaccctgccagttagattagggctatcttggaggaatatgcggattcaatactgcaaatatttctgaaacaccttctgctttgtactctattagatacccaaagaaattttcatccttgaagcggaggaatttaatgatacctgaatgcctaactgttgtattctgcttatacagaatccaatctcaagatacttggggtgaagaatgatgattcacagaagggaagggacatcttacataaacaaataatcgcagatacttgctaaagtgtatcccccaatctgggaaatactgtaaaggtgtatattattattgatgtaccaaagaagacagaataaattcataagagaaagtttatattcagtttactactacctagggttagattttagtttgttgttttttcagatgcaaatctacatgcagccttgcctggtagaagccagaagtgttgacagtattgaggacagcactcacatactgtgggaaagaataatacttgattaggacttattatttaatgaaatgaaaattttacaaaacagaaa

SEQ ID NO: 2031 - DNA, 2265 bp, Homo Sapiens
  NM_003416
cggaagtttgcggggcggggcggacgcgggtggccaaggcccgtttccggcggcgtcgcgcgtttgcgagcctcgggtggtcctcagggagggtctctcggccagaacacgtggatgcccacccaccactgagcctcatggaggtggtaacatttggcgatgtggctgtgcacttctctcgggaggagtggcagtgtctggaccctggccagagggccctctacagggaagtgatgctggagaaccacagcagtgtggctggactagcaggattcctggttttcaagcctgagctgatctctcggctggagcagggagaagagccatgggtcctcgacctgcagggagcagaggggacagaggcaccaaggacctccaagacagattctacgattaggactgaaaatgagcaggcctgtgaggacatggacatcctaaaatcagaatcctatgggacagtggtcagaatctccccacaggactttcctcagaatcctggctttggagacgtttctgattctgaggtctggttagacagtcatctgggcagtcccgggctgaaagtgacaggctttaccttccaaaataactgtttgaatgaggagactgtggttcccaagaccttcaccaaggacgcaccccagggatgtaaggagctgggaagcagcggcctggattgtcagcctcttgaaagtcagggagagagtgcggaagggatgtcccagagatgcgaggagtgtggcaaaggcatcagagccacttcagatatcgctctgcattgggaaattaatacacagaaaattagcagatgtcaagaatgccaaaaaaagttatctgactgcttgcaggggaaacatacaaataactgccatggagagaagccgtacgaatgtgcagagtgtgggaaagtcttcaggctctgctcgcagcttaatcagcatcagagaatccacacgggagagaaaccctttaaatgcactgagtgtggaaaagccttccgcctgagctcaaaacttattcagcatcaaagaatccacactggggagaagccctacagatgtgaggaatgtggaaaagcttttggtcagagctcaagcctcatccaccatcagagaatccacacaggagagaggccctatggttgtcgtgagtgtgggaaagccttcagccagcagtcgcagctggttagacaccagagaactcacactggggagaggccctacccttgcaaggagtgtgggaaggccttcagccagagctccaccctagcccagcatcaaaggatgcatactggggagaaagctcaaattctaaaagcctcagacagtccaagccttgttgcacatcagagaattcacgctgtagagaaaccatttaagtgtgatgagtgtgggaaagcttttaggtggatctctcgcctgagtcagcatcagctgattcacactggagagaagccttataaatgcaacaagtgtacaaaagcctttggttgtagttcacggcttattcgccatcagagaactcacactggagaaaaaccatttaaatgtgatgagtgtggcaaaggctttgttcagggctcacaccttattcagcatcagcgaatccacactggagagaaaccctatgtgtgtaatgactgtggaaaagccttcagtcagagttccagccttatttaccatcagagaatccataaaggagagaagccctacgaatgcctccaatgcggaaaagccttcagtatgagcacacagcttacaatacatcaaagggttcacactggagagaggccctataaatgtaatgaatgtgggaaagccttcagtcaaaactcaacccttttccaacaccagataattcatgcaggggtgaagccctatgagtgcagtgagtgtggaaaagccttcagccggagctcatatcttattgaacaccagagaatacacactagggcccagtggttttacgaatatgggaatgccctggaagggtccacctttgtgagccgtaaaaaggttaatactataaagaaactgcatcagtgtgaagactgtgagaagatatttaggtggcgttcacacctaattatacaccagagaattcacaccggggagaagccttataaatgcaatgactgtggcaaagcttttaatcgtagctcaaggcttacccagcatcaaaaaattcacatgggatagaccacttacatataaatgtgtatatatgtgaataaacctatagccttaacttaaaaaaaaaaaaaaa

SEQ ID NO: 2032 - DNA, 12172 bp, Homo Sapiens
  NM_003417
attttcttctgcacttctgtctggagaggtctgtagccactgagggccccggtcggggccgctttgcaggtccctagtcaggaccgagcaggggagtaggataggaatccccgccgcacctttgtacgagcctgaccccttccgtgggtttgttcctgggtcgccgtcaagctgcggtctctcctcccccgcccttcagccccgcggtctccaggggcggcgccctgggtctggaacgcggttgccaccgaggaggcggcggccctgcgtctggaacgccgttgccaccgaggaggcggcggccccgagcgcgcctggaagccccgggcaaccggccagggtcgggcacaggtggggtccgtcaggccgcccggggctcctctgtcccagctctgcggcccagggggtgacgtgatggcggcagcggtgctgacggaccgggcccaggtgtctgtgacctttgatgatgtggctgtgactttcaccaaggaggagtgggggcagctggacctagctcagcggaccctgtaccaggaggtgatgctggaaaactgtgggctcctggtgtctctggggtgtcctgttcccaaagctgagctgatctgccacctagagcatgggcaggagccatggaccaggaaggaagacctctcccaagacacctgtccaggcgacaaaggaaaacctaagaccacagaacctaccacttgtgagccagccttgtcagagggaatctcacttcagggacaagtgacacaaggaaactcagtggactcacagttggggcaagccgaggatcaggatgggctatcagaaatgcaggaaggacacttcagaccaggaatagatccccaggagaagtctcctgggaagatgagccctgaatgtgatggtttagggacagctgatggtgtgtgttcaaggattggacaggagcaagtctctccaggagatagagtccgtagccataactcatgtgagtcaggtaaagatcccatgattcaggaagaggaaaataactttaaatgcagtgaatgtggaaaagtatttaacaagaaacacctccttgctggacatgagaaaattcactctggagttaagccctatgaatgcacagaatgtgggaaaacctttattaagagcacacatctcctgcaacatcacatgatccacactggggagaggccctatgagtgcatggagtgtggaaaggccttcaaccgcaagtcataccttacccagcaccagcggattcacagtggagagaagccttacaagtgcaatgaatgcggaaaggccttcacccaccgctccaattttgtcttgcataacaggagacacactggagaaaaatcctttgtgtgcacagaatgtggccaagtctttcgacataggccaggctttctccggcactatgttgtccacagtggtgagaatccctatgagtgcttggagtgtggcaaggtcttcaaacacaggtcatatctcatgtggcaccagcagactcataccggggagaagccctatgagtgcagtgaatgtgggaaggtcttcttggagagtgcagccctgattcaccactatgtcatccacactggagagaagccctttgagtgcctcgagtgtgggaaggctttcaaccaccgatcctacctcaagaggcaccagcggattcacactggggagaagcccttcgtgtgcagtgaatgtggaaaggccttcacccactgctctacttttatcttgcataaaagggcccacactggagaaaagcctttcgagtgcaaagagtgtgggaaagcctttagcaatcggaaggacctcattcgccacttcagcatccacactggagagaagccctatgagtgcgtggagtgtggaaaggccttcacccgcatgtcgggcctcacgaggcacaagcggattcatagtggagagaagccctatgaatgtgttgagtgtgggaaatcgttttgctggagcacaaacctcattcgacatgccattatccacactggagagaagccctataaatgtagtgaatgtggaaaggccttcagtcgcagctcgtccctcactcagcatcaaaggatgcatactgggaaaaatcccatcagtgtaacagatgtgggaagaccttttacaagtggacaaacctcagttacccttcgagaacttcttttagggaaggactttttgaatgtaaccactgaggcaaatattttgccagaggaaacatcttcctctgcatctgatcaaccataccaaagagaaaccccacaagtgtcttcactgtgagaaaaccttctgttgctgaatattacttgtcatctgaagagtcatattagaaattcgttcagtctagagccttattctccatctgataatttatcctggagagagacccagtggttattgtgcacataggagaaccttcagctgcatctttctccttagtttacagtgcaattttatctcaggaattatttttaaaaggaggaggggacatagaaaaaatgaaatgcaagcacacatcttttcaggcttctctgccaagcctatggcgctttgtcatggatttcttagtgtatttgggggaagggaaatgtttcaaggtaaagaaccttgaccctttatgtgcttgtatgtacatttattgctatccagtgtcagaacagttagtttaggaaaagtatgcaaactttaatcgcacatcttctgtattccacaatagtacttactcttgagaagcataactttatgacaacttagggggcttgagccatgaaatactcacgtttaagtcagtaaggatacacatgttaacattcaggcttttgtcttgatgcccgtcttttggtttacgtcatcattgtagccatatggtaaatttttatttgttaaatttttaaaaattacttagctcaaaatgtcagtggtaaatttttaaattgagtaaagtgattcttctttgctcttatttaaaatcgacagcatttctagttcctttgacattccatataatttttaggattagtttgtacttatttacaaaacagtcttgttcagatttttacagaaattgagttaagtctgtggattaatctgttaagaattggtatctttactatgttgggtcttgtagttcatgagtgcaggagtaggcctcttaatttataatagttaagcattccttaaagtatttcattaatgttaaaaattttcagcgtatagatccctatgcatttttgttagaatttgcatcctagggtgcttttttgtttgtgtgtgtgtgtaatttgagtgattgtaaatggcattgatgtttgaactttgaattgcacacaatttttggtagtatacagaaatataatatttttggacattgttttgctaccctgcaaccttattgagttcacttattatttttagctatttctttcgacagaatccttggaattttctatatagaaatgtcatctgcaaatacagaccattttttatctttcatcttacctgtaatataccttttatttcctttttgtttgtcttattgcattgcacaagctgggacttccattatagcgttgaataggaatagtgagaaaggccatccttacctggttcctgatagtaggggggacaatgttcagttttttgtttttttgttttttgtttgagacagggtctcgctctgtcacccaggctggagtgcagtggcacgatcttgtctcaccatagccttaagttcctgggctcaagtgatccccccacctcagccctcaccaccccccagtagctggtactacaagcatgcaccaccagtcccagctaatttttgtattttttggtagagacagggtttcaccatggtgcccaggctggtcttgaactcctgggctcaagcaacctgcttgcctgggtctcccaaagtgctgggattacaggcgtgagccacagtgcacagcatgttcagtttttcatcatgaagtataatgtaagttttataaaacatatgtcctctataagggtaaaaaatttcctctgttcccagttttctgagactctgtgttgctatgaataagtgtggaattttgttcagtactttttctccaccagttgatgtcattatgctattttccttctacatcctattgatggaatgtattgctttgatcaagttttgaatattgagccagccttgcatccttagaataaaccatacttgtttgtagagtataattgtttttatatatcatttgacatcattccctttgtttgtattttgttgaggaaatattcctctaatttattggctaataatgtgtagttcttttttcttttgtttcttatgttctaaatgtcttatgtgtggttttgatgtctaggtgatcttgacctttcaacatgaattggaaggagttctcttctaatttttggaagactgtgtagaattggtgttatttgttcttgtcatgtttgatgacctctagtcaaccattgggccagagatttttcttctggaggcttttaaattacatatttattttattggataggtagaactattcgaagtatctatttcttgtgtaataaattttgatagtctgtcctgttgaaggaatatttcatctgtatttgtagcactcccttattcttttgatagcaggatctgcacttctttttatttttaatatttaaaatgtgcatactcattttatgattgagtcttcttagacatttatcagttttattgcgcatcatgctgaaagatgtaatttttgcttcatctctcacttcagagaactagcactttatattaatgatttgtctctattcttgatttctttgatttctgctctgatcggtattatattccacttgctttggttgtatttggctctttctaacttttcaaggtggggttttagattattgatttgagatttttttgcttttttaatgtaagcattacattgtataaatttacctcatatcactattggtttgatcccacaagttttaatgttttcattacattttaattctaatagtttttattttttgagacattctctcttagccatgaattatttaatagtatgcttaattttctggtgtttggcatatttgttactgatttctaatttgttccatgtttgatctgactgtttaaatgtgttaacatttttttatgacccaggatagggtctatcttgtttcgtatagctgcttgaaaagaatgggtgttctgctgttactgggtggagtttctataaatgtctctatgatcctgctcattgttattcaagtcagctatgtccttgctgattttctgtccagcatttctgtcagttgctgagaggggtgttgaagtcctgaacataggccgggtgcagtggctcacgcctgtaatcctagcactttgagaccactaaggcaggtggatcacctgaggccaggagttcgagaccagcctggccaacatggcaaaaccctgtctactaaaaatacaaaaattagccaggcatggtggcgtgtgcctgtaatcccagctgctggggggctgaggcaggaggatcagttgaacgtgggaggcagaggttgcagtgagctgagatctcaccactgcactccagcctgggcaacagagcgagactctgtctcaacaacaacaacaaaaagtcctgaacatgattgtggaagtgtgttgctctttcaagttctatcactttttgtttgcaaagttcaaagctgtattgtttggtacatatacatgtaggtttgccaagtctttgtggtgaattgactcttctgtcattatgtgatgtcatttttttgccttttaatagtcttgtcaatactttacctgatgttctcatagtgactcctgcatattttgattaatgtttgcatggttaatatttcttcattttattttaaagcttacctgtatcattacttatgaagtcagtttctttgaacagcatatactcaggccatgctttttttattcattctgcatatgtctctcttaattggtatgttgaaatgatttacattaaaataattattgatattttagggcttaagtgtgcccttaaatgatttttgtgttcttttttattgttcctctgttatttggggttgtttactagtcttcctataggttacttcaccttttttttttttaataatttgatttgatacatatgtagtgttttttagtatagatcctccttgacttatgatggggttatgtcacaataaacccattgcaagttgaaaatactatgtcaaatatgcatttaatacacctaccctgctgaacatcatagccgatcttgccttcagaatgctcagaaaatttacattagcctgcagttgggcaaaatcatctaacacaaggcctactttataataaagttactgcaaagaattttaaataaaaattcaagtgtggtttctactgaatgcatgtcgcattcgcaccattgtaaagtcaagtagtaagtcgaaccatcctaagtcagggactgtctgtatatatctgcattttttagtgattgttctactattacagtgtaaatatataacttatgacagtttaataagttatcagcaatttagcactttacttccattaggttcctttagcttacctactaatgtaactatcttaagtaatagtaattcctcttcaaaaattgagcgctatgttgcaagatgtaatttttcttttccttttttttgagaccaagtctcactctgtcacccacgctggagtgctgtgatgcgatctcggctctctgcaacctctgcctcccgggttcaagcaattaactgcctcagcttccctagtaatggattacaggcgcccgccaccacgcctggctaatttttgtatttttagtagagacggggtttcaccatcttggccaggttggtcttgaactcttgacctcatgatccacccgcctcggccccccaaagtgctggggttacaggtgtgagccactgcacccggccacaagatgtaatttttactttatctctcacacgtattttacaaaacgtcatgagaaacattgtctcttgaccttttttttttttttttttttttaaagagacagagtctcactctgtcacccaggctggagtgcagtggcacgatcttggctcactgcaacctccgcctcctgggttcaagcgattctcctgcctcagcctcctgagtagctgggattacaggtgtgcgccgccacacccagctaattttgtatttttagtagagacggggtttcaccatgttgctcaggctggtctcaaactcctgaccttgtgatccgccaaccttggcctgtcgacctctttacccattccattgttcattcttctttcttgaaatcccaaaccttctattaacatttcttttcagttatacactgaactttactgtagcctttcttctagagtaacaaatgttctttgttttccttcctctaaagatgtctttatgtttccttcattcccaaagaatatttttgtggaatataagattcagagttggcagttgttttcttttagacttcagagatgtatctctctgttctgtacattattgtttaatataagaaacctactagcattcaaataatcattccctattttacaatgcatcagttctgtcaagcttcattcaaagtgtttttcattgtctctagtgttcagaagtttggctgtgatgtgcgtggcatggaagtttttgggtgtattctatttggcgctccctggtgcttgcccagctttttgatctgtaggattatgccttttgcaaaatttggggaactttcaactattatttcttcaaatattttttcaccccccagtcttgtcttttttagggacttcaataacatgagtggcagatcttgttttacactcccatgggtccttcaggctctcatcttttttctttttccagtctattttctgtcttgttaatattgattaatttttattgaccttccatggtcctcactgattgttttctttgtcatacctaatctgttgagtttgtgcagtgagttttcattttggttttgtattttccagttgtttaatttccattgggtgggttcttttgtacaccttctgtttctttgcttattttttaacgccaaagaaagactctcagagaatagacaactatattccaaagtcatggttctctggtggtttgtcttgacatttgaatagaaatgttaaactatctgggggaatagaaagcccacagtcttctgagttgtgctacaccaatatttctatgaacagatcttacaactgagagtgatctgcagatttttcagagtcatgttctccatggaatgtttgtaaaattccctagctctctgcactgagctgagatcgtgccactgcactccagcctgggcaacagagcgagactccatctcaaaaaaaaaaaaaattctctagctctctatgccttgttgtatcctcaggaaggagtcacctctcttccaggatcactcttgccttttgttattggacacattttcctacctcctgcccagtcttttttaggctctctgtcatacttcctcgcctagtctttaacttgtctctgataaccagatttttcccccataatctgtatctgtattcaagtctctatcctcatccccaaatggatttcaccccgcttgtccatcagtctctgcccatttcttctgtctcccacagacatggtctgtgtagttgttctgcacactacccgtcctcgccccttctcatttccctcactccacggacagctacaggagggcttccatcatttgtcctcttacttccttgttagaactttgtgctgctgaccaccactctgaaccaaaacttctttcttggttcttgaaagttgctgtctttctcctccagagggtctgtgtcttccttccaactcttaaacatttttgtttcccagaatccatcattggccattgctttttcacttgccatgagctctgtgaatgagatggttcctgctgaagacatttactttcaatgatctacagaatttcccaaatctatgtctccagactggatgtttctcacgtctgtggcccactgggcatcttctgcactttctctgcatttgtaaacactgagcctgtatgcgtgtctatgtggccatggccctggccgtggggatgcacccataattataatgagagcaggtgaatgtcatgtggctatgtatgagacattgttgtgaatgttttacatgcatcagctctttcaacatttacagcatctgtgtgtggtaggtaatgttgtttccttcattttgcagagcagaatatagataggctcaggttaagaatttgcccaaggttacacagttatgaagtttggatttaggaatgggaggccacgtagactggcttcagaattcatgtctttaaccactttattgcttctcatgttggggggtttgttttctggtcactatttttactaaagttgattcaacaatgctataatctgttactctcattcgacaatacatcttgactgtttcttcaacttgaggaaggtaaaccaaagccactctttaatgggtgcaaatatctgttgtaactatgtagaagatacagtgtctgggtttgaggacaggggagtgggaaaactgagtagggaagcggtaagacatgcatctggctttaggagtgtttgaagtgcctaaagatcagggtgaatttcccaaatttgaatcttgttgcccaagccacattgcaaccacctctttttctcttacctcgtccccacatccaggcactgccccattctgttcattccacctttttttttagtagaccctccatatatgtgtgtgttttggtgaatggccacacacagcaaagttatttttattgcaattttgttgttgttgtttgagacacagagtctcatactctgccacccagactgaagtgcagtggtgcgatctcagttcactgcaacctccatccccccatgttcaagcaattctcctgcctcagcctcccaagtagctgggattacaggcatgggccaccatgcccggctaatttttgtattttttgtagacacggggtttcaccatgttggccaggctggtctcacactcctgacctcaggtgatccacccgcctcggcctcccgaagtgctggcattacaggcatgagccaccacacccagcctttattgcaatttttggttccctcacagaatgtttaccatgaagctgtgcgtataggtggtaccatgtatgacataccttgacctcaaagataatctacctgggctttttttgtttgtttgttttgagatggagtctcactctgtcacccatgctggtgtgcagtggcgtgatcttggctcacagcagcctctgcctcccgggttcaagcgattctcctgcctcagcctcctgagtagctgggactacaggtgcctgcgaccacacccagctaatttttgtatttttagtagtagtgggatttcaccatgttggccaggatggcctccacctcctgacttcatgatccacccgcctcggcctcccaaagtgctgggattacaggcgtgagccaccgcacctggcctacctgggcttttttggacagatgtacatgattttagaaattgttatgaatgactgtcttgggatcctcaagaacacccccaggtttgacgatttgctgagaagactcaggtctcagcattctgtcatactcaacagctatgatttactgcagcaaaaaaatacaaagcaaatagtaaagggaaaaagccaaaattcagagaaaaccaggcacaatcttctgagtcttgtttcagtgaagtcacaggatgtgccttatttaagttccatctggtacttatgacaacacatgctatatgtccactgggaagcttattagagactcagtgccagggtttttattgggcatgttttctagcacatcccacaattctggacttccagaaggttagcaggggttcagcttttcagctgaaaacgttatccccctttcagctggggggaaaaaaaggcaccgaaaaacagggcagtgagctactcctgttttgggtgggtggagcagtagtaagcctcccaaaatctaaggtcccacactccagcaagggtgaaccttgcaaactcaaaaggatagcagtctccaacctgctgttttatacagtgacttaagtggtactaaaatgctatataagtcaaatttacgtaacattaagcaaataattttttttcagcaaaaaaataatggtcatgactttgtggtgaaggcttatgtaatgattgtaataaattcaggtggctcacgcctgtgataccagcacttttgggaggctgaggcgggtggatcacttgaggtcaggagtttgagaccagcctagccaacatggtgaaatcccatctctacaaaaatgaaaaattagccgggcgtagtggtacatgcatttagtcctagctacttgggaggctgaggcaggaaaatcgcttgaacctgggaggcagaggttgcagtgagccgagatcatgccactgcactccagcctgggtgacagagtgagactgtgtctcaaaaaaaaaaaaaaaaaaaaaatgcctcagttttgttaagaggaaaaagcaaatcctaagttacagtggaacttatgaacaccctagcctagagatttaatttagtgatgaaaaggtacagagagagtctttcaagaaaggacctagtctgctcgcgttctctctctctctctctctatatatatatatgtatatgtgtgtgtacatatggaccacttcaagctacacacacacacacacatatacacgtgtatgaatatatatatatggctataagtggtgcgacttgcaggtactccctttgttcacctttgtaaagatgttattgccagttcagtgtgtatttctatagtatatatgtaaacaatttgtcatccttttgttgctgcttttgaaactagttcatggcttcagtgggggagagatttaaataatatgggtttataatttctgcattattaaatgcagataacttgtgattaaagagtatgttattggaaaaaaaaaaa

SEQ ID NO: 2033 - DNA, 3162 bp, Homo Sapiens
  NM_003419
gcgggaaagaaagcttgccccagaggacttaaacaggcaagaaggacttggttaaagactattgcaatagtcaacttccaatacaacagcagctggagatttatagctaacgggctgggtgaaggagttaaaggatgctaaattactaagaggaagtgatgggcagtaggggctgagcaaagataacttctgacatagtcaaaccaactccctctcagaagaacctgatgtttcctgactgctttctccttcctcagccctgccctgcttggatagaggcctccgaacaggagtaaagaatggctgttgaacatccacaaggcacctgcaagactatgaatcaaagttgagaccaagaaattatttctgaaaaaggatatggaaaaccttacaaaacacagcattgagtgttcaagtttcagaggtgattgggaatgtaaaaaccagtttgagagaaaacagggatctcaggaaggacatttcagtgaaatgatatttactcctgaagacatgcccactttcagtatccagcatcagagaattcatactgatgagaaactccttgaatgtaaggaatgtgggaaggattttagttttgtatcagtccttgttcgacatcagcgaattcatactggtgagaaaccttatgaatgcaaagaatgtggcaaggcctttggtagtggtgcaaaccttgcttaccatcaaagaattcatactggtgagaagccttttgaatgtaaagaatgtgggaaggcctttggtagtggctcaaaccttactcaccatcagagaattcatactggtgagaaaccctatgagtgtaaggaatgtgggaaagcctttagttttggatcaggccttattcgacatcagatcattcacagtggtgagaagccttatgagtgtaaggaatgtgggaagtcctttagttttgaatcagcccttattcggcatcacagaattcacacaggtgagaaaccttatgaatgtatagattgtggtaaagcctttggcagtggttcaaaccttactcaacatcggcggattcatactggtgagaaaccttatgaatgcaaagcatgtggaatggcctttagcagtggttcggctcttactcggcatcagagaattcataccggtgagaaaccatatatatgtaatgaatgtggtaaggcctttagttttggatcagcccttactcgacatcaaagaattcatactggtgagaaaccttatgtatgtaaggaatgtgggaaggcttttaatagtggctcagatctcactcagcatcagagaattcacactggtgagaaaccctatgagtgtaaggagtgtgagaaagcctttagaagtggttcaaaacttattcagcatcaaagaatgcatactggagagaaaccttatgaatgtaaggaatgtgggaagacctttagtagtggttcagaccttactcaacatcacagaattcatactggtgagaaaccctatgaatgtaaggaatgtgggaaggcctttggtagtggctcaaaacttatccaacaccagctaatccatactggtgaaagaccctatgaatgtaaagaatgtggaaagtcctttagtagtggttcagctcttaatcggcaccagagaatacacactggtgagaaaccctatgaatgtaaggagtgtgggaaggctttttatagtggctcaagccttactcagcatcagagaattcatacaggtgagaaactttatgaatgtaagaactgtgggaaggcttatgggagggattcagagtttcagcaacataagaaaagtcataatggtaagaaactctgcgaattggaaactataaattgaaattatgtgctgaaggaaggactctaaacatatgacttaagaaaattcatagtggtgaaaatctctacaaatagaactaaggtacaaatgccttacttatgcttcacaggttagtcagtctaagaatatttatacaggaaaaaaatcaccccaaataaaataaatatttgaagatccttatctatattcattccttcattacttttggaaaattcttacttgtgaatgttaaaaatgaaaaaaaaatcatttattatattttgcctcaactttaaacattggaaaactcatttctgggttaatcctactatattttttcaatggtcttttttttttgtattatacagaattactgattcattgaaaaattattttatttattgcaagtctaaatttatcctttttttctttcctgattatcctaacaccatttattcaataaccttgtccattttcatattttttttattgactatttgatggtaagttacatttttattcacataaagcttggatatcaggtcagtgtttttttgtttttgtttttgtttttgtttttttgagatggagtctcactgtcaccaggctggagtgcagtggtgcaatctcggttcactgcaacctccacctcccgagttcaagtgattttcctgcctcagctccccagtagctgggactacaggcgcccgccaccacgcccagctaattttttgtattttcattagagatggggtttcaccacgttggccaggatggtctcgatctcttgacctcgtgatccatctgcctcggcctcccaacgtgctggaattacaggcatgagccaccatgcctggcccagtgtttgttttttaaatttatatatatgtatctatgtctcatcctgtttatggtcaataactgttacttttaagtatcctttaatacctgtaccttttgttttagaagattgtttactttccttttataaaattatactctccattttagcaaaacagctttccctcatcataatgtagataaaaagaaaaaaaggatatggttacctgtaatcttaccaatcatagataatcactgtcaaacttttggagcaaatcctttaatactatctctcattgttttggaaacaaggtgtgattatgctatactataaccagcccttaatattttttgtctgtaaatatgttgttaccattttattggctttatagtattcacctgtctttatcaaaccccaattttgtcaaatattaaaaattttgccattataaaaaaaaaaaaaaaaaaaaaaaaaaaaaaaaagaaaaaaaaaaaaaa

SEQ ID NO: 2034 - DNA, 3903 bp, Homo Sapiens
  NM_003425
gagagcgcggccttcattcctctcgtggaagtgagtgagtcctgggaccccgcgacctgttttaacttttatggtttggtcgtaggatcagcagggctcgcacttcggtcagcaggaaaagacgctgcggcgagcagcggagggcggagttgaatggctgggcagctgattgccttactgtatccggagctgctgcgttcggggcggttcgggagtcccctggttggaagtggacctgaatggggaggcgtctgaggatctcctgggctctcagcggcccgacccgccttcccccacctcccacagctctgtagcttcctagcggtgtaacgttgggaaaggaggctgttcttggactatgcctgacccgttttttaagaaagagtgcatcactcaacaggtggcgtctggagttatcctctgtggattttccaggatctcagacaagatcgtgcaatctcccagcctcctttccttcccctgccctgacttctgaaagaatgctgcgggagaggaggaaggagagcatcctggcttctggcagcagagccccactgtgacaggacctagcattcaccttcctcttctgttccgagtgcgagaagacttcagggacctctgtttcatggacattatcatattcttctcaagagtacccagcaagaggtttgcaaagaggagttattcagtgaaatcagaatcataccctgagagctacaagaactccatttttcactgtgcagaggctctctgctgaagggtcaagtggaatctggaatccagcccatgtttccccatcatcaagccatgtgaagctgcagactccaagcaacagagagacaagatttagaatactggctctggtatgaaagctggattcaggtactgttcctgcctcttgacctcaccaagcctcagcttcctcgcctgttaaatggatacaattgtcgtcattatcatctgttgagaactccctaaaatgccagctgagcataggcacagaagtttaggtgtttggaccaaggtcacacaactgatacaacagtagcttcttcacagacttggcacttctccagaaggaggaggacaaaatgacgaagtctaaggaggcagtgacattcaaggacgtggctgtggtcttctctgaggaggagctgcaactgctggaccttgcccagaggaagctgtaccgagatgtgatgctggagaacttcaggaatgtggtctcagtggggcatcagtccacaccagatggcctaccacagttagagagagaagaaaagctgtggatgatgaagatggcaacccagagagataactcctcaggagccaagaatctaaaagagatggagactcttcaagaagtaggattaaggtacctgcctcatgaagagcttttctgctcccagatctggcaacagattacaagagagttaatcaagtatcaagattctgtggtaaatattcaaagaacaggctgccagttggaaaaacgagatgatttgcactataaagatgagggattcagtaatcagagttcccatcttcaagttcacagagtccacactggtgaaaaaccctacaaaggagaacattgtgtgaaaagtttcagctggagctctcatcttcaaattaaccaaagggctcatgcaggagagaagccctacaaatgtgaaaaatgtgataatgccttccgtcggttttcaagtcttcaagcccatcagagagtccacagtagagcaaaatcatacacaaatgatgcaagttacaggagttttagtcagaggtcacatcttccccatcatcagagagttcccactggagagaatccatacaaatatgaagagtgtgggaggaatgttgggaaaagctcacattgtcaagctcctctgatagttcatacgggagagaaaccctataaatgtgaggagtgtggggtgggcttcagtcagagatcatatcttcaagttcatctgaaagttcacactggaaagaaaccatataagtgtgaagagtgtgggaagagcttcagttggcgttcacgactgcaggctcatgagcgaatccacactggcgagaaaccatacaaatgcaatgcatgtggcaagagctttagttacagctcacaccttaatattcattgtagaatccacacaggagagaaaccctataagtgtgaggagtgtgggaaaggtttcagtgtgggttcacaccttcaggcccatcagataagccacactggagagaagccatacaaatgtgaggagtgtgggaaaggcttctgccgggcctcaaatctgctggaccatcaaagaggccatactggagagaaaccgtatcagtgtgatgcatgtggtaagggcttcagtcgtagctcagattttaacattcattttagagtccatacaggggaaaaaccctataaatgtgaggagtgtggcaagggcttcagccaggcctcaaatcttctggcccatcaaagaggccacactggagagaaaccctacaaatgtggtacatgtgggaagggcttcagtcggagctcagatcttaatgtacactgtagaatccacacaggagagaaaccctataaatgcgagaggtgtggtaaggccttcagtcagttctccagccttcaggtgcatcagagagttcacactggagagaaaccatatcagtgtgcagagtgtgggaagggcttcagtgtaggttcacagcttcaagcccatcagaggtgccacactggagagaaaccctatcaatgtgaggagtgtgggaagggcttctgtcgggcctccaattttctggcacatcgtggagtccacacaggagaaaaaccataccgatgtgatgtgtgtggtaagcgcttcagacagagatcctaccttcaagcccaccagagggtccacacaggagagagaccatacaaatgtgaggaatgtgggaaagtcttcagctggagctcataccttcaagcccatcaaagagttcacaccggagaaaaaccatacaaatgtgaggagtgtgggaagggcttcagttggagctcaagtcttatcattcatcagcgagtccatgctgatgatgagggtgacaaggactttccttcatcagaggattcacacaggaaaactcgataaaatatgttttactatctcagatgggtgctgaaatattttaataatcagagctatcatagacaaaacatttgttttatagagtcagtagttcagccaagtgattgggagaccacacagcagagaagcctcacaagagtggagacatatggactgcattcagaacattgaccattagctgatacatgcagacaagaggatcaggaaggatgagtctgatctggagtaaatcagaagtactaagatagaaatgctgaattctgttccactagaatataagatccaagagggcagggactttgttgactgccaaatctactctgccttttcagtgcctaatacgttgtaatttttcagtagtatttgaaattactgtcatatttgaaattcagtaatatttgacatttttatttatctctagaagtttctctaaaattgtactcagaagaattctgcaaggcttggaggatatataagttagtcatatggcctgattttcccatttttgcagatctcgtggacaagtgtttatcaaactgaaggttgcagcttgttagtgggttcagaaatcagtttctggctagcaactagaagttttgtatgttaacagtactttattgaggtgtaatctgcatgcagtaacatgcacaagtctcaagttcatggctttctgaattttgacaaatgtaatcatcaccaagatcaatgtatacaatatgtctattaaaccaaaaagttttcttgtgcccatttccagtcaatccca

SEQ ID NO: 2035 - DNA, 3868 bp, Homo Sapiens
  NM_003426
ttttgtgggagtccggtctgtccacttgccggtccctcagaccgtcggcggtctctgtccgcttcgggacctgtccgctggtcgctccgcgtccgatggctcctggccgcggaaccttaggcctggccctggtctccgagcgcgggttcgccgggaggagcgtgtggcgggggtgtgccggggcgtgagtgcgccgagcatggggctgagcctggtgtggggagtgggtatctgcggagccggcctgaaccccacctcagccgggcgcggggagggggctccgtgcgtgtgatcgtgcagctgtgagcgcgtggccgccccgcggggctccgctgcaggcccctcagccccaggagcagtactcgctcttcagggcctgccctggatcctggaggctacacagctgcccactcctcctggggaggctgccgtggaggccatggagatccctgccccggagcccgagaagacagctctttcctctcaggatcctgctctttccctgaaagagaatctcgaggatatatcgggttggggtcttcccgaagccaggtccaaggaatcggtgagtttcaaggatgtggctgtggacttcacccaggaggagtggggtcaactagactcccctcagagggccttgtaccgggatgtgatgttggagaactaccagaaccttcttgccctaggacctccactgcacaagccagatgtgatctctcatctggaacgaggcgaggagccatggagcatgcagagggaagtccccagagggccctgtccagaatgggagctgaaggcggtgccctctcaacagcagggcatttgcaaagaagaaccggcccaggagcccatcatggagcggcccctcggcggggcgcaggcgtgggggcgccaggcaggtgctctgcagaggagtcaggctgcgccctgggcgcccgcacctgccatggtctgggacgtccctgtagaggaattccccctcaggtgtcccctcttcgcccagcaacgcgttcccgaggggggacccttgctggacacacgcaagaacgtccaggccactgagggcagaaccaaggcccccgcgagactgtgtgcaggggaaaacgcctccacgccaagtgagccagaaaagttcccccaggtgcgccggcagcgcggggcgggcgccggggagggcgagttcgtgtgcggcgagtgcgggaaggcgttccgccagagctcctccctcacgctgcaccggcgctggcacagccgggagaaggcttacaagtgcgatgaatgcggcaaggccttcacctggagcaccaaccttctggagcaccggcgcatccacaccggcgagaagcccttcttctgcggcgagtgcgggaaggccttcagctgccactcgtccctcaacgtgcaccagcgcatccacacgggcgagcggccctacaagtgcagcgcctgcgagaaggccttcagctgcagctcgctgctcagcatgcacctgcgggtgcacaccggcgagaagccctaccggtgcggcgagtgcggcaaggccttcaaccagcgtacacacctcacacgccaccaccgcatccacacgggcgagaagccctaccagtgcggctcctgcggcaaggccttcacctgccactcatccctcaccgtgcatgagaagatccacagcggggacaagccgttcaagtgcagcgactgcgagaaggccttcaacagccgctcgcgcctcaccctccaccagaggacgcacacgggcgagaagcccttcaagtgcgccgactgcgggaagggcttcagctgccacgcgtacctgctcgtgcaccggcgcatccacagcggcgagaagcccttcaagtgcaacgagtgcggcaaagccttcagctcccacgcctacctcatcgtgcaccggcgcatccacacaggcgagaagcccttcgactgcagccagtgttggaaggccttcagctgccactcgtccctcatcgtgcaccagcgcatccacaccggtgagaagccctacaagtgcagcgagtgcggcagagccttcagccagaaccactgtctcattaaacatcagaaaatccactccggggagaagtcgtttaagtgtgagaaatgtggggagatgttcaactggagctcgcacctcactgagcaccagaggctgcacagcgaggggaagcccttggccatccagttcaacaaacacctgctcagcacatactacgtgcctggcagcctgctgggtgcaggggatgctggactgagggacgtggatcccatcgacgcgctggatgtggcaaagctcttgtgcgtggttccccccagagctggcaggaatttctccctggggagcaaacctcgaaactaacatgatgtgctttggtgtcagtagctgctttctgagctactcaacaaggaaagcaccctggtcctccctggctcctagatccagaccaccttcctccaggtgtgggagccttgccttatcacccccatcaggtctgcatgccagggtgcctcctctagttaaagtcagtcacctccccagaagggccacactccaggaggagtgttgagagtcatttgaggtagtcttgccacctgttttccttgatgggcctggaagttgttgacaaggggaaagatctttcttgccaataaaaagaagggatatcgttgggtgccatggctcacacctgtaatcttaacactgtgggaggccaaggcaaggggatcacttgagcccaggagtctaggaccagcctggacaacatggtgagacctcgtctctacaaaaaatgcaaaaattagccagatgtggcggcatgtccctgtggtcccagctactcaggaggctgaggtgggaggatcatttgagcctaggaggtcaaggctgcagtgagccatgattcacagcactgcactgcagcctgggtgacaaagcaagaccctgtgtgaaattaaaaggaggtatatcaactgttgtatcctcggacgggctcctgacacggctttaatcaggagtttcctccataaactattattttcagaataataataaaacaagaattatgactagcatcactttccagtgaacattattatattgctagagaggagaataatcttgggtggtgggcatttggaaaaagtgaatttcctggacttaactcatgtaaatagctctactgcagagctgtgtgtttagtgacagtgcagtcaggggcattcccacagctgtcacagcacggcccagcatcattgtagccagatcctaacatgccaacatcacctcttgccatttagcccctagtgagaaattgggagctaccaggcaggtgcccagtgcattcagggaagatgggcacaacatcaggatgggtgtgtctggaagctcctcttcactgaccagggctgggcagggccaccctgggctggtgaggctgccctgcagggcttctcactatgtagcaccagtcaccagcccaggtcacagaagaagcccctcccagcacccactggagaggggaagctgaagcccagggagacgggctccatggtggtcccacatggagctgttttgcaaaccctggaaaaggcggctctccctgtcccaacactcttcagagacaggaagacagagttaatcttgaatgaatgttatttctacttagtcctaagcaagaataagctgccctcttggtgatcatactttatacggagtgctatcgtttatgaaatgctttcagtatgctttttaaattatgcaggcaaaataaccacacttcagaaaatgtggacttctgaaaaataaaatccccataattcttaataaaactgccttttgcactttgatacatta

SEQ ID NO: 2036 - DNA, 2671 bp, Homo Sapiens
  NM_003427
ctgcgcgcgggcgggcgggctatggcgcaggcgggttgtggggccggcgctggtggcggggcccggtgcatggcggtctgtcggcggagtcgccctcgggggctgtcagatttgtgacccagaaggaaatctctgacctcagctgtggctcttggtgctggccagaagccaacttcatgtctgagtgcacgagcagcagtttgccatggagagcttggggctgcacacggtgacccttagtgatgggacaacagcctacgtccagcaagctgtcaaaggagagaagcttcttgaagggcaggtgatccagctcgaggatgggaccaccgcatacattcaccaggtgacggtacagaaagaagctctctcctttgaggatggtcagcctgtgcagctggaagatggcagcatggcttacatacaccgcacacccagagaaggctatgaccccagcaccctggaagccgtccaactggaagatggctccactgcctacattcaccaccctgtggctgtgccatcggagagcaccatcctggccgtacagacagaggtgggcttggaggacctggcagcagaggatgatgagggcttcagtgcagacgcagtggtggccctggagcagtatgccagcaaggttcttcatgacagccagattccccgtaatggaaaagggcagcaagttggagacagagcattccgctgtggctacaagggctgtgggcgtctctacaccaccgctcatcacttaaaggtgcatgaacgagctcatacaggtgaccgtccatacagatgtgacttccccagctgtggaaaggcctttgccacaggctatggactgaagagccacgttcgtacccacactggtgagaaaccatacaagtgcccagaggagctgtgcagcaaggccttcaagacctcaggagacctgcagaagcatgtccgtacccacactggtgaacgcccgttccagtgcccttttgagggctgtggccgctccttcaccacatctaacatccgcaaggtacatgtgcgcacccacacaggcgagaggccctacacctgcccggagccccactgtggccgcggcttcaccagcgccaccaactataagaatcacgtgcgcatccacacaggggagaagccatacgtttgcacggtgccaggctgcgggaaacgcttcaccgagtactcgagcttgtataagcaccacgtggtgcacacacactgcaagccctacacctgcagcacctgcggcaagacctaccggcagacctccaccttggccatgcacaagcgcagtgcccatggcgagctggaggccacggaggagagtgagcaggccctctatgagcagcagcaacttgaggccgcctctgcagccgaggagagtccgccacccaaacgaccccggatagcttacctttcggaggtgaaggaagagagagatgacatcccagcccaggtggcgatggtgactgaagaagatggggccccccaggtggctctgatcactcaggatggtgcccagcaggtcagcctgtccccggaagacctgcaggccctggggagtgccatcagtatggtcacccagcacggcagcaccaccctcaccatccccagtcctgatgccgacctggccacatctggcacacatacagtcaccatggtcagcgccgatggcacccagacgcagcccgtcacaatcattacctctggggctgtggtggctgaggactcaagtgtagcatctcttcgtcatcaacaggtggcactgttggccacagccaacggaacgcacattgcagtgcagctggaggaacagcagaccttagaggaggccatcaatgtggccactgcggccatgcagcaaggggctgtgaccctggagacaacagtgtcggagagtggctgctgagtccaagagggctgggtcccacaccatgctggaggaagtgccatctgcatggccactcttgcccccaagggcccaggctgtggctgacacatagaaggtggccacataggtctctggggtgagaagacagcaagaaaactgcctaactgaagggaatgggggccctgctcaagaagggggccaggcagctggaatcaggggagtgcatcatcctcgggagctgacaacagccaggctacaccagggcacccgcctctcaaaatcagctgggcgcccactctcctcctaaagaacacccttctggccctcagtctgttccccttctcaggtagagattggggctgctatggggactggccctgtagggttgagccacagacagctcttcagcccagtagcagtggagcaggccctgtcctgccctcccagcaataaccacctccctggaggccagctgagatgcctggctacttggcaccagggacttcctgacaccacagtcaattaattcctcaggggcctgtggctggagaaaaggtgcccagcccccaccactcctcagctgccccccaacctctctatggcagagaggcagggagtggccctgtacatagactgctggggattgggtttgatttgttttgtttttttaaattccattttgataatttttttcctgctctgggtggtggtggcacatggatgaatgagtatttaataaaagttccaaatttcaaaaaaaaaaaaaaaaaa

SEQ ID NO: 2037 - DNA, 5403 bp, Homo Sapiens
  NM_003430
ctcgctgccgccggagtttccaggtctcgacttcactgctctgtgtcctctgctccaggaggcccagcctgtgtggccctgtgacctgcaggtattggagagccacagctaagatgccaggaacccctggaagcctagaaatgggactgttgacatttagggatgtggccatagaattctctccggaggagtggcaatgtctggacactgcacagcagaatttatataggaatgtgatgttagagaactacagaaacctggccttcctgggtattgctctctctaagccagacctgattacttatctggagcaaggaaaagagccctggaatatgaagcaacatgagatggtggatgaacccacaggtatatgtcctcattttcctcaagacttttggccagagcagagcatggaagattcttttcaaaaagtattactgagaaaatatgaaaaatgtggacatgagaatttacagttaagaaaaggttgtaaaagtgtggatgagtgtaaggtgcacaaagaaggttataataaacttaaccagtgtctcacaactgcccagagcaaagtatttcaatgtgggaaatatttgaaagtcttctataaatttttaaattcaaacagacatacgataagacatactggaaagaaatgcttcaaatgtaaaaaatgtgtcaagtcattttgcatccgtttacacaaaacccaacataaatgcgtttatattacagagaagtcctgtaaatgtaaagaatgtgaaaaaacctttcattggtcctcaacccttactaatcataaggaaattcatactgaagataaaccctacaaatgtgaagaatgtggcaaagcttttaagcagctctcaacccttactacacataaaataatctgtgctaaagagaaaatctacaagtgtgaagaatgtggcaaagcatttctatggtcctcaaccctaactagacataagaggatacacactggagagaaaccctacaaatgtgaagaatgtggcaaagcttttagccattcttcaacccttgctaaacataagagaattcatactggagagaaaccctacaaatgtgaagaatgtggcaaagcttttagccgttcttcaacccttgctaaacataagagaattcatactggagagaaaccctacaaatgtaaagaatgtggcaaagcttttagcaattcctcaacccttgctaatcataagataactcatactgaagagaaaccctacaaatgtaaagaatgtgacaaagcttttaagcgactctcaacccttactaaacataaaataatacatgctggagagaaactctacaaatgtgaagaatgtggcaaagcttttaatcgatcttcaaatcttactatacataagtttattcatactggagagaaaccttacaagtgtgaagaatgtggcaaagcatttaactggtcctcaagccttactaaacataaaagatttcatactagagagaaacccttcaaatgtaaagaatgtggcaaagcatttatatggtcttcaaccctaactagacataagaggatacacactggagagaagccctacaaatgtgaagaatgtggcaaagcttttaggcaatcctcaacccttactaaacataagataattcatactggagagaaaccctacaaatttgaagaatgtggcaaagcttttagacaatccttaacccttaataaacataagataattcatagtagagagaaaccctacaaatgtaaagaatgtggcaaagcttttaagcaattctcaacccttactacacataaaataattcatgctggaaagaaactctacaaatgtgaagaatgtggcaaagcttttaatcattcctcaagtctttctacacataagataattcatactggagagaagtcttacaagtgtgaagaatgtggcaaagcatttctatggtcctcaaccctaagaagacataagaggatacacactggagagaaaccctacaaatgtgaagaatgtggcaaagcttttagccattcttcagcccttgctaaacataagagaattcatactggagagaaaccctacaaatgtaaagaatgtggcaaagcttttagcaattcctcaacccttgctaatcataagataactcatactgaagagaaaccctacaaatgtaaagaatgtgacaaaacttttaagcgactctcaacccttactaaacataaaataatacatgctggagagaaactctacaaatgtgaagaatgtggcaaagcttttaatcgatcttcaaatcttactatacataagtttattcatactggagagaaaccttacaagtgtgaagaatgtggcaaagcatttaactggtcctcaagccttactaaacataaaagaattcatactagagagaaacccttcaaatgtaaagaatgtggcaaagcatttatatggtcttcaaccctaactagacataagaggatacacactggagagaagccctacaaatgtgaagaatgtggcaaagcttttagccgttcctcaacccttactaagcataagacaattcatactggagagaaaccctacaaatgtaaagaatgtggcaaagcttttaagcactcctcagcccttgctaaacataaaataatacatgctggagagaaactctacaaatgtgaggaatgtggcaaagcttttaatcaatcttcaaatcttacgacacataagataattcatactaaagagaaaccttccaagagtgaagaatgtgacaaagcatttatctggtcctcaacccttactgaacataagagaattcataccagagagaaaacctacaaatgtgaagaatgtggcaaagcatttagccagccttcacaccttactacacataagaggatgcacactggagagaaaccctacaaatgtgaagaatgtggcaaagcttttagccaatcctcaacccttactacacataagataattcatactggagagaaaccctacaaatgtgaagaatgtggcaaagcttttaggaaatcttcaactcttactgaacataagataattcatactggagagaaaccctacaaatgtgaagaatgtggcaaagcatttagccaatcctcaaccctaactagacatacgaggatgcacactggagagaaaccatacaaatgtgaagaatgtggcaaagcttttaatcgatcctcaaagcttactacacataagataattcatactggagagaaaccttacaagtgtgaagaatgtggcaaagcatttatatcatcctcaaccctaaatggacataagagaattcatactagagagaaaccctacaaatgtgaagaatgtggcaaagcatttagccaatcttcaaccctaactagacataagaggttgcacaccggagagaaaccctacaaatgtggagaatgtggcaaagcctttaaagagtcctcagctcttactaaacataagataattcacactggagagaaaccctacaaatgtgaaaaatgtggcaaagcctttaaccagtcttcaatccttactaaccataagaaaattcatactatcacacctgtaatcccactactttgggaggccgaggcgggcggatcacgaggtcaggagatggagaccatcctggctaacacagtgaaaccccttctctactaaaaaatacaaaaaattagccgggcgtggtggcgggcgcctgtagtcccagctatgcgagaggctgaggcaggagaatggcgtgaacccgggaggcggagcttgcagtgagccgagatcacgccactgcactcaagcctgggcgacagagcgagactccgtctcaaaaaaaaaaaaaagaaaattcatactagagagaaaccctacaaatataaagaatgtggcaaatcttttaaccggtcttcaacctttactaaacataaggtaattcatactggagtaaaactctacaaatgtgaagaatgtggcaaatcctttttctggtcctcagccctaaccagacataagaaaattcatactggacagcaaccctacaaacaggaaaaatttggcaaagcctttaaccagttttcacaccttactacagataagataactcatattggagagaaatcttacaagtgtgaataatgtggtaaagtctataaaaagtcctgaattcttaacagacataatattattcatactggagagaaactctacaaacctgaaagatgtgccaacgcttttgacaagtcaaacttttctaaacatcaagaaaatcatgctgctgagaaatcctagaaatgtgaagaatgtgacaaagcctctaaatgattgtcacacttgatcgtaggtaagataattcatactggagaaaactaccagtgtgaacaatgtggccaagctttgaactaatgctcacaccttaatgcataggaaagcatttatgcttgagaaaaagtgaacaaatatagacaaaaagccattaatacctgctcacatcgtactcaaattcagagcgttcatactaaataagaagtgtaattactgtcaaacgactgatcagaaaatatgtctttaaagtacagaagagtattttgaaaaagcattacaaatatgaagaggcattatttatgaccttttctatggaaaggtaaggacattaaaaatgtaagatgcatgatgaaaatttaagtagagaggatctttatggttaacttataatatcgagtgatgcatgaggtagatgttcagattaatattctgcattattatgaaagaaaaacattcttaattttagttaaagtttagtatgatttattgtatttttatgaaatatatgtagcatatttttaaattataaattgcatgtgaacttttcaaccaaacagttttaacatgttaaatactatcatgaattcaatgaagtgttattatgccagtaactttaacctattccaccttactcaagggtgtaggtaaaagatggtaaaaatacactatttggtaagataatggactgacatctctagtgattttttttgccagtgagttttaattgccattaagttaaagaatattgttcccataggctaaatttttatttttattttctcatttaaatgtatttgacttaatttttgtggatacctaatatgtgtacatattatgccatatgtggcatattttgatacggacacacaatatataacaatcgcattagactaaatgcggtctccattacctctagcatttattctttgtattacaaataattcaattctacagttttagttatttttaaatgtacaattaaattgttgttgactacaggattatttttatggtcataataaaacttatatacaaacataagtaaaatccataaaaaaaa

SEQ ID NO: 2038 - DNA, 1674 bp, Homo Sapiens
  NM_003431
ggcctttgtctctcgtgcccgcacgtgcgtgtctcggtcagtagccctgcgcttctccttcactctcggcggttcaggaggctctgccgcagccggggccctcctgtgacctgcatgtactgggggattcgcagggaggatgtcgggacaccccggaagctgggaaatgaactcggttgcctttgaggatgtggctgtgaacttcacccaggaggagtgggctttgttggatccttcccagaagaatctctatagagacgtgatgcaggaaaccttcaggaatctggcttccataggaaacaaaggggaagaccagagcattgaagatcagtacaaaaattcttcaagaaatctaagttcatttcagatacatcagagaaatcacactggagagaaaccctatgaatgtatggaatgtgggaaagccttaggtttttcccgttctcttaatagacataaaaggattcacactggagaaaaacgctatgaatgtaagcaatgtgggaaagccttcagtcgttccagtcaccttcgtgaccatgaaagaactcatactggagagaaaccctatgaatgtaagcactgtgggaaagccttccgttactccaattgccttcattaccatgaaagaactcacactggagagaaaccttatgtgtgcatggaatgtggcaaagctttcagttgtctcagttccttgcaaggacatataaaggctcatgctggtgaagaaccctatccatgtaagcaatgtgggaaagccttcagatacgccagttcccttcagaaacacgagaaaactcatattgcacagaaaccctatgtatgtaacaattgtggtaaaggcttcagatgttccagttcccttcgtgaccatgaaaggactcatactggagagaaaccctatgaatgtcagaaatgtggcaaagcctttagtcgtgctagtaccctttggaagcataaaaaaactcatactggagaaaagccctataaatgtaaaaaaatgtaaaggctttaatcactacagtttttgtcaaaaacatgaacagtcacatacttgagagaaactgtgaatgtaaggtgtaggaaagtacttaattttcccagatttcctcaaatacatgaaacgaatcaaactggagataaaccctatgactataagcaataaggtaaagcattcaatttttccatttctttttgaaaacttgaaaggactcactgaagaaaatccatatgaatgtttaaaatgtggtaaggcctgcagttgttccagtggtatttgatggtataacataactcattctagagaaaaactttatgaaggtatcgaatgtgagaatgccttcatttatcctataactcactcagagacacatggtaacacatactccagattgaccttataaataaaagaatgcccaccagattgaaatcctagaaatacagaaaattctgaattttaacaattactttaaaggtcatgtgaaaactcccactggaaataaatcctgtaaatgtaaatattatggaaaaccttatggaaaataattatagtacaattctcaagaaaattcactatgtgaatgagatgttttaggagctataaataaattgaatatattggttgctcatttttgaagagagtctctagaatatagattttcacttcttttg

SEQ ID NO: 2039 - DNA, 2718 bp, Homo Sapiens
  NM_003434
cgccgagcatcctgggaggtgtggtccgggcgctgtgccgaggattcggggtagtgtagtcctggcgccccgctggaggagctccccagctggtggctggagcgaccccttgttctttggtggcgctgatctaccttctgagatatcatccttcttcagggagataaggaaaaaaagccacagggtcccggagagccaggggaatgcttcaaaagttctgctgcctgagagtaacgtcacagtaatggaacgggaagattctggaatctgtgtccccacctagacaacgattatactggcaggatctatcaggtgtacctattttggaactctggagtctagttgaaggcctccagttcccagggggaaggaagcatggaggtgtgtcctccatttggaagtagtgctaagaaaattaaaagaataaaactgggcaggggcatgagaataggatgcaaagatgaatttttggactgagtggccaagaagctccatggtgagcactcacagtctaaggctggaagtttaatgaactgttttctacatttcacaggcacacatggcattcagggatgtggctgtggatttcacccaggatgagtggaggctgctgagccctgctcaaaggactctgtacagagaggtgatgctggagaactacagcaacctggtctcactgggaatttcattttctaaaccagaactcatcacccagctggagcaagggaaagagacctggagagaggaaaaaaaatgttcaccggcaacctgtccagatccagagccagagctctacctcgatcctttctgccctccgggtttctccagtcagaaattccccatgcagcatgtgctgtgtaatcatcccccctggatcttcacatgcttgtgtgcagaaggtaacatccagcctggggatccgggcccaggggaccaggagaagcagcaacaagcctctgaggggagaccctggagtgatcaagcagaaggtcctgagggagaaggtgccatgcctttgtttggaagaaccaagaaaaggactctgggagcgttctccaggccaccccagaggcagccagtcagctctcggaacggcctcagaggggtggagttagaagccagcccagctcagacagggaaccctgaggaaacagacaaattgttgaagaggatagaagtcttaggatttggaacagtcaactgtggagagtgtggactgagcttcagcaagatgacaaacctgctcagtcaccagcggatacactcaggggagaagccctacgtgtgtggggtatgtgagaagggcttcagcctaaagaagagcctcgccagacaccagaaggcacactcgggggagaagccaattgtgtgcagggagtgtggacgaggctttaaccggaagtcaacgctaatcatacacgaacggacacactccggtgagaaaccttacatgtgcagtgagtgtgggcgaggcttcagccagaagtcaaacctcatcatacaccagaggacacactcaggggaaaagccttacgtgtgccgggaatgtggcaaaggcttcagccagaagtcagctgtcgtgagacaccagaggacacacttggaggagaagaccatcgtgtgcagtgactgtggcctgggcttcagcgacaggtcaaacctcatctcccaccagaggacgcactctggggagaagccctacgcctgcaaggagtgtgggcgatgcttcaggcagaggaccacccttgtcaaccaccagaggacacactcaaaggagaagccctatgtgtgcggggtgtgtgggcacagcttcagccagaattcaaccctcatctctcacaggcggacacacactggggagaagccgtatgtttgtggggtgtgtgggcgaggctttagtctcaagtcacacctcaacagacaccagaacatacactcaggagagaagcccattgtgtgcaaggactgtggccggggcttcagccagcaatccaacctcatcagacaccagaggacgcactcaggcgagaagcccatggtgtgtggggagtgcgggcgaggcttcagccagaagtcaaaccttgttgcacaccagaggacgcactcaggggagaggccgtatgtgtgccgagagtgcgggcgaggctttagccaccaggccggtctcatcaggcacaagcggaagcactcgagggagaagccctacatgtgcaggcagtgtggactgggctttggcaataagtcagctctaattacacacaagcgggctcactcggaagagaagccttgtgtgtgcagagagtgtggccaaggctttctccaaaagtcacacctcaccttacatcaaatgacacatacgggggagaagccatatgtgtgcaagacgtgtgggcggggcttcagcctcaagtctcacctcagcagacacaggaagaccacgtctgtccaccacagactgccagtgcagcccgaccctgagccgtgtgcagggcaaccttcggattccttatactctctctgaaggcaaagatggggacaaggactaagagtcagaatgttgacactttgatgaaatggagtagagaaatgcattctgtaagtggtcaaaggacatttgactgtttactttctccacactaagtcttctccatgttttgtggccttcggttgtaataaacttggcttctttatacatctgtaaaaaaaaaaaaaaaaaaa

SEQ ID NO: 2040 - DNA, 2248 bp, Homo Sapiens
  NM_003435
cgaactgtgatggcggcggccgcggtgatgggcccggcgcagatcctctgtggttgttgaattgtaacaagagagagaactctggctgcctgagagggcatgactctagtcacagcaggaggggcttggacaggccctggttgttggcatgaagtgaaggatgaagagtcatcttctgaacagagcatttctatagcagtgtcacatgttaatacttccaaggcaggtttgcccgcacagacggctctcccttgtgacatatgtggccccatcttgaaagatattttgcacctggatgaacaccagggtacacaccatggactgaaacttcacacatgtggggcatgtgggagacaattctggttcagtgcaaaccttcatcagtaccagaagtgttacagtatagagcaacccttaagaagggataaaagtgaggcctcaattgtgaagaactgcacagttagcaaagaacctcatccgtcagagaagccctttacgtgtaaggaggagcagaaaaacttccaggctactttgggtggctgccaacaaaaggccatccacagtaagaggaagacacacaggagcactgagagtggggatgcatttcatggtgaacaaatgcattacaagtgcagtgaatgtgggaaagctttcagccgcaaagacacacttgtccagcaccagagaattcatagtggagagaagccttatgagtgcagcgaatgtgggaaagccttcagccgcaaagctacacttgtccagcatcagagaatccatactggagaaaggccttatgaatgcagcgaatgtggaaaaaccttcagtcgaaaagacaaccttactcagcacaagagaatccacactggagaaatgccttataagtgcaatgaatgtgggaaatattttagccatcactccaatctaattgtacaccagagagttcacaatggagcaaggccttataagtgcagtgattgtgggaaagtcttcagacacaaatctacacttgttcagcatgagagtattcacactggagaaaatccttatgattgcagtgattgtgggaaatcctttggccacaaatacaccctcattaaacatcagcgaattcacactgagtcaaagccgtttgagtgcattgaatgcgggaaattctttagtcgaagttctgactatattgcacaccagagggttcacactggtgaaaggccttttgtgtgcagtaaatgtgggaaagactttatcagaacctcccaccttgttcgacaccaaagagttcacactggagaaaggccatatgagtgcagtgaatgtgggaaggcctacagcttaagctcccacctcaatcggcaccagaaagttcacactgcaggcaggctttaggagtgctttgaatacaacaggactcatcaatcagatgttgaatttcatgtatctgaacattgacacaaaggagataccttatggtgccaggtacgtgggaaccttctagggatatgttgcactttctgacttgctcaggttttttgccagagttatgtcactgtcaatccatgtggccgaaaccatcttaactctaccagctaagataccccagcattggggaaggcagggttttgtattgtccagtccctggagaaaatcatgaaatgcctgagttcattgggggtcctcattcccttctgtatgacaggtataggtatggatatgacccatttttagccaagagggtctgagctgtatctgctggtggcttatacaaaaagtttactttcttcatggatattcttggtctcacatacttgtaatcaagtttttccagcctccaagtcacctggcctgggaaagtacttgcctcatgttgctctggtttgtgataataaaggctttacagtttaagccacatttaatcttggggcttcttcttatggtctggggtggattgaaaacaggctctgccaaactgaagacagcctttgtgcggtgcctccaactttgcctcaaatgggacagtgggttgagggagaacagttcttagtccagttttgatgttaacttccatagctgacaaagcttgttaagtaagaattaagatcttgtgtagacctgatttgtctggattttagagttatttgagagcccatatttcaccttgaggagggtgctgctgctgtgacagcctgcagtgttttgaaacagcatggattgggtgtcttgtttgcagcatgtgtcccatgttccccaacac

SEQ ID NO: 2041 - DNA, 3408 bp, Homo Sapiens
  NM_003436
gaaatggagttaggctcgcgccggcgcagtgtcggctgccggtgccgcggcctttgtctcgcagtcaggaggggccagccgttcctgccagaagccagggcatgacccctggggtgcgcgtctccacagacccggagcaagtgacgtttgaggacgtggtagtgggcttcagccaggaggagtgggggcagctgaagcctgcccagaggaccctgtaccgtgatgtaatgctggacaccttcaggcttctggtctctgtgggacattggttaccgaagccgaatgtcatctccctgctggagcaagaggcagagctgtgggcggtggagtctagacttccccaaggcgtgtacccagagattaagggacatttccagtttttgcttctttcagacttggaaactagacccaaagtcaaactgtcagttctaaagcaaggcatctctgaagaaatatccaacagtgtcatcttggtagaaagattcctgtgggatggtctgtggtactgcaggggtgaggacactgagggccactgggaatggagttgtgagagtctagagagcctggcagtgccggtggccttcacgcctgtgaagacgcctgttctggagcagtggcagaggaatgggtttggggaaaacataagtctgaaccctgatctcccacatcaaccaatgactcctgaaagacaaagcccccacacatggggaacacgtggaaaaagggagaagccagacctaaatgttttacagaaaacctgtgtaaaagagaaaccctacaaatgtcaggaatgcggaaaggcctttagtcacagctcagcacttatcgaacaccaccggacgcacacaggagagagaccttacgaatgtcacgaatgcttaaaaggcttccggaacagctcggcacttaccaaacaccagagaatccatactggggagaaaccctataaatgcactcagtgtgggaggaccttcaaccaaattgccccactgatccagcaccagagaactcacacaggtgagaagccctatgaatgcagcgaatgtgggaaatccttcagttttaggtcctccttcagccagcacgagcgaactcacacaggcgagaagccctacgagtgcagtgagtgtgggaaagccttccggcaaagcatccacctcacccagcatctgcgaatccacactggggagaaaccctatcagtgtggtgagtgtggcaaggccttcagccacagctcatccttgaccaaacaccagcgaatccacacaggggagaagccctacgagtgccatgagtgtggaaaagccttcacccagatcacaccactgattcagcaccagaggacccacacaggagaaaagccctatgagtgtggtgagtgtgggaaagccttcagtcagagcacactcctgaccgagcatcggaggattcacacaggagagaagccctatggatgcaacgagtgtgggaaaaccttcagccacagctcctcactcagccagcatgagcggacacacacaggagagaagccctatgagtgcagtcagtgtgggaaggccttccggcagagcacacacctcacccaacaccagcgaatccacacaggggagaagccctatgaatgcaatgactgcggcaaggcattcagtcacagctcgtccctcaccaaacatcagcgaatccacactggggagaagccctacgaatgcaaccagtgtggcagagccttcagccagcttgctcccctcattcagcatcagaggatccacacaggagagaaaccctatgaatgtaaccagtgtggcagagccttcagccagagctcccttctcatcgaacaccagaggattcacaccaaggaaaagccgtatgggtgcaatgagtgtgggaaatccttcagccacagctcctcgctcagccagcacgaaaggacgcacactggggaaaagccctatgagtgtcacgattgcggaaagtcctttaggcagagcacccacctcactcagcaccggaggatccacacaggagagaagccatatgcatgcagggactgtggaaaggcctttacccacagctcctcccttaccaagcaccagagaactcacactggataaacccactccacatgtgctggggacataggaagaccttaagccatagctcatccctttctagatttgacccaatcatacacatgagaaacgtacattcatacacaagccttttcacacagcactcccctcagacaccctcagagagttcacactgatgggaaatgaccatgggaccaccaagctctaggtcatccatctctgcatccaaatagtagggaaacgtggagataatcaacactcaggaccttcagccttgaacgcccattagtgctatgttatagaacctacaaaaaagaaatggaacaaatgtagtggatccagggaacgcttttgtccaaggattcaccgtattccaaaccagagatgttcaaattggtgagaaacccaacaaatgcctttcatatatacgagaaccaaatgaagtcagaatttgccattattgcacatcacatttttgggggggaaagtgcttatgaatggtgcaggttgactctgatattcattcccaaatgacagtatggcagagtgttccagaaatgagagtggcatctttatggaatcactgtggatactgactgtctcagtaaacagctgtcttgtctgtgtgtatattgtttgatcagggtacatggcagccagtcacagattggaattacatatgacaaagtatcagtgtactataaacaggtttttagttatccctgcattatttttgcaattaatctttatatgcaatgagattgaaaagctttgtatgggaagactcaaaatgtaaagctgcttccgtagagtctcactgattctgagatggcttttgctgctctgttctccctctacatttctctgcagaactcgcgttagaaacacagatatttgttttacaaaaagggagatttttcctttgttaaaccatcgtcttataagcaatagcaaattcatgttagaaacttctgttttgcaagattcatcttttttgggatatgttcaagttaatcctctcaaactgctttttcattgttttcatacaatttaacattttgttaaaccctaagtccacaaatagcagtctttctgacaactataacctttaaatggtgacttgctgccctcattagaaattgcattggctggccaggcgcggtgacttatgcctgtaatcccagcactttgggaggccaaggtgggaggatcacctgaggtcgggagatggaggttgcagtgagctgagatcgtaccattgcactccagcctgggcaacaagagtgaaactctgtctcagaaaaaaaaaaaaaaa

SEQ ID NO: 2042 - DNA, 2501 bp, Homo Sapiens
  NM_003438
tggagagaaccttacacatttcacgagtatggaaagacctttgctcaaaattcagcccttgtaatgcataaggcaattcatactggaaagaaaccttacacatgtaatgaatgtggcaaggtttttagtagaaaagcacaccttgcatgtcatcatagacttcatactgtctaaggtttctaatcaacaatcaaaccttgcacaacatcagagagtttatactggagagaaaccttacaagtgtaatgagtggggcaaagccttaagtgggaagtcgtcacttttttatcatcaagcaatccatggtgtagggaaactttgcaaatgtaatgattgtcacaaagtcttcagtaatgctacaaccattgcaaatcactggagaatccataatgaagacagatcttacaagtgtaataaatgtggtaaaattttcagacatcgatcatatcttgcagtttatcagcgaactcatactggagagaaaccttacaaatatcatgactgtggcaaggtcttcagtcaagcttcatcctatgcaaaacataggagaattcatacaggagagaaacctcacaagtgtgatgattgtggcaaagtcttgacttcacgttcacacctcattagacatcagagaatccatactggacagaaatcttacaaatgtcttaagtgtggcaaggtcttcagtctgtgggcactccatgcagaacatcagaaaattcatttttgagataactgttccaaatacagtgactatagaagatcataaagctttaattgacattagagccaaataggcattgacttgagattgagttgacttaaccttgagtttaagaattaatttacattaaagtgtttatgttaagaagattgggccaggtgggattacaggcgcgagccaccgcgcccggcccctaagttaatatttcaaacaatcgaaggtaaaacaacatattgtgttgggccacctgtactgaacgctgaatcgtttttcctcttaagttgaaaatggttttaatgcaaagcgccttttttgagcaggtagagtcacgcatccggcaggcggggcgagctcccctctgtctggggcagggtgggggagaggggcagggacctcggtaaaggggtggagtggcgcgctggttgccgcgggcactggcaattagaagggattattaaactaagcaaggtcctgggttgtttgagtggataatggaaactgaaaggtgacgtgcaaaactgcctattactcccaggagtggaggataatttcatatttcatggaaataaactcagggcccggagcggtggctcacacctgtaatcccagcactttgagaggccaaggagggaggatcgcttaagcccaggaattcgaaatcagcctaggcaacatagtaagacctcatctctactaaaaataaaaaaaaacagccaggtgtgttagtccacacctgtggtcccagctgcttgggcttcccgagtagctgggattacaggtatgaaccactatgcccggctaactttgttttttttttttagaaattaaaccttttttcagcttaatgacccaggggtgtatttttgaaggacttgggagctctctttgaaaggcaaacaacaagggaaacagtacctttatctcagtaggaaattaaataattcaaacatcaaataacttcaatttaaggctatggactttgagataattctgagccttgagaggaatgtggtcaggcaacctgagtccagtggaatgcaggtgcaacttctaagagttttcctgtaagtaattaagaagactaagtagccccagagataagacctcctcggatcattgtcccttcttatgtagtgataaagtaaccttccttgaagtgtatctatccgtaatcaatcaagttgctgcagcctatgcactggcccagaataaaaaacgtggtgattctgctaaagcttctctgtctttccctgtgtgtgaaatcttaacgtctctacttgggaacgctgatcccattcatttagagttgatgtttccacgtggctatttccaagctttgccttcaaataaattctgtacttaatcatatattctaaattttattatttactgctgacatcagtttctgtcggattgtaggagcctcaccagagagggcccctgtcgccatgttgtaaaactcacacttgccaaaagttgtgggttagggtttctccccctccctcaggatgacgctagttagctgacacagatggtcacctccattaccaagtagagtcaggatgaactatgtgtgactgttcaactatgtgtcctcttccctgaggactgattagtgtttatcttgaaaacatgtccttaatgggttgtatagaacactgaagcatctgatttcaaactcttagctcttttcctctatttcccatcacattctggtctaaggcttatttattaataaaatgatttttatttctttattaaaaaaaaaaaaaaaaaa

SEQ ID NO: 2043 - DNA, 2767 bp, Homo Sapiens
  NM_003443
atgcgccggaagttgcagccgggaagcctgcgaggtcggttccgcccgactctaacatggcggcgccctttgtctgctctggagtgccgtccccggccttctcgcggccgtgatgcacctccctctgcggtggggtccgggacatggcaggtaatgagccggacgaggggagccaagctggagtttacacaggcaaactgtcagaaaagagtagcctgggctgtctggaaatctgagccatggactttccccagcacagccagcatgtcttggaacagctgaaccagcagcggcagctggggcttctctgtgactgcacctttgtggtggacggtgttcactttaaggctcataaagcagtgctggcggcctgcagcgagtacttcaagatgctcttcgtggaccagaaggacgtggtgcacctggacatcagtaacgcggcaggcctggggcaggtgctggagtttatgtacacggccaagctgagcctgagccctgagaacgtggatgatgtgctggccgtggccactttcctccaaatgcaggacatcatcacggcctgccatgccctcaagtcacttgctgagccggctaccagccctgggggaaatgcggaggccttggccacagaaggaggggacaagagagccaaagaggagaaggtggccaccagcacgctgagcaggctggagcaggcaggacgcagcacacccataggccccagcagggacctcaaggaggagcgcggcggtcaggcccagagtgcggccagcggtgcagagcagacagagaaagccgatgcgccccgggagccgccgcctgtggagctcaagccagaccccacgagtggcatggctgctgcagaagctgaggccgctttgtccgagagctcggagcaagaaatggaggtggagcccgcccggaaaggggaagaggagcaaaaggagcaagaggagcaagaggaggagggcgcagggccagctgaggtcaaggaggagggttcccagctggagaacggagaggcccccgaggagaacgagaatgaggagtcagcgggcacagactcggggcaggagctcggctccgaggcccggggcctgcgctcaggcacctacggcgaccgcacggagtccaaggcctacggctccgtcatccacaagtgcgaggactgtgggaaggagttcacgcacacggggaacttcaagcggcacatccgcatccacacgggggagaagcccttctcgtgccgggagtgcagcaaggccttttccgacccggccgcgtgcaaggcccatgagaagacgcacagccctctgaagccctacggctgcgaggagtgcgggaagagctaccgcctcatcagcctgctgaacctgcacaagaagcggcactcgggcgaggcgcgctaccgctgcgaggactgcggcaagctcttcaccacctcgggcaacctcaagcgccaccagctggtgcacagcggcgagaagccctaccagtgcgactactgcggccgctccttctccgaccccacttccaagatgcgccacctggagacccacgacacggacaaggagcacaagtgcccacactgcgacaagaagttcaaccaggtagggaacctgaaggcccacctgaagatccacatcgctgacgggcccctcaagtgccgagagtgtgggaagcagttcaccacctcagggaacctgaagcggcaccttcggatccacagcggggagaagccctacgtgtgcatccactgccagcgacagtttgcagaccccggcgctctgcagcggcacgtccgcattcacacaggtgagaagccatgccagtgtgtgatgtgcggtaaggccttcacccaggccagctccctcatcgcccacgtgcgccagcacaccggggagaagccctacgtctgcgagcgctgcggcaagagattcgtccagtccagccagttggccaatcatattcgccaccacgacaacatccgcccacacaagtgcagcgtgtgcagcaaggccttcgtgaacgtgggggacctgtccaagcacatcatcattcacactggagagaagccttacctgtgtgataagtgtgggcgtggcttcaaccgggtagacaacctgcgctcccacgtgaagaccgtgcaccagggcaaggcaggcatcaagatcctggagcccgaggagggcagtgaggtcagcgtggtcactgtggatgacatggtcacgctggctaccgaggcactggcagcgacagccgtcactcagctcacagtggtgccggtgggagctgcagtgacagccgatgagacggaagtcctgaaggccgagatcagcaaagctgtgaagcaagtgcaggaagaagaccccaacactcacatcctctacgcctgtgactcctgtggggacaagtttctggatgccaacagcctggctcagcatgtgcgaatccacacagcccaggcactggtcatgttccagacagacgcggacttctatcagcagtatgggccaggtggcacgtggcctgccgggcaggtgctgcaggctggggagctggtcttccgccctcgcgacggggctgagggccagcccgcactggcagagacctcccctacagctcctgaatgtcccccgcctgccgagtgagctggcggcccttctgactgtttatttaaggatggatggcaccctggaaccgggaagggtggcctgttccctagagagaataaattggattattttctaaaaaaaaaaaaaaaaaa

SEQ ID NO: 2044 - DNA, 2569 bp, Homo Sapiens
  NM_003444
atttttagcttctctgaggtgtgttcaccggatcagagatagcagagcgccgagttggggccacgaaggcgtgaggggagtcgtcgtccctcctgcacgaaagcgtctaagccttggcgacgccgccctgggggacccacgtcaggcctgggatagggaccgctgtccccgggtccctaccaatgtcgcccgtcgctcccggcccagctctacccgcagagtctgatggcagtggccactctgaggacgccaactcagggcactgtgacctttgaagatgtggccgtacacttctcctgggaggaatggggtctccttgatgaggctcaaagatgcctgtaccgtgatgtgatgctggagaacttggctcttttaacctctctagatgttcatcatcagaagcagcaccttggagaaaaacatttcagaagcaatgtgggcagagccttgtttgtgaagacctgcacattccatgtgtcaggggagccttccacctgcagagaagttgggaaggacttcctggccaagttgggatttctccatcaacaggctgctcacactggggagcaatcaaatagcaaaagcgacggtggggccatcagtcacagaggaaaaactcattacaactgtggagaacacacaaaagcattcagcggtaaacacacacttgttcagcagcagagaaccctcactacagaaagatgttacatatgcagtgaatgtgggaaatcctttagcaaaagctacagtctcaatgaccattggagacttcacactggagaaaagccttatgaatgtcgagagtgtgggaagtcctttaggcaaagctctagtctcattcagcaccggagagttcacactgcagtacgacctcatgaatgtgatgaatgtggaaaattatttagcaacaagtctaacctcattaaacatcggagagttcacactggggaaaggccatatgagtgcagtgaatgtgggaaatcctttagccaaaggtctgcactccttcaacatcggggagttcacactggggagaggccttatgagtgcagtgaatgtgggaagttttttacatatcattccagtctcataaaacaccagaaagttcacattggatccaggccttatgagtgcagcgaatgtgggaagtcatttagccaaaactctagcctcattgaacaccatagggttcacactggagaaaggccttataagtgcagcgaatgtgggaaatcctttagccaaaggtctgcactccttcaacatcggggagttcacactggggagaggccttatgagtgcagtgaatgtgggaagttctttccctacagctccagtctccgaaaacaccagagagttcacactggatcaagaccctatgagtgcagtgaatgtgggaaatcctttactcaaaattccggcctcattaagcacaggagggttcacactggggagaagccttatgagtgcacggaatgtgggaaatcctttagccataactccagccttattaaacatcagagaattcatagtcgataaaagccttatgagtggcaaatgtggaaaatctgttagcaccctggagaaagtccttgagtacacagtgaatgtcagaaagcttcagctgaaggccatatctcattgagtgccacacagttcacaagggaaagacacttttgatatgtagggatgtccagttgatataacagctctgaaggagatcccttatgagggtggcatcagcctgaattgaacatcctatatctgaacatctgcataaattccaggtatgtgtgaactgcattgcaccttttgccctgcccagggcccatgtcagatttatgtctctgctgatactatagtgtaagccattttacctctactgcctggcaggtgaccaccagtgtgcaccactcacccatcccagtgtattcaggccatggacctgacccagtttggcccagaggactctgctggtgacctgaaaagagggactacatatttcaggatattgttggtctcacatgactcttgatagagtttgccagccttcaaatcaccaactgtgggaaccaactgcctcttattgccttgctgtgttcaattacaaaaaaagatggaaaagactgttatgaagccagatgaacctttctccagtcttccttcactatttttttttccttcaccatttatcatttcatagtcatttatgtttcatcggtcctcatgtgtactagtgcgttattttacttatactcccggatatcatattatttaatgcatagcctcttcagaatgcaattttaaaatgtaaaggctcttttataaccccccaaaaaatcacacaaatatattttaaaatgtaaatattttatcgcttctgttttctcagttgtctaaaacaatgtgtttcttaaggaagatcatttttattcaggatccaaatgtatatttaatagctttcagtagttgtatctcataagtctgtaacctacaggttccatttacctttgttttcttatttcttgaagttgctgagtcattttttaattagaatttgctgtattct

SEQ ID NO: 2045 - DNA, 3499 bp, Homo Sapiens
  NM_003449
cgggacccggaacagaccgccgtgagagaggaggggtgccggccgggattcgcggcccggagctcgggaccggagtcaggaatggagagaagggtaatggttttacctcttattgtggaaacctgttgagatcacagagaatatactgacggcataaaagggcagaaccatagcagggtgcggttgcttcattccagcctcgcagtcacctctgtgccctgctggttgtcttcccagcgctgctgtagttgccttccatggatctataggagagcaagtcctccaggagctggtggtgtctgtcgattgactgagtgctggagctggcagccctgtgcaggctgccacctttgcccctttactgtgcttgctcctgactctatgtcgcgtctccaaggagaagaagtcctcaccagtgaacggagacctctctgaactaaggataccatggccacgtcagccccactacggagcctggaagaggaggtgacctgctccatctgtcttgattacctgcgggaccctgtgaccattgactgtggccacgtcttctgccgcagctgcaccacagacgtccgccccatctcagggagccgccccgtctgcccactctgcaagaagccttttaagaaggagaacatccgacccgtgtggcaactggccagcctggtggagaacattgagcggctgaaggtggacaagggcaggcagccgggagaggtgacccgggagcagcaggatgcaaagttgtgcgagcgacaccgagagaagctgcactactactgtgaggacgacgggaagctgctgtgcgtgatgtgccgggagtcccgggagcacaggccccacacggccgtcctcatggagaaggccgcccagccccacagggaaaaaatcctgaaccacctgagtaccctaaggagggacagagacaaaattcagggcttccaggcaaagggagaagctgatatcctggccgcgctgaagaagctccaggaccagaggcagtacattgtggctgagtttgagcagggtcatcagttcctgagggagcgggaggaacacctgctggaacagctggcgaagctggagcaggagctcacggagggcagggagaagttcaagagccggggcgtcggggagcttgcccggctggccctggtcatctccgaactggagggcaaggcgcagcagccagctgcagagctcatgcaggacacgagagacttcctaaacaggtatccacggaagaagttctgggttgggaaacccattgctcgagtggttaaaaaaaagaccggagaattctcagataaactcctctctctgcaacgaggcctgagggaattccaggggaagctgctgagagacttggaatataagacagtgagcgtcaccctggacccacagtcggccagtgggtacctgcagctgtcagaggactggaagtgcgtgacctacaccagcctgtacaagagtgcctacctgcacccccagcagtttgactgtgagcctggggtgctaggcagcaagggcttcacctggggcaaggtctactgggaagtggaagtggagagggagggctggtctgaggatgaagaagagggggatgaggaggaagagggagaagaggaggaggaggaagaggaggccggctatggggatggatatgacgactgggaaacggacgaagatgaggaatcgttgggcgatgaagaggaagaagaggaggaggaagaggaggaagttctggaaagctgcatggtgggggtggctagagactctgtgaagaggaagggagacctctccctgcggccagaggatggcgtgtgggcgctgcgcctctcctcctccggcatctgggccaacaccagccccgaggctgagcttttcccagcactgcggccccggagagtgggcatcgccctggattatgaagggggcaccgtgactttcaccaacgcagagtcacaggaactcatctacaccttcactgccaccttcacccggcgcctggtccccttcctgtggctcaagtggccaggaacacgcctcctgctaagaccctgagccctgacatctgcccccagccccaaccctcagatgcttcacttctttggaattccaggactctcaatggggggacgggatgcctggcctaagcacctggagcaggggaccccatatccactggtagccacctccccattgctgtggccccctgaaatctcactcagtgctgttgctccatctactgccctaatggggctcttttcccacctcctgctggtttcccgagggaacttctgaccctggagtccatgagggctcctttcctttttgaccacgaccttggccccagctctgcactctctggaataagggcccgatgcagcattttcttgcccagtgtggcaagacctcagaaaaaccagtcaattacgcctaagatcattttgctgtccttaaaccccccaggttccttcttgcacaaatccactctgctgcccaccttccctggcattttaaacagacctaccccaccccaactcagagttaagcatacatggcaatgctgaaaataaacaaaatccactgaggcttcccaggccatttaaagcctggagtaccagcgcatatcatctcatggggtccagagtggagtccaggcttctctgaaaccagggctgagcatatttccatagccaaggaggtgggactccctggagctatctgtggtcttagggaaggatccagacatacacggctttggggtacaagctgtgatcactgatcaataaattatctctagattggtccttgtgaggggagttttaagaatccagaacatcttgctcttgatcagcacatccaaaaacaccaagacaaacatccagtggagcagaacctctcctgcctcgggagttctgaccgggttccccagcagggtgttaagcctctgtctctggccctaccagcatccaggttccactttcctaggagagagtggagatgggaagacagggaaaggaaggcagcaggaggccacaagcccaccaggtcttcatgtcaagagagggagtaacatgtcttctcattgcccacggacccaacctctgtccaggtgcccctcatcatcacagtttaacacaagctcccctgctccagccaaattgatctcccagtcttgtccttacccattccaagtgctctgccagcccctgttcatccaagttttaagtcctccaccctgttctaagagactgttccaacggctctgggcctcagtggtcacttgaccaccattgtctcagagctgcccactttgtgtgtgtcacatgctgcctgagtcacatgtacatcttatttctgcctctagttttgtaagctcctggagggcggataacatcttatactactcttgtattctcatggcacctagtgcagtgctgggcacagagtaggtgctcaataaagacttgttgaatgaaaaaaaaaaaaa

SEQ ID NO: 2046 - DNA, 2498 bp, Homo Sapiens
  NM_003450
agcgagtggcatcggccccgcccccagcccgtgctcgccggtgtcgggtcctaagtccctcggtcttgggttcccggagaggtgagtcggctgcaggtgggtgcggggcgccgggctgttcggggtaccggtgtcgcagtcgccagtccgagctcacaccgggcgtggagttcagctgcgcatcgggttgcggcagcttcgccaggcctggggctggctgggccgcggggccgccctggaggccggagccactgggcctgcggcgcctcggcagcgagcagccgctttgctcgcgtgcaggaggctgttcgctacctcacacccccggctggcgctgtggcctcgcttagctctaccgtttagcacccggcgacatgcacccggtcggtttccgccaggatgcgggagagttggggcaagctacctgcgacagcttgaacttttcctagggattccgctccacccgccggttagagcgtattgctcattaaatccgagacctgtgtgcttgctactgaaataaaagaagtattttttccccagagtccttttaggacgttatgacttttctcctttgcaagactgcaaaaaactgacaagaagacaaaactcttcccactcccagggaccgcgttgtcttgagtttggctagtaaaggctagcaagtgaggctttgtctctgcatcccgttccccctaacatcctcagagaaccttcgtttctagaatctttctagtattcagagacttctccagggtcatgatcccaaaggcttaacccgtttacaaggagagagttgtctcctgacgcccaaaatggcagctaaaatggagataactttaagctccaacactgaagcttcctccaagcaagagagacacataatagccaaactagaagagaaacggggccctcctctgcaaaaaaactgcccagatcctgagctctgccgccagagcttcagacgcttttgttatcaagaggtgtctggaccccaagaggctctctcccagctccgacagctctgccgtcagtggttgcaacccgagctgcacaccaaggagcagattttggagcttctggtgatggagcagttcctgaccatcctgcccccggagatccaggctcgggtcaggcatcgatgtccaatgagcagcaaggagattgtgaccctcgtggaagattttcacagagcatccaagaaaccaaagcagtgggtggccgtttgtatgcaggggcaaaaggtgctcttggagaaaactggatctcagcttggagaacaggaactgccagactttcaaccgcagactcctaggagagatctcagggagagctctccagcagagccttcccaggcaggagcttatgaccggctgagcccccatcattgggagaaatccccactcctccaagaaccaacccccaaattggctgggacagaggcccccagaatgagaagtgacaacaaggaaaatccacaacaggaaggggctaaaggagcaaagccatgtgcagtgtcagctggcagatccaaagggaatggtctgcagaatcctgaaccaagaggggcaaatatgagtgaacctcggttgtcacggaggcaggtcagctccccaaatgctcaaaagccatttgctcactaccagagacattgcagggtggaatacatcagcagccccctaaaaagccacccactgagagagctaaagaaaagcaaaggaggtaaacggagtctgagcaaccgtttgcaacatcttggtcaccagcccacccgctcagcaaagaaaccctacaaatgtgatgactgtgggaaaagcttcacgtggaattcagagctgaagagacacaagagagtccacacaggagagagaccctacacgtgcggagagtgtggaaactgctttgggcggcagtcaaccctgaagctgcaccagaggatccacactggagagaagccataccagtgtggccagtgtgggaaaagctttcgccagagctcaaaccttcaccagcatcaccgacttcaccatggggactaaaaggagcactccatgctttagattcacacggaaggtgtttgtgtttctcctcccccttacttgcatgtaaatcacaaaaactgtgtgacttacaaggaaagcacgaggcccttgaggaatgatgatgcacattctgctgtgaggaggcccagaaaaggccaaccagggcccaaccgtgcatgatgacagggtgaagagaaggcaggtctgggcactggggcaaagagaacttaagtctctgcagagagcaaggagtaactactgagagagaatcaggacaatcctgcaggtggcccgcttactgttaaatcgtccctctgttgctttatcctctaaaatatgttaagggataaattctatatatatagttatgcatttgctgtcataccagacaattttttatcatgagcacacttctttaataaagatgagtgatctaccagaaaaaaaaaaaaaaaa

SEQ ID NO: 2047 - DNA, 2274 bp, Homo Sapiens
  NM_003451
cgccatctcccatagctgtcgcctgcagctgagaaagggttgctgtcccagcaggccaggtccagggctgggtataagtaagcaagaagagggcctgggagaagagtctgacgagcaaggggaaggtagccaaggatggagtgaaatacagggtgacctgtgtttttcccctggctgctttggaaattatgggaaaaaatcaaataccaaggaagaaaaatctataatgaaattagatgtggatttctttttatgtattcagcttgggggcttatgatacttctagtacccaaagagatgcggtcttgctgtgttgcctaggctggtctcaaactcctgctctcaagtgatcctcctgcctcagcctcctgagtacatttatatttaaagtaattattgatggctctgcctgcttaggactctgcccagccaggaaggaaacctacaggaggaagaatggctgcagggtggctgacaacctggtcacagaactcagtaaccttccaggaagtggcagtggacttttcccaggaggagtgggcattgctggaccctgctcaaaaaaatctatacaaagatgtgatgctggagaactttaggaacctggcctcagtagggtatcagctctgcagacacagtctgatctccaaggtggatcaagaacagctgaagacagatgaaagaggaattttacaaggtgactgtgcagactgggaaactcaacttaaaccaaaagatacaattgctatgcagaacattcctgggggaaaaacatccaatggcataaacacgaactgtgtcagaactcactctggagagatgccctatgaatgcagtgactgtgggaaagccttcatttttcagtcttcccttaagaaacacatgagatctcatactggagagaagccttatgagtgtgatcactgtggaaaatcctttagccagagctctcatctgaatgtgcacaaaagaactcacactggagagaaaccctatgactgtaaggaatgtgggaaggctttcactgttccttcatcccttcagaaacatgtgagaacccacactggagagaaaccctatgaatgcagtgactgtggaaaagccttcatcgatcagtcatcccttaagaaacacacacgctctcacactggagagaagccttatgagtgtaaccagtgtggaaagtccttcagcacaggctcttaccttattgtgcacaagagaactcacactggtgagaaaacctatgagtgtaaagaatgtgggaaggcctttaggaattcctcttgcctgagggtacacgtgagaactcacactggagagaagccttataaatgtattcagtgtgaaaaagcctttagcacaagcactaaccttataatgcacaagcgaatccacaatggccagaaactccatgaatgaaatgactcagggaagtgtttgttgcccctcatgcctcctttctcactttagaacatatattggagagaagccctgttatggtcacctggaaacagccttctggcccaactctggatgcctgttatactgggacaaaccttataaatgttatagctatgattgtttttatcagtgagtatttcattcttatatgtgtcacaactgtagatcctatgaatattttagttatcttttcagtttaattgcattgtgaacagaacacatggtcttcaatatgtagattctgtgtgacatagatttgaacataattgctggacactgactgatgtactgtggcagacagaactagttgctgtctcaatatccattcctcccttctttcttaaagtaataaaatttaccatttagttcaagctggcaatgtggacagttttcacccagcttcccttacagctgtgagcggccaaatatgttcacatccctagcccatgcaaagtaggcagaagtcactggatacagctgctaaggaagctcatggaaatgggaatatctcatctggtgtttttttcttaactatttgccctttgtcttgtcccttatttcctagaaaatatatacaccaagaggaggacagagaaaggatactaaatgaaacaacaggggagatacaatattatctggttgcactaatcctgtgctgcttatctctggatttcatgttacatgagaaaaattaactgccatgtggtttaaaccactcttgtgggaagttcctctttcagctgatttcagtcccaactgttacatctaataaatggtcaagttttaggaatcgttcaaaaaaaaaaaaaa

SEQ ID NO: 2048 - DNA, 3186 bp, Homo Sapiens
  NM_003452
ggaactggcagcggggaggaggctctagcgaggcctgaaaggctgcgtaaccaggcaggagtaggggttggggttcggggttgggggacagccagggatcgcgtctgatatgctgttggggtcgtgaccgtctgggggccgaggcaggcactggccagacccagccagggatcctcgtattcgtcgagcctaatttccagcagccgggtaggcctcaccagaggctcctttccgtgaggccgcccccaattcctgcccctattctctgcctgggagatggcttccccgagccccccgccggagtcgaaggggttgctgacatttgaggatgtggctgtgttttttacccaggaggagtgggattatctggacccagctcagagaagcctgtataaagatgtcatgatggagaattatggaaacctggtctcactggatgttttgaacagagataaggatgaggagccaactgtaaaacaagagattgaagaaattgaggaagaagtggaaccacagggtgtaatagttacaagaatcaaaagtgaaattgaccaggatcctatgggtagagaaacatttgaacttgttggtaggttagataaacaaagagggatcttcctatgggaaataccaagggaatctttgacccaggaacagagaatgttcagagaaaacactaacattatccgtaaaagaccaaactcagaagagaaatgccataaatgtgaagaatgtggaaagggttttgtccgcaaggcccatttcattcaacatcaaagggtccatactggtgagaaaccttttcagtgcaatgaatgtgggaaaagttttagtcgcagttcatttgttattgaacatcagagaattcacactggggaaaggccctatgagtgtaattactgtggaaaaacctttagtgtgagctcaacccttattagacatcagagaatccacactggagaaagaccctatcagtgtaatcagtgtaaacagagcttcagccagagaaggagccttgttaaacatcaaaggattcatacaggtgagaaaccccataaatgtagtgactgtgggaaagccttcagttggaaatcacaccttattgagcatcaaagaactcacactggtgagaaaccttatcactgtaccaaatgtaagaagagctttagtcgaaattcattgcttgttgagcatcaaagaattcacactggggaaagaccccataaatgtggtgaatgtgggaaagcctttcgattaagcacataccttatacaacaccaaaaaattcacactggcgagaagccttttctttgtattgagtgtggaaaaagtttcagtcggagctcattccttattgaacatcagaggatccatactggtgaaagaccttatcagtgcaaagagtgtgggaaaagtttcagtcagctttgcaaccttactcgtcatcagagaattcacacaggagacaagccccataaatgtgaggaatgtggaaaagcctttagtagaagctcaggtcttattcagcatcagagaattcacaccagggagaagacttatccatacaatgaaactaaggaaagttttgatccaaattgcagtcttgttatacagcaggaagtctaccctaaggagaaatcttataaatgtgatgaatgtgggaaaacttttagtgttagtgctcatcttgtacaacatcaaagaatccacactggtgaaaagccctatctatgtactgtctgtgggaaaagcttcagccggagctcatttcttattgaacatcagagaatccacactggtgagagaccctatctgtgcagacagtgtggaaaaagctttagtcagctttgtaatcttattcgacatcagggtgttcacacaggtaataaaccccataaatgtgatgaatgtggaaaggcctttagccggaactcgggtcttattcagcatcagagaatacacacaggagagaaaccttataagtgtgagaagtgcgacaaaagtttcagtcaacagcgcagtcttgtcaaccatcagaagatccatgcagaggtgaaaacccaagaaacccatgaatgtgacgcttgtggtgaagcctttaattgccgtatttctcttattcagcatcagaaattgcacacagcatggatgcaataaatgtagagcaatacataagctcaatttgatttgagactagtacccaagtgcagttttagtatggctcaacatgggtcagatttagtgataaagcaaattctccttggcctcaggcaaatagtttctaaagattctgtgaatagtggacaactgcccatgagcatttgacttcccttactctttgatgatcgtagagaaagacttggtaatttatctaagtatctttaataaatctttcagcagagagattaaacctaggttcagagcatgggtgctctgagggacaaagttggattagtataagggagctggagcagctgatagtggaaaacagaataatgattcaaagagtcttctgtcaccatgtcatattgtggttctttcagttccatgatatgtttggctctgcatgccaaagtccagtgattaagcatatataagttgtcaaggaaacaaagcccaaatgtttttaaaacaagtatacagtttttgtcattgtttaagaaagccagttgtttggcatgtgagttaaaggcagttccaatgcctgatggttcccagatctatgaaatgagtggaccattaaccttacatgtaaagattatgttagtaattaagaaacctaacaaaggtgttaccaaggaacctttgggagtgccttttttgtttttcaagatggacccaaaaaagtggaggaagatattgttcttttgtgccctcctacctgtgagagatatttgtagtcctatgtgaatgagcttatccctccacaaccaggtgcatatgaaagtgtacatattatgactgccaagtattggaaatgaaaagacctggagtctatgctaggaagctgagatattttggtattgcattggtttttatggtaactaggttttgcatgcaattaaaaatccttatttcttgttctagggcttcccttagttaatggttattataaacctattaattcatctgttttaaccattaaaacctgttttgtttttagctttgaaaaaaaaaaaaaaaaaa

SEQ ID NO: 2049 - DNA, 4055 bp, Homo Sapiens
  NM_003455
ccgacccgctaggccccgcgcggctcggatccggcggcgctgtttcggtcgggagtgggtgggagagaagccggggcaggggaggagccgccggagctgtcggagccgtgacacccagggcagctacactcagaagccacaaggaatgctagtggagcccctcatccctcccagcttctcttccaagctgccccgtggggcttgatccaggaagctacttcagaaagtagacaatcattccaagggtacaacaaggtttaccacaatgtgagggactcagccattgcaaattgtacagatgagggcccttggaagaaaatcctcgctgtgtccaggctgaggcggggggctaatgacagtgtgagctctagatggtgtgagaccaccccaaagccaagaaatggctacagccgtggaaccagaggaccaggatctttgggaagaagagggaattctgatggtgaaactggaagatgatttcacctgtcggccagagtctgtcttacagagggatgacccggtgctggaaacctcccaccagaacttccgacgcttccgctaccaggaggcagcaagccctagagaagctctcatcagactccgagaactttgtcaccagtggctgagaccagagaggcggacaaaggagcagatcctagagctgcttgtgctggaacaatttcttaccgtcctacctggagaactacagagctgggtgcggggccaacggccagaaagtggcgaggaggcagtgacgctggtggagggtttgcagaaacaacccaggagaccaaggcggtgggtgactgtccatgttcacggccaggaagtcctgtcagaggagacggtgcatttaggagtggagcctgagtcacctaatgagctgcaggatcctgtgcaaagctcgacccccgagcagtctcctgaggaaaccacacagagcccagatctgggggcaccggcagagcagcgtccacaccaggaagaggagctccagaccctgcaggagagcgaggtcccagtgcccgaggacccagaccttcctgcagagaggagctctggagactcagagatggttgctcttcttactgctctgtcacagggactggtaacgttcaaggatgtggccgtatgcttttcccaggaccagtggagtgatctggacccaacacagaaagagttctatggagaatatgtcttggaagaagactgtggaattgttgtctctctgtcatttccaatccccagacctgatgagatctcccaggttagagaggaagagccttgggtcccagatatccaagagcctcaggagactcaagagccagaaatcctgagttttacctacacaggagataggagtaaagatgaggaagagtgtctggagcaggaagatctgagtttggaggatatacacaggcctgttttgggagaaccagaaattcaccagactccagattgggaaatagtctttgaggacaatccaggtagacttaatgaaagaagatttggtactaatatttctcaagtgaatagttttgtgaaccttcgggaaactacacccgtccaccccctgttagggaggcatcatgactgttctgtgtgtggaaagagcttcacttgtaactcccaccttgttagacacctgaggactcacacaggagagaaaccctataaatgtatggaatgtggaaaaagttacacacgaagctcacatcttgccaggcaccaaaaggttcacaagatgaacgcgccttacaaatatcccctaaaccggaagaatttggaagagacctcccctgtgacacaggctgagagaactccatcagtggagaaaccctatagatgtgatgattgcggaaagcacttccgctggacttcagaccttgtcagacatcagaggacacatactggagaaaaacccttcttttgtactatttgtggcaaaagcttcagccagaaatctgtgttaacaacacaccaaagaatccacctgggaggcaaaccctacttgtgtggagagtgtggtgaggacttcagtgaacacaggcggtacctggcgcaccggaagacgcacgctgctgaggaactctacctctgcagcgagtgcgggcgctgcttcacccacagcgcagcgttcgccaagcacttgagaggacacgcctcagtgaggccctgccgatgcaacgaatgtgggaagagcttcagtcgcagggaccacctcgtcaggcatcagagaacacacactggggagaaaccattcacgtgccctacctgtggaaaaagcttcagcagaggatatcacttaattaggcatcagaggacccactcagaaaagacctcctagctaggtccccatgtgaggagatctgctttcagccctcacctaagggaggtgaggaagaggaaaagccctcttgtcagcctgggaagaccttttcgagggagtctccctgacctgctcagatctgacattacctcttcctgcaactaaacacgagcctgggcagaacctctcagccttcctctacgccttgaggggatgtttcatccaaagtacaacctgaattgaggcttctccttcactggagtgcacctgcctctacctcatgggtataaagtaggagaactaagagacttaagaggtcgtggttcctatatcgtccaaaaaataggctgttacatatcctaaagactgctcaacagcttcaagttgaaagtggccaaggacagccccttaggtttgggaagggacgagcctgaaggattctgtctttactggggtcaaatcttaaagcacacagctctggactcaagacaggaggtttgcgtcctgatggctttgccacacattcacaggataactgcatagatccctcgctgtctgattcacttcttaccatgcactttcctttgatgctgaggagaaatggaagtgggcgaaaaatctcaaggctgcttcatgtggaccttgtcaagctgctccctcccccagcgtcaaattgttatcaggtgccaaacactgctagaaaggagggcctagtcagaagcctctttccatacgagttttggttttgtttttaatatttttttctattaaaatactcatgcatttaaccttcccgttattcaaccagtctcttggttgcatccctagcacttctactacaagtgagatggtagtgtttgagtgcttattgagtaaagcataattcggtcataatgaaatcgttcacattccctcatatgcacaagcccaccaaccccttcacaccccccttcacaggggtcgtatgagtaaggggatttggaaactgtcaacttacaaaggcactataacaattacagaatcatgattgccatgggccactttatttacatgaagacaactggagaacgactaagaccaaattatggaaaataagaaaaagctgttgctggcaagaccatcaagactgttctgacaccctgtccccatcatccctgactgagtactctgacatcacggaaagtgttgaacctgggaccctgaggaattcaccaggagtaaatggctttcatgtatttgtgttgtttgctttttcttacgtgattttatgttcatagagctagaaagtagcatctcatgatggcccaacaatctctgttgccagttaaaggttccttggagatgaggctgaataattatgaacctcaccttctctgattgtgggagtggcaagaactggggagacgtcctccataagtggagcacagggtatggggttaaagcatgacagggagagtcttctgtgcctggtttcttctcctctatctcataatgcattatgggcccgaggaataggggagggttaataagactccaaccctaatggcccaacagggaaattctcattttggtcgatgatattctgatggactggtttggtcttaataccagtcaaccgttgtccttctggaaatatacatatatgaaataaataaaggtaacacttgcagccaagttccctggtttctgggacttcccatcttacccattccttttccagggcttc

SEQ ID NO: 2050 - DNA, 2325 bp, Homo Sapiens
  NM_003461
cccgccccctctcttctccctccctcctccttccgtgtgtccctccccgcccggctggaggctgctccggaccgggacgcagagtctgcggacccggcgccgaggcggccacccgagacgcggcgcgcacgctccggcctgcgcagcccggcccggccatggcggccccccgcccgtctcccgcgatctccgtttcggtctcggctccggctttttacgccccgcagaagaagttcggccctgtggtggccccaaagcccaaagtgaatcccttccggcccggggacagcgagcctcccccggcacccggggcccagcgcgcacagatgggccgggtgggcgagattcccccgccgcccccggaagactttcccctgcctccacctccccttgctggggatggcgacgatgcagagggtgctctgggaggtgccttcccgccgccccctcccccgatcgaggaatcatttccccctgcgcctctggaggaggagatcttcccttccccgccgcctcctccggaggaggagggagggcctgaggcccccataccgcccccaccacagcccagggagaaggtgagcagtattgatttggagatcgactctctgtcctcactgctggatgacatgaccaagaatgatcctttcaaagcccgggtgtcatctggatatgtgcccccaccagtggccactccattcagttccaagtccagtaccaagcctgcagccgggggcacagcacccctgcctccttggaagtccccttccagctcccagcctctgccccaggttccggctccggctcagagccagacacagttccatgttcagccccagccccagcccaagcctcaggtccaactccatgtccagtcccagacccagcctgtgtctttggctaacacccagccccgagggcccccagcctcatctccggctccagcccctaagttttctccagtgactcctaagtttactcctgtggcttccaagttcagtcctggagccccaggtggatctgggtcacaaccaaatcaaaaattggggcaccccgaagctctttctgctggcacaggctcccctcaacctcccagcttcacctatgcccagcagagggagaagccccgagtgcaggagaagcagcaccccgtgcccccaccggctcagaaccaaaaccaggtgcgctcccctggggccccagggcccctgactctgaaggaggtggaggagctggagcagctgacccagcagctaatgcaggacatggagcatcctcagaggcagaatgtggctgtcaacgaactctgcggccgatgccatcaacccctggcccgggcgcagccagccgtccgcgctctagggcagctgttccacatcgcctgcttcacctgccaccagtgtgcgcagcagctccagggccagcagttctacagtctggagggggcgccgtactgcgagggctgttacactgacaccctggagaagtgtaacacctgcggggagcccatcactgaccgcatgctgagggccacgggcaaggcctatcacccgcactgcttcacctgtgtggtctgcgcccgccccctggagggcacctccttcatcgtggaccaggccaaccggccccactgtgtccccgactaccacaagcagtacgccccgaggtgctccgtctgctctgagcccatcatgcctgagcctggccgagatgagactgtgcgagtggtcgccctggacaagaacttccacatgaagtgttacaagtgtgaggactgcgggaagcccctgtcgattgaggcagatgacaatggctgcttccccctggacggtcacgtgctctgtcggaagtgccacactgctagagcccagacctgagtgaggacaggccctcttcagaccgcagtccatgccccattgtggaccacccacactgagaccacctgcccccacctcagttattgttttgatgtctagcccctcccatttccaacccctccctagcatcccaggtgccctgacccaggacccaacatggtctagggatgcaggatccccgccctggggtctggtcctcgcccatcctgcagggattgcccaccgtcttccagacaccccacctgaggggggcaccaggtttagtgctgctgctttcactgctgcacccgcgccctcggccggccccccgagcagcctttgtactctgcttgcggagggctgggagaccctccaggacattcccaccctcccccatgctgccaagttgtagctatagctacaaataaaaaaaaaccttgttttccagaaaaaaaaaaaaaaaaaaaaa

SEQ ID NO: 2051 - DNA, 6584 bp, Homo Sapiens
  NM_003468
tgctgccatgtgccgctgccacgggtacccagcctgtcgctaaactttccgggcgccagcccggctctgagtcgcgcttctcagcggagtgacccagggacggaggacccaggctggctggggactgtctgctcttctcggcgggatccgtggagagtcctttccctggaatccgagccctaaccgtctctccccagccctatccggcgaggagcggagcgctgccagcggaggcagcgccttcccgaagcagtttatctttggacggttttctttaaaggaaaaagcaaccaacaggttgccagccccggcgccacacacgagacgccggagggagaagccccggcccggattcctctgcctgtgtgcgtccctcgcgggctgctggaggcgaggggagggagggggcgatggctcggcctgacccatccgcgccgccctcgctgttgctgctgctcctagcgcagctggtgggccgggcggccgccgcgtccaaggccccggtgtgccaggaaatcacggtgcccatgtgccgcggcatcggctacaacctgacgcacatgcccaaccagttcaaccacgacacgcaggacgaggcgggcctggaggtgcaccagttctggccgctggtggagatccaatgctcgccggacctgcgcttcttcctatgctctatgtacacgcccatctgtctgcccgactaccacaagccgctgccgccctgccgctcggtgtgcgagcgcgccaaggccggctgctcgccgctgatgcgccagtacggcttcgcctggcccgagcgcatgagctgcgaccgcctcccggtgctgggccgcgacgccgaggtcctctgcatggattacaaccgcagcgaggccaccacggcgccccccaggcctttcccagccaagcccacccttccaggcccgccaggggcgccggcctcggggggcgaatgccccgctgggggcccgttcgtgtgcaagtgtcgcgagcccttcgtgcccattctgaaggagtcacacccgctctacaacaaggtgcggacgggccaggtgcccaactgcgcggtaccctgctaccagccgtccttcagtgccgacgagcgcacgttcgccaccttctggataggcctgtggtcggtgctgtgcttcatctccacgtccaccacagtggccaccttcctcatcgacatggaacgcttccgctatcctgagcgccccatcatcttcctgtcagcctgctacctgtgcgtgtcgctgggcttcctggtgcgtctggtcgtgggccatgccagcgtggcctgcagccgcgagcacaaccacatccactacgagaccacgggccctgcactgtgcaccatcgtcttcctcctggtctacttcttcggcatggccagctccatctggtgggtcatcctgtcgctcacctggttcctggccgccggcatgaagtggggcaacgaggccatcgcgggctacgcgcagtacttccacctggctgcgtggctcatccccagcgtcaagtccatcacggcactggcgctgagctccgtggacggggacccagtggccggcatctgctacgtgggcaaccagaacctgaactcgctgcgcggcttcgtgctgggcccgctggtgctctacctgctggtgggcacgctcttcctgctggcgggcttcgtgtcgctcttccgcatccgcagcgtcatcaagcagggcggcaccaagacggacaagctggagaagctcatgatccgcatcggcatcttcacgctgctctacacggtccccgccagcattgtggtggcctgctacctgtacgagcagcactaccgcgagagctgggaggcggcgctcacctgcgcctgcccgggccacgacaccggccagccgcgcgccaagcccgagtactgggtgctcatgctcaagtacttcatgtgcctggtggtgggcatcacgtcgggcgtctggatctggtcgggcaagacggtggagtcgtggcggcgtttcaccagccgctgctgctgccgcccgcggcgcggccacaagagcgggggcgccatggccgcaggggactaccccgaggcgagcgccgcgctcacaggcaggaccgggccgccgggccccgccgccacctaccacaagcaggtgtccctgtcgcacgtgtaggaggctgccgccgagggactcggccggagagctgaggggaggggggcgttttgtttggtagttttgccaaggtcacttccgtttaccttcatggtgctgttgccccctcccgcggcgacttggagagagggaagaggggcgttttcgaggaagaacctgtcccaggtcttctccaaggggcccagctcacgtgtattctattttgcgtttcttactgccttctttatgggaaccctctttttaatttatatgtatttttcttaatttgtaactttgttgcattttggcaacaatttacctttgctttgggggctttacaatcctaaggttggcgttgtaatgaagttccacttggttcaggtttctttgaactgtgtggtctcaattgggaaaatatatttcctatacgtgtgtctttaaaaaaaaatgtgaacagtgaacgtttcggttgctgtgactgggaagttgttgggtgtgctttttcagccagcttctccttccactgcttaaagtgtccatgattctttaaggtgagctgcagtttatagccccaggtcatacctaggaggggagcataatgagctcagggcctccccaaagtgacaaggttagggagtgcttagcggttttgtgttcagccttagctttgtttatagagggaggttcagtttcttttctgtagtgcttgtaataattctcactcctaacagcaccatcgttgtgtcttgaataagttagaggtagcattatagaggatctggcataaatatttgcagtagtgagagcctaagcgatggtgattggtggagcttgaattttaggctggtgagatggcagctttgtgcctgagaggtagtgggtggttcttaagcttcagtgatcccctttttttttttttttttttttttttaaggaacttgtgttataattttggtaaaagtataaacccactccctctggacaatacttagcgacagttgctaaagggggctcctttttaaatgtaaggactgaaatggatatacttctaataagtaaatttccaacacttatttgctccaccccctcccccctcccccctccccctttatcatgttaaacagcctttttgcttttcttattcctcctctcctggagagctgtgattagaaaccacacccacccttgaatgaagtgcttgaactgggggagggaggctggctacctgtgaacaaacattggcccaaataagggaaaataagtgttcctggactttggactagtttatagccagatattccaagagcagcaagacgttgctctctgccgtctctgaaaacaaaagagatgcataacatgcttgcacaaccttttaaaatatagatcagtatagtgctacctctatagttttcttcctcttctgagaaagcctgtatattgatgatcacacacacacacactttgcaattagagaatttggtttgctttactaatctgtttaactattccttcattcattatgaacgcttatattgatgaacatacacacagaggtttctttgctattagaaaattctgtttgctttcctaatctgtttaagcattcattcatgaagagtgtggggccattactggggaaggggggtgacagtgcctcagccagcaaaataccaatgaccaggattggggactaaatttaggaagctaaaatggccagagcaattaacatttgagaaaatcctgtctaggaaaacaacttgagtgtaggcatttgtaattcacttataccaaagttggaaaagtaaaatttaagcctaggacaatttttacttcatggatgttaaatagacaaatgcatagttcccagggggaatttaaacactttactggtgggaagaaacctagtattaaagttgtaaggactctcaaaaacttcacatttattaaaatgcactgctcttacccaatttatcctctgaattaaaatttcagtggattctacaaaacctcgtacaaatagctacagaactttgtgcctattttattcctctatttattcttctaggaagaagcctcttcctagaatcttgaaatagatcccttgactgaatgccaattcctctcctgtttttcaaatgagagaaccttttctgatcaccttgaccttttccctcatttcatatgtcttcccagaaagtagacagactgctctgctgccttcagtcattgtgcctcatttgggttgtccctccttctttgtggagaaatctggaaatgatgcacagtgtatccaaaagttgtgggatgaagtggatgaaagtgatttaattcatttttagaatttttttttgttttgttttagcaacatgctgaacaactaatttactttaaaaataagccagttaaaacaaaggacgctaagcccaagtggggggcaatattagtcaggatctttggggtctaattccagaccaactttcagaagcacttctttgtctctgttctcacctctgctgtccctctcttccctcatcccctaagagagacaaagataaaagcccacctgcatccctaagtcttactgagatcagccaccccaggggagagaaactggatctacttacagccaccccctgtttccatccatatacttacttcccccaatttgcatgtgattatggaaacaagtcatgctcatgaaagcaactgtaaaataaaaggttatggagtagttcagcaacttcttcacagccagctttgtggagctggggaggacttagggcccattggagtctcttatgtgtacagcttcagggctgtccctttcagtttgattttaagcaatgcctcacttcatagcttagggggtaaggattccattcaggtaggttgtctaaaggaactaatgggacctctcagtgaattagctgaccagattttaggaaatctttttaatttctatgattttccttctcacattttgaaatggtaaaattgactggaaataatttttcttggtgccttattggttttccttgcaaacctttctcatattttctcatgaccattgccagtgaccaaggcccatgtgtgtgttgtgtgtaattgtgggcatgtacaagcttaaataacgtgccgacagcactgtttcaaagttggtattcattaggctgttgcctcctgggctggagctgcgctaatcctgacaccggctgccaggagaaaacctcatggatcacacaccaaaccttaataacagcatccgtgacctgcactctccagtacagaatgggaaccccagagctaggaaatgtagttgtatattttaatgaactgctaccccagccaaagaagcttctttcacttttgtgctctacagaaagcccaaggggggtaggagggacagagctttgaataactgctttctaacactaaatgtggccaacaggacagagcacatcacacgtataggcaggtgtgagggacagtggctaagaattgcctgctccctctgcatgctctttcttgtttccaaagtccaatcaagtgatcctgggaaacaaatctgtctggattgcggagggtggttctgaaagaactgccaagacgttaaagaagggtgaagagtaggcagaatataagtagctaacctgagtcaagactctcaaaagctagcagcctgatgacaataggatttatttcagccaggatagtgtctgtctgtgagtgcatcattttaagacagtatgacttcatgttgttacaaactatgtatagtatgtatgttttgtgggttgtatatatacataatatatattatatatatatatgagagatttggtgacttttgatacgggtttggtgcaggtgaatttattactgagccaaatgaggcacataccgagtcagtagttgaagtccagggcattcgatactgtttatgatttccatatatgtatagtgcctatcccatgctgtagtcactgttatgttaaatccagaagttacactagagccagcgatactttatttgtagacaatcaatttgaatccatatgttattactggcagatgatacatgattacagttctgaatctgtaacacttacaaaaggaaacccagagcagcttgatgagtttttgtttctgcttcgttcctgggagtcagtagaaacagcagttgtatgtggttatgttagtctcaagatacttaatttgttgaccttacttcagaaaaattttgtatgtattatatttgtgggaaggtaaaataatcatttgagatttttatcaaatatgaagattagttatttatgaaaaacaaagaaatgtctatttttctttgttcccaattaatgtagataaattttaaaatgcattaaagtaatggtaaagacaataaaaagatgctgtagaaaaaaaaaaaaaaaaaaaaaa

SEQ ID NO: 2052 - DNA, 1554 bp, Homo Sapiens
  NM_003475
ggggagggggcagtgtcctccgagccaggacaggcatgttgttgggactggcggccatggagctgaaggtgtgggtggatggcatccagcgtgtggtctgtggggtctcagagcagaccacctgccaggaagtggtcatcgcactagcccaagcaataggccagactggccgctttgtgcttgtgcagcggcttcgggagaaggagcggcagttgctgccacaagagtgtccagtgggcgcccaggccacctgcggacagtttgccagcgatgtccagtttgtcctgaggcgcacagggcccagcctagctgggaggccctcctcagacagctgtccacccccggaacgctgcctaattcgtgccagcctccctgtaaagccacgggctgcgctgggctgtgagccccgcaaaacactgacccccgagccagcccccagcctctcacgccctgggcctgcggcccctgtgacacccacaccaggctgctgcacagacctgcggggcctggagctcagggtgcagaggaatgctgaggagctgggccatgaggccttctgggagcaagagctgcgccgggagcaggcccgggagcgagagggacaggcacgcctgcaggcactaagtgcggccactgctgagcatgccgcccggctgcaggccctggacgctcaggcccgtgccctggaggctgagctgcagctggcagcggaggcccctgggcccccctcacctatggcatctgccactgagcgcctgcaccaggacctggctgttcaggagcggcagagtgcggaggtgcagggcagcctggctctggtgagccgggccctggaggcagcagagcgagccttgcaggctcaggctcaggagctggaggagctgaaccgagagctccgtcagtgcaacctgcagcagttcatccagcagaccggggctgcgctgccaccgcccccacggcctgacaggggccctcctggcactcagggccctctgcctccagccagagaggagtccctcctgggcgctccctctgagtcccatgctggtgcccagcctaggccccgaggtggcccccatgacgcagaactcctggaggtagcagcagctcctgccccagagtggtgtcctctggcagcccagccccaggctctgtgacagcctagtgagggctgcaagaccatcctgcccggaccacagaaggagagttggcggtcacagagggctcctctgccaggcagtgggaagccctgggtttggcctcaggagctgggggtgcagtgggggactgccctagtccttgccaggtcgccagcaccctggagaagcatggggcgtagccagctcggaacttgccaggccccaaaggccacgactgcctgttggggacaggagatgcatggacagtgtgctcaagctgtgggcatgtgcttgcctgcgggagaggtccttcactgtgtgtacacagcaagagcatgtgtgtgccacttcccctaccccaacgtgaaaacctcaataaactgcccgaagcagcttgaaaaaaaaaaaaaaaaaa

SEQ ID NO: 2053 - DNA, 2991 bp, Homo Sapiens
  NM_003477
aaacgcccggcccgctaccctgcgcccagctccagccgccgggtcccgcctgggcctctcctcctgggaataccgggcaccggtggccccgcccctacctgcgcgccgcatctccgggaacaacagtctccctcccgagcatcacagccagacatggcccagaccagggacccgcgcggcctccaatctccgcacggctttgcgcgcggcgcttagcctgggatacggcagcgaggccgcaaatgcaatcaggcggcgctgagggcagcccgggggcggggcgaacggggcgggggccggggtctggtaaggccccgccggctgagatatccagcggcgcacctgacttcccgggaggcaaggccaacgtggttggaggcggggctgggttggggggcgggggttcaagtctgagagacctaaaggcaccgctagcgtctgggggcgtggccaaccatgcgggaggcggggccttgatgctggacatcaggctgtgctgcgggcagccagtgagaaggccgtcaagatggcggcctcctggaggctgggctgtgatccgcggctgctgcgttatcttgtgggcttccccggccgccgaagcgtagggctggtgaagggggctcttgggtggtctgtaagccgcggagctaattggagatggtttcacagcacgcagtggcttcggggtgatcccattaagatactaatgccatcactgtctcctacaatggaagaaggaaacattgtgaaatggctgaaaaaggaaggtgaagcggtgagtgctggagatgcattatgtgaaattgagactgacaaagctgtggttaccttagatgcaagtgatgatggaatcttggccaaaatcgtggttgaagaaggaagtaaaaatatacggctaggttcactaattggtttgatagtagaagaaggagaagattggaaacatgttgaaattcccaaagacgtaggtcctccaccaccagtttcaaaaccttcagagcctcgcccctcaccagaaccacagatttccatccctgtcaagaaggaacacatacccgggacactacggttccgtttaagtccagctgcccgcaatattctggaaaaacactcactggatgctagccagggcacagccactggccctcgggggatattcactaaagaggatgctctcaaacttgtccagttgaaacaaacgggcaagattaccgagtccagaccaactccagcccccacagccactcccacagcaccttcgcccctacaggccacagctggaccatcttatccccggcctgtgatcccaccagtatcaactcctggacaacccaatgcagtgggcacattcactgaaatccccgccagcaatattcgaagagttattgccaagagattaactgaatctaaaagtactgtacctcatgcatatgctactgctgactgtgaccttggagctgttttaaaagttaggcaagatctggtcaaagatgacattaaagtatcagtaaatgattttatcatcaaggcagcagctgttacccttaaacaaatgccagatgttaatgtaagctgggatggagagggcccaaagcaactgccatttattgacatttcagtggctgtggcaacagataaaggcttacttactccaatcataaaagatgctgctgctaaaggtatccaggaaattgctgactctgtaaaggctctatcaaagaaagcaagagatggaaaattgttgcctgaagaataccaaggaggatcttttagtatttccaacttggggatgtttggcatcgacgaatttactgcagtgattaaccctcctcaggcctgcattttggcggttgggaggttccgacctgtgctgaagctcactgaggatgaagagggaaatgccaaactgcagcagcgccagctcataacagtcacaatgtcaagtgacagtcgagtggttgatgacgaactggcaaccaggtttcttaaaagttttaaagcaaacctagagaatcctatccgacttgcctagtcctcaaagataagaagttggtgttcagcttagttgattcagtagttgttaccaagaaacatatgttataggaaaacaacttggtatttaagtatgaagtggatgaaatgtttatttatttaaggtgaaagcatttgacccagggtgtcttcatcttcaatttgggtttaatgttatagaaataaatgatgataaactctaactaataaaggaaagagaatatttggttactcagatccatttttaacctctggtgctgtataaagggaatattaaactagatgtaaatcaaagtatatgtttggctcatttgagcattttggaatatttgagaatgtatgatacatgtaaaattaaaaaaactattagaactgtaccataattatgttgaaggtagaagtgatcttcaaagagatggccattaacttagcagtgggacctcacttttacaagcactgctctagatatacttgaagaatttaataggtacagaagtttattctggataataaataaataaggatcacactgtattaggggttatggcaacattattgaattttttatgtacataaagccatatgtttagggtggtttctatctgtcttgtttttcacttatataacactgtgaacttctaaagcaagaggataaaagaagcatgaatgaaaagaatgacatttcaaaaaaatggttcaatgaaaaactatagctaaaatatgtaaacctttctaggtaaaccgcttgccttcatcttgagtcggaatatatttaaataaattgtgttatctcttgccaaacattttgttagtgtttatttaaaaacaaaatgttgtttcttaatgcatttaaatcagttttgtattgtgcagtaaaatgtgagaaaatataaacatttctattgtattttaaatgttaaaacacaaaagttcaataaaccttgaagttgattagtaaaa

SEQ ID NO: 2054 - DNA, 3130 bp, Homo Sapiens
  NM_003481
ggggactgggaacggtgggagccgccgtgtgtggagaagctgctgccggtgtcatggcggagctgagtgaggaggcgctgctgtcagtattaccgacgatccgggtccctaaggctggagaccgggtccacaaagacgagtgcgccttctccttcgacacgccggagtctgaggggggcctctacatctgtatgaacacgtttctgggctttgggaaacagtatgtggagagacatttcaataagaccggccagcgagtctacttgcacctccggcggacccggcgcccgaaagaggaggaccctgctacaggcactggagacccaccccggaagaagcccacgcggctggctattggtgttgaaggcggatttgaccttagcgaggagaagtttgaattagacgaggatgtgaagattgtcattttgccagattacctggagattgcccgggatggactggggggactgcctgacattgtcagagatcgggtgaccagtgcagtggaggccctactgtcggccgactcagcctcccgcaagcaggaggtgcaggcatgggatggggaagtacggcaggtgtctaagcatgccttcagcctcaagcagttggacaaccctgctcgaatccctccctgtggctggaagtgctccaagtgtgacatgagagagaacctgtggctcaacctgactgatggctccatcctctgtgggcgacgctacttcgatggcagtgggggcaacaaccacgctgtggagcactaccgagagacaggctacccgttagctgtcaagctgggcaccatcacccctgatggagctgacgtgtactcatatgatgaggatgacatggtcctggaccccagcctggctgagcacctgtcccacttcggcatcgacatgctgaagatgcagaagacagacaagacgatgactgagttggagatagacatgaaccagcggattggtgaatgggagctgatccaggagtcaggtgtgccactcaagcccctgtttgggcctggctacacaggcatccggaacctgggtaacagctgctacctcaactctgtggtccaggtgctcttcagcatccctgacttccagaggaagtatgtggataagctggagaagatcttccagaatgccccgacggaccctacccaggatttcagcacccaggtggccaagctgggccatggccttctctccggggagtattccaagccagtaccggagtcgggcgatggggagcgggtgccagaacagaaggaagttcaagatggcattgcccctcggatgttcaaggccctcatcggcaagggccaccctgaattctccaccaaccggcagcaggatgcccaggagttcttccttcaccttatcaacatggtggagaggaattgccggagctctgaaaatcctaatgaagtgttccgcttcttggtggaggaaaagatcaagtgcctggccacagagaaggtgaagtacacccagcgagttgactacatcatgcagctgcctgtgcccatggatgcagcccttaacaaagaggagcttctggagtacgaggagaagaagcggcaagccgaagaggagaagatggcactgccagaactggttcgggcccaggtgcccttcagctcttgcctggaggcctacggggcccctgagcaggtcgatgacttctggagcacggccctgcaggccaagtcagtagctgtcaagaccacacgatttgcctcattccctgactacctggtcatccagatcaagaagttcaccttcggcttagactgggtgcccaagaaactggatgtgtccatcgagatgccagaggagctcgacatctcccagttgaggggcacagggctgcagcccggagaggaggagctgccagacattgccccacccctggtcactccggatgagcccaaagcgcccatgctggatgaatcagtcatcatccagctggtggagatgggattccctatggacgcctgccgcaaagctgtctactacacgggcaacagcggggctgaggccgccatgaactgggtcatgtcacacatggatgatccagattttgcaaaccccctcatcctgcctggctctagtgggccgggctccacaagcgcagcagccgacccccctcctgaggactgtgtgaccaccattgtctccatgggcttctcccgggaccaggccttgaaagcgctgcgggccacgaacaatagtttagaacgggctgtggactggatcttcagtcacattgacgacctggatgctgaagctgccatggacatctcagagggccgctcagctgccgactccatctctgagtctgtgccagtgggacctaaagtccgggatggtcctggaaagtatcagctctttgccttcattagtcacatgggcacctctaccatgtgtggtcactacgtctgccacatcaagaaagaaggcagatgggtgatctacaatgaccagaaagtgtgtgcctccgagaagccgcccaaggacctgggctacatctacttctaccagagagtggccagctaagagcctgcctcaccccttaccaatgagggcaggggaagaccacctggcatgagggagaggggctgagggatggacttcagcccctctgctctgtaccctttttccttttgtccccggcagcagggaagaagctggaggccgtgggagaatggctgggcagagcagaggggcagcgatagactctggggatggagcaggacggggacgggaggggccggccacctgtctgtaaggagactttgttgcttcccctgcccccggaatccacagtgctctgcttctctgtgtcgccccgcccagccccctggtgtggagggaggggtctcgtttgtgcgcgtgggtgtagctttgtgcatcctctcccagtggagcgatcacctgtgcctcccctccccctttgtttgcccctgtgtggttggtcaaggagggatgtgagggaaatagggaccccccgacttgccctcctgcctcagtctttcccccaccctgtctcttccttgtccttctctggaaaatgccaaaatacacgatgtgaataaaagtacaacggctaaaaaaaaaaaaaaaaa

SEQ ID NO: 2055 - DNA, 2834 bp, Homo Sapiens
  NM_003485
tgcccgacgtgggtggggggggcgtggaatcggagcacaacttggccctgcgttcccaggaagggacccgaagacctccccaggccaccccgccatctgcgtgcgcgctggcaagaggaggggcgcggggtaatggtggccggcgccacagccccgcgccgcgcagggtcttgcccaccaccagcgatgcccagcccttggtagagcttgaaccaccttctataaacaggatggcggtggagagacaggcccagtccctgagcccatgaggagtgtggccccttcaggcccaaagatggggaacatcactgcagacaactcctcgatgagctgtaccatcgaccataccatccaccagacgctggccccggtggtctatgttaccgtgctggtggtgggcttcccggccaactgcctgtccctctacttcggctacctgcagatcaaggcccggaacgagctgggcgtgtacctgtgcaacctgacggtggccgacctcttctacatctgctcgctgcccttctggctgcagtacgtgctgcagcacgacaactggtctcacggcgacctgtcctgccaggtgtgcggcatcctcctgtacgagaacatctacatcagcgtgggcttcctctgctgcatctccgtggaccgctacctggctgtggcccatcccttccgcttccaccagttccggaccctgaaggcggccgtcggcgtcagcgtggtcatctgggccaaggagctgctgaccagcatctacttcctgatgcacgaggaggtcatcgaggacgagaaccagcaccgcgtgtgctttgagcactaccccatccaggcatggcagcgcgccatcaactactaccgcttcctggtgggcttcctcttccccatctgcctgctgctggcgtcctaccagggcatcctgcgcgccgtgcgccggagccacggcacccagaagagccgcaaggaccagatccagcggctggtgctcagcaccgtggtcatcttcctggcctgcttcctgccctaccacgtgttgctgctggtgcgcagcgtctgggaggccagctgcgacttcgccaagggcgttttcaacgcctaccacttctccctcctgctcaccagcttcaactgcgtcgccgaccccgtgctctactgcttcgtcagcgagaccacccaccgggacctggcccgcctccgcggggcctgcctggccttcctcacctgctccaggaccggccgggccagggaggcctacccgctgggtgcccccgaggcctccgggaaaagcggggcccagggtgaggagcccgagctgttgaccaagctccacccggccttccagacccctaactcgccagggtcgggcgggttccccacgggcaggttggcctagcctgggtcctccgcgggtggctccacgtgaggcctgagccttcagcccacgggcctcagggcctgccgcctcctgcttccctcgctgcggaggcagggaagcccctgtaactccggaagcctgctctcgcttgctgagcccgctgggaccgccgagggtgggaataagccccggttggctcgtgggaataagccgtgtcctctgccgcggctgcgatgtggccaggctggggctgctggtcgggggaagacagtgaactgcgttccctggcctgcttcctgcagagtttgtgcatggggagtgtgaggacatggagggtgggaggctgggcgttcagctgccagggccttccaatgccaccgttgtcacagacaatgcctgtccaaacgtcccggtgggatcagcactgcagcccgcccacaacagggtgggaagggaagactggagggggaaggaaggcaggagggggaaggaagaaagagggggaaggaaagaaagaggggggaaggaaaggaggaaggggagaaggaagggaggaggaaagaaggaaggtagggggtgttgggttgggagaattgagggagttataggcagaggaggatcctagctccagccataagaactgggagagccgcctgctgctccagaagacctgcccacctccacagaaatgctagcccttcagaccttctggtcagtgaactgggaccagctctgactaaggatgccttccatggcctgggactcgagttcttcagaaccaagaggctaactgggcttcctccaagaagggaccaggggctagaagcagaagttggcatcagcaaacatttctggaatctaccaaagggaggcccaggcagaaccccttcctcagtctcccttcccctcttccccccagccttgaagaggttgatcctttgtgctgtgtctcttagccctttcatcggggatgcccagaggcaacagcccaggctggaggtgccccagggaagggtgctcacagtggtcccagggctacacttggctttgactgcacagcccctgctcagatccttgtggagggtgtccgatgacttggggaggttctcttccccttcctagaggaggaagtgaccaagtttgaaggcggcagaaatggccacacagccaagaagagcccatgcaactcagtccaggattttactgggtcagtgacattggtggaagccttcatgcctcctcattccacagcacttcctcctatgttgaccttaaacactggcttcccactgatacagactgggatgagctgagggcagtctcatttactgtcaagagttgtatttttgtattgtcctttttgccaagtctacatgtgttgactctgtaatggatttatgtagcccacttcagtctgcaaataaagcaaagtaactggaaaaaaaaaaaaaaaaaaaaa

SEQ ID NO: 2056 - DNA, 4543 bp, Homo Sapiens
  NM_003486
cggcgggcggcgcgcacactgctcgctgggccgcggctcccgggtgtcccaggcccggccggtgcgcagagcatggcgggtgcgggcccgaagcggcgcgcgctagcggcgccggcggccgaggagaaggaagaggcgcgggagaagatgctggccgccaagagcgcggacggctcggcgccggcaggcgagggcgagggcgtgaccctgcagcggaacatcacgctgctcaacggcgtggccatcatcgtggggaccattatcggctcgggcatcttcgtgacgcccacgggcgtgctcaaggaggcaggctcgccggggctggcgctggtggtgtgggccgcgtgcggcgtcttctccatcgtgggcgcgctctgctacgcggagctcggcaccaccatctccaaatcgggcggcgactacgcctacatgctggaggtctacggctcgctgcccgccttcctcaagctctggatcgagctgctcatcatccggccttcatcgcagtacatcgtggccctggtcttcgccacctacctgctcaagccgctcttccccacctgcccggtgcccgaggaggcagccaagctcgtggcctgcctctgcgtgctgctgctcacggccgtgaactgctacagcgtgaaggccgccacccgggtccaggatgcctttgccgccgccaagctcctggccctggccctgatcatcctgctgggcttcgtccagatcgggaagggtgatgtgtccaatctagatcccaacttctcatttgaaggcaccaaactggatgtggggaacattgtgctggcattatacagcggcctctttgcctatggaggatggaattacttgaatttcgtcacagaggaaatgatcaacccctacagaaacctgcccctggccatcatcatctccctgcccatcgtgacgctggtgtacgtgctgaccaacctggcctacttcaccaccctgtccaccgagcagatgctgtcgtccgaggccgtggccgtggacttcgggaactatcacctgggcgtcatgtcctggatcatccccgtcttcgtgggcctgtcctgcttcggctccgtcaatgggtccctgttcacatcctccaggctcttcttcgtggggtcccgggaaggccacctgccctccatcctctccatgatccacccacagctcctcacccccgtgccgtccctcgtgttcacgtgtgtgatgacgctgctctacgccttctccaaggacatcttctccgtcatcaacttcttcagcttcttcaactggctctgcgtggccctggccatcatcggcatgatctggctgcgccacagaaagcctgagcttgagcggcccatcaaggtgaacctggccctgcctgtgttcttcatcctggcctgcctcttcctgatcgccgtctccttctggaagacacccgtggagtgtggcatcggcttcaccatcatcctcagcgggctgcccgtctacttcttcggggtctggtggaaaaacaagcccaagtggctcctccagggcatcttctccacgaccgtcctgtgtcagaagctcatgcaggtggtcccccaggagacatagccaggaggccgagtggctgccggaggagcatgcgcagaggccagttaaagtagatcacctcctcgaacccactccggttccccgcaacccacagctcagctgcccatcccagtccctcgccgtccctcccaggtcgggcagtggaggctgctgtgaaaactctggtacgaatctcatccctcaactgagggccagggacccaggtgtgcctgtgctcctgcccaggagcagcttttggtctccttgggccctttttcccttccctcctttgtttacttatatatatattttttttaaacttaaattttgggtcaacttgacaccactaagatgattttttaaggagctgggggaaggcaggagccttcctttctcctgccccaagggcccagaccctgggcaaacagagctactgagacttggaacctcattgctaccacagacttgcactgaagccggacagctgcccagacacatgggcttgtgacattcgtgaaaaccaaccctgtgggcttatgtctctgccttagggtttgcagagtggaaactcagccgtagggtggcactgggagggggtgggggatctgggcaaggtgggtgattcctcccaggaggtgcttgaggccccgatggactcctgaccataatcctagccccgagacaccatcctgagccagggaacagccccagggttggggggtgccggcatctcccctagctcaccaggcctggcctctgggcagtgtggcctcttggctatttctgtgtccagttttggaggctgagttctggttcatgcagacaaagccctgtccttcagtcttctagaaacagagacaagaaaggcagacacaccgcggccaggcacccatgtgggcgcccaccctgggctccacacagcagtgtcccctgccccagaggtcgcagctaccctcagcctccaatgcattggcctctgtaccgcccggcagccccttctggccggtgctgggttcccactcccggcctaggcacctccccgctctccctgtcacgctcatgtcctgtcctggtcctgatgcccgttgtctaggagacagagccaagcactgctcacgtctctgccgcctgcgtttggaggcccctgggctctcacccagtccccacccgcctgcagagagggaactagggcaccccttgtttctgttgttcccgtgaatttttttcgctatgggaggcagccgaggcctggccaatgcggcccactttcctgagctgtcgctgcctccatggcagcagccagggacccccagaacaagaagaccccgcaggatccctcctgagctcggggggctctgccttctcaggccccgggcttcccttctccccagccagaggtggagccaagtggtccagcgtcactccagtgctcagctgtggctggaggagctggcctgtggcacagccctgagtgtcccaagccgggagccaacgaagccggacacggcttcactgaccagcggctgctcaagccgcaagctctcagcaagtgcccagtggagcctgccgcccccgcctgggcaccgggaccccctcaccatccagtgggcccggagaaacctgatgaacagtttggggactcaggaccagatgtccgtctctcttgcttgaggaatgaagacctttattcacccctgccccgttgcttcccgctgcacatggacagacttcacagcgtctgctcataggacctgcatccttcctggggacgaattccactcgtccaagggacagcccacggtctggaggccgaggaccaccagcaggcaggtggactgactgtgttgggcaagacctcttccctctgggcctgttctcttggctgcaaataaggacagcagctggtgccccacctgcctggtgcattgctgtgtgaatccaggaggcagtggacatcgtaggcagccacggccccgggtccaggagaagtgctccctggaggcacgcaccactgcttcccactggggccggcggggcccacgcacgacgtcagcctcttaccttcccgcctcggctaggggtcctcgggatgccgttctgttccaacctcctgctctgggacgtggacatgcctcaaggatacagggagccggcggcctctcgacggcacgcacttgcctgttggctgctgcggctgtgggcgagcatgggggctgccagcgtctgttgtggaaagtagctgctagtgaaatggctggggccgctggggtccgtcttcacactgcgcaggtctcttctgggcgtctgagctggggtgggagctcctccgcagaaggttggtggggggtccagtctgtgatccttggtgctgtgtgccccactccagcctggggaccccacttcagaaggtaggggccgtgtcccgcggtgctgactgaggcctgcttccccctccccctcctgctgtgctggaattccacagggaccagggccaccgcaggggactgtctcagaagacttgatttttccgtccctttttctccacactccactgacaaacgtccccagcggtttccacttgtgggcttcaggtgttttcaagcacaacccaccacaacaagcaagtgcattttcagtcgttgtgcttttttgttttgtgctaacgtcttactaatttaaagatgctgtcggcaccatgtttatttatttccagtggtcatgctcagccttgctgctctgcgtggcgcaggtgccatgcctgctccctgtctgtgtcccagccacgcagggccatccactgtgacgtcggccgaccaggctggacaccctctgccgagtaatgacgtgtgtggctgggaccttctttattctgtgttaatggctaacctgttacactgggctgggttgggtagggtgttctggcttttttgtggggtttttatttttaaagaaacactcaatcatccta

SEQ ID NO: 2057 - DNA, 3968 bp, Homo Sapiens
  NM_003488
aagggcgaggggcggggcctgcgtcgcgctgcgggcacgtcgccgcgcgtcttcagtatttaatgtctctgtgttccacccgcctgggctagcacgtgggggagctgcggaagcgcggcgctgcgggccgggccgcggggcacagccgggggccggcggcggcgcgcggactccgcatcccgcaccccgatggtagccgaggagctggtgtaattacttcaagcctccaggatggcaatccagttccgttcgctcttccccttggcattgcctgggatgctggcgctcctcggctggtggtggtttttctctcgtaaaaaaggccatgtcagcagccatgatgagcagcaggtggaggctggtgctgtgcagctgagggctgaccctgccatcaaggaacctctccccgtggaagacgtctgtcccaaagtagtgtccacaccccccagtgtcacagagcctccagaaaaggaactgtccaccgtgagcaagctgcctgcagagcccccagcattgctccagacacacccaccttgccgaagatcagagtcctcgggcattcttcctaacaccacagacatgagattgcgaccaggaacacgcagagatgacagtacaaagctggagctagccctgacaggtggtgaagccaaatcgattcctctagagtgccccctttcatccccaaagggtgtactattctccagcaaatcagctgaggtgtgtaagcaagattcccccttcagcagggtgccaaggaaggtccagccaggctaccccgtagtccccgcagagaagcgtagctctggggagagggcaagagagacaggtggggccgaagggactggtgatgccgtgttgggggaaaaggtgcttgaagaagctctgttgtctcgggagcatgtcttggaattggagaacagcaagggccccagcctggcctctttagagggggaagaagataaggggaagagcagctcatcccaggtggtggggccagtgcaggaggaagagtatgtagcagagaagttgccaagtaggttcatcgagtcggctcacacagagctggcaaaggacgatgcggcgccagcacccccagtcgcagacgccaaagcccaggatagaggtgtcgagggagaactgggcaatgaggagagcttggatagaaatgaggagggcttggatagaaatgaggagggcttggatagaaatgaggagagcttggatagaaatgaggagggcttggatagaaatgaggagattaagcgggctgccttccagataatctcccaagtgatctcagaagcaaccgaacaggtgctggccaccacggttggcaaggttgcaggtcgtgtgtgtcaggccagtcagctccaagggcagaaggaagagagctgtgtcccagttcaccagaaaactgtcttgggcccagacactgcggagcctgccacagcagaggcagctgttgccccgccggatgctggcctccccttgccaggcctaccagcagagggctcaccaccaccaaagacctacgtgagctgcctgaagagccttctgtccagccccaccaaggacagtaagccaaatatctctgcacaccacatctccctggcctcctgcctggcactgaccacccccagtgaagagttgccggaccgggcaggcatcctggtggaagatgccacctgtgtcacctgcatgtcagacagcagccaaagtgtccctttggtggcttctccaggacactgctcagattctttcagcacttcagggcttgaagactcttgcacagagaccagctcgagccccagggacaaggccatcaccccgccactgccagaaagtactgtgcccttcagcaatggggtgctgaagggggagttgtcagacttgggggctgaggatggatggaccatggatgcggaagcagatcattcaggaggttctgacaggaacagcatggattccgtggatagctgttgcagtctcaagaagactgagagcttccaaaatgcccaggcaggctccaaccctaagaaggtcgacctcatcatctgggagatcgaggtgccaaagcacttagtcggtcggctaattggcaagcaggggcgctatgtgagttttctgaagcaaacatctggtgccaagatctacatttcaaccctgccttacacccagagcgtccagatctgccacatagaaggctctcaacatcatgtagacaaagcgctgaacttgattgggaagaagttcaaagagctgaacctcaccaatatctacgctcccccattgccttcactggcactgccttctctgccgatgacatcctggctcatgctgcctgatggcatcaccgtggaggtcattgtggtcaaccaggtcaatgccgggcacctgttcgtgcagcagcacacacaccctaccttccacgcgctgcgcagcctcgaccagcagatgtacctctgttactctcagcctggaatccccaccttgcccaccccagtggaaataacggtcatctgtgccgcccctggtgcggacggggcctggtggcgagcccaagtggttgcctcctacgaggagaccaacgaagtggagattcgatacgtggactacggcggatataagagggtgaaagtagacgtgctccggcaaatcaggtctgactttgtcaccctgccgtttcagggagcagaagtccttctggacagtgtgatgcccctgtcagacgatgaccagttttcaccggaagcagatgccgccatgagcgagatgacggggaatacagcactgcttgctcaggtgacaagttacagtccaactggtcttcctctgattcagctgtggagtgtggttggagatgaagtggtgttgataaaccggtccctggtggagcgaggccttgcccagtgggtagacagctactacacaagcctttgacccccatgctgcttcctgagagtctttttttgcactgttgaaattgggcttggcactcaagtcaaagatgaacatcggaataacaaacattgtcctctccagaaagtcctttctttctccatactgtagtcctattgagaagacatttcgtctctgagaaaaaaggatggaactatgggttctcttcgcaaagccaaaggatagtgtttaacaagccagctggcttatgctggttctcagctgtttaaaaaaaaaaaaaaaaaggaatagaaacagtttcaaccagattgtcctattccccctgttccattcccctcttcttccttctatctccttccccggcaaaaaccaaacaaactggcagacaggccagggatgtatgttgcttgcttgagagggtttcttttacttcaaaatctttcttcagggagcaagacatgaactgactaattggtatccactacttgtacagcttacataaatgagttgatgatatttaaccagtttttataaacttcatttaggtctctaaacacagactttttaaattgcaactgtaaatatgaaatggtcatcacatctgaccttggtcagtggggaggggaactggtatcctgccaagcctggttgtaatttgtaaccattttctatttgtgcaaactctgtaaatatgtgtttaaacaaatgtaatattttgtacaagatacactggagaacaaagggaactcaagattcttccagccacatgtcacctgtaggtagaagtaaactctgcagtgcagcttctgctcttggcccctctggccagggcccctgtggcttcctgcacactggacaggtgactgtatggtagagactgtgatctgggaactttttgctgtacaaatctgtttaaaaaaaaaaaaaagtaactcattgaattaacttgcagtggtgtgtttgattcttttttagactggcttcagcattgtgcagtttaaaaataagtaagtaacttacataaatcttcaattgtatgaactgca

SEQ ID NO: 2058 - DNA, 6914 bp, Homo Sapiens
  NM_003494
gcggccgccgcccagccaggtgcaaaatgccgtgtcattgggagactccgcagccggagcattagattacagctcgacggagctcgggaagggcggcgggggtggaagatgagcagaagcccctgttctcggaacgccggctgacaagcggggtgagcgcagccggggcggggacccagcctagcccactggagcagccgggggtggcccgttcccctttaagagcaactgctctaagccaggagccagagattcgagccggcctcgcccagccagccctctccagcgaggggacccacaagcggcgcctcggccctcccgacctttccgagccctctttgcgccctgggcgcacggggccctacacgcgccaagcatgctgagggtcttcatcctctatgccgagaacgtccacacacccgacaccgacatcagcgatgcctactgctccgcggtgtttgcaggggtgaagaagagaaccaaagtcatcaagaacagcgtgaaccctgtatggaatgagggatttgaatgggacctcaagggcatccccctggaccagggctctgagcttcatgtggtggtcaaagaccatgagacgatggggaggaacaggttcctgggggaagccaaggtcccactccgagaggtcctcgccacccctagtctgtccgccagcttcaatgcccccctgctggacaccaagaagcagcccacaggggcctcgctggtcctgcaggtgtcctacacaccgctgcctggagctgtgcccctgttcccgccccctactcctctggagccctccccgactctgcctgacctggatgtagtggcagacacaggaggagaggaagacacagaggaccagggactcactggagatgaggcggagccattcctggatcaaagcggaggcccgggggctcccaccaccccaaggaaactaccttcacgtcctccgccccactaccccgggatcaaaagaaagcgaagtgcgcctacatctagaaagctgctgtcagacaaaccgcaggatttccagatcagggtccaggtgatcgaggggcgccagctgccgggggtgaacatcaagcctgtggtcaaggttaccgctgcagggcagaccaagcggacgcggatccacaagggaaacagcccactcttcaatgagactcttttcttcaacttgtttgactctcctggggagctgtttgatgagcccatctttatcacggtggtagactctcgttctctcaggacagatgctctcctcggggagttccggatggacgtgggcaccatttacagagagccccggcacgcctatctcaggaagtggctgctgctctcagaccctgatgacttctctgctggggccagaggctacctgaaaacaagcctttgtgtgctggggcctggggacgaagcgcctctggagagaaaagacccctctgaagacaaggaggacattgaaagcaacctgctccggcccacaggcgtagccctgcgaggagcccacttctgcctgaaggtcttccgggccgaggacttgccgcagatggacgatgccgtgatggacaacgtgaaacagatctttggcttcgagagtaacaagaagaacttggtggacccctttgtggaggtcagctttgcggggaaaatgctgtgcagcaagatcttggagaagacggccaaccctcagtggaaccagaacatcacactgcctgccatgtttccctccatgtgcgaaaaaatgaggattcgtatcatagactgggaccgcctgactcacaatgacatcgtggctaccacctacctgagtatgtcgaaaatctctgcccctggaggagaaatagaagaggagcctgcaggtgctgtcaagccttcgaaagcctcagacttggatgactacctgggcttcctccccacttttgggccctgctacatcaacctctatggcagtcccagagagttcacaggcttcccagacccctacacagagctcaacacaggcaagggggaaggtgtggcttatcgtggccggcttctgctctccctggagaccaagctggtggagcacagtgaacagaaggtggaggaccttcctgcggatgacatcctccgggtggagaagtaccttaggaggcgcaagtactccctgtttgcggccttctactcagccaccatgctgcaggatgtggatgatgccatccagtttgaggtcagcatcgggaactacgggaacaagttcgacatgacctgcctgccgctggcctccaccactcagtacagccgtgcagtctttgacgggtgccactactactacctaccctggggtaacgtgaaacctgtggtggtgctgtcatcctactgggaggacatcagccatagaatcgagactcagaaccagctgcttgggattgctgaccggctggaagctggcctggagcaggtccacctggccctgaaggcgcagtgctccacggaggacgtggactcgctggtggctcagctgacggatgagctcatcgcaggctgcagccagcctctgggtgacatccatgagacaccctctgccacccacctggaccagtacctgtaccagctgcgcacccatcacctgagccaaatcactgaggctgccctggccctgaagctcggccacagtgagctccctgcagctctggagcaggcggaggactggctcctgcgtctgcgtgccctggcagaggagccccagaacagcctgccggacatcgtcatctggatgctgcagggagacaagcgtgtggcataccagcgggtgcccgcccaccaagtcctcttctcccggcggggtgccaactactgtggcaagaattgtgggaagctacagacaatctttctgaaatatccgatggagaaggtgcctggcgcccggatgccagtgcagatacgggtcaagctgtggtttgggctctcagtggatgagaaggagttcaaccagtttgctgaggggaagctgtctgtctttgctgaaacctatgagaacgagactaagttggcccttgttgggaactggggcacaacgggcctcacctaccccaagttttctgacgtcacgggcaagatcaagctacccaaggacagcttccgcccctcggccggctggacctgggctggagattggttcgtgtgtccggagaagactctgctccatgacatggacgccggtcacctgagcttcgtggaagaggtgtttgagaaccagacccggcttcccggaggccagtggatctacatgagtgacaactacaccgatgtgaacggggagaaggtgcttcccaaggatgacattgagtgcccactgggctggaagtgggaagatgaggaatggtccacagacctcaaccgggctgtcgatgagcaaggctgggagtatagcatcaccatccccccggagcggaagccgaagcactgggtccctgctgagaagatgtactacacacaccgacggcggcgctgggtgcgcctgcgcaggagggatctcagccaaatggaagcactgaaaaggcacaggcaggcggaggcggagggcgagggctgggagtacgcctctctttttggctggaagttccacctcgagtaccgcaagacagatgccttccgccgccgccgctggcgccgtcgcatggagccactggagaagacggggcctgcagctgtgtttgcccttgagggggccctgggcggcgtgatggatgacaagagtgaagattccatgtccgtctccaccttgagcttcggtgtgaacagacccacgatttcctgcatattcgactatgggaaccgctaccatctacgctgctacatgtaccaggcccgggacctggctgcgatggacaaggactctttttctgatccctatgccatcgtctccttcctgcaccagagccagaagacggtggtggtgaagaacacccttaaccccacctgggaccagacgctcatcttctacgagatcgagatctttggcgagccggccacagttgctgagcaaccgcccagcattgtggtggagctgtacgaccatgacacttatggtgcagacgagtttatgggtcgctgcatctgtcaaccgagtctggaacggatgccacggctggcctggttcccactgacgaggggcagccagccgtcgggggagctgctggcctcttttgagctcatccagagagagaagccggccatccaccatattcctggttttgaggtgcaggagacatcaaggatcctggatgagtctgaggacacagacctgccctacccaccaccccagagggaggccaacatctacatggttcctcagaacatcaagccagcgctccagcgtaccgccatcgagatcctggcatggggcctgcggaacatgaagagttaccagctggccaacatctcctcccccagcctcgtggtagagtgtgggggccagacggtgcagtcctgtgtcatcaggaacctccggaagaaccccaactttgacatctgcaccctcttcatggaagtgatgctgcccagggaggagctctactgcccccccatcaccgtcaaggtcatcgataaccgccagtttggccgccggcctgtggtgggccagtgtaccatccgctccctggagagcttcctgtgtgacccctactcggcggagagtccatccccacagggtggcccagacgatgtgagcctactcagtcctggggaagacgtgctcatcgacattgatgacaaggagcccctcatccccatccaggaggaagagttcatcgattggtggagcaaattctttgcctccataggggagagggaaaagtgcggctcctacctggagaaggattttgacaccctgaaggtctatgacacacagctggagaatgtggaggcctttgagggcctgtctgacttttgtaacaccttcaagctgtaccggggcaagacgcaggaggagacagaagatccatctgtgattggtgaatttaagggcctcttcaaaatttatcccctcccagaagacccagccatccccatgcccccaagacagttccaccagctggccgcccagggaccccaggagtgcttggtccgtatctacattgtccgagcatttggcctgcagcccaaggaccccaatggaaagtgtgatccttacatcaagatctccatagggaagaaatcagtgagtgaccaggataactacatcccctgcacgctggagcccgtatttggaaagatgttcgagctgacctgcactctgcctctggagaaggacctaaagatcactctctatgactatgacctcctctccaaggacgaaaagatcggtgagacggtcgtcgacctggagaacaggctgctgtccaagtttggggctcgctgtggactcccacagacctactgtgtctctggaccgaaccagtggcgggaccagctccgcccctcccagctcctccacctcttctgccagcagcatagagtcaaggcacctgtgtaccggacagaccgtgtaatgtttcaggataaagaatattccattgaagagatagaggctggcaggatcccaaacccacacctgggcccagtggaggagcgtctggctctgcatgtgcttcagcagcagggcctggtcccggagcacgtggagtcacggcccctctacagccccctgcagccagacatcgagcaggggaagctgcagatgtgggtcgacctatttccgaaggccctggggcggcctggacctcccttcaacatcaccccacggagagccagaaggtttttcctgcgttgtattatctggaataccagagatgtgatcctggatgacctgagcctcacgggggagaagatgagcgacatttatgtgaaaggttggatgattggctttgaagaacacaagcaaaagacagacgtgcattatcgttccctgggaggtgaaggcaacttcaactggaggttcattttccccttcgactacctgccagctgagcaagtctgtaccattgccaagaaggatgccttctggaggctggacaagactgagagcaaaatcccagcacgagtggtgttccagatctgggacaatgacaagttctcctttgatgattttctgggctccctgcagctcgatctcaaccgcatgcccaagccagccaagacagccaagaagtgctccttggaccagctggatgatgctttccacccagaatggtttgtgtccctttttgagcagaaaacagtgaagggctggtggccctgtgtagcagaagagggtgagaagaaaatactggcgggcaagctggaaatgaccttggagattgtagcagagagtgagcatgaggagcggcctgctggccagggccgggatgagcccaacatgaaccctaagcttgaggacccaaggcgccccgacacctccttcctgtggtttacctccccatacaagaccatgaagttcatcctgtggcggcgtttccggtgggccatcatcctcttcatcatcctcttcatcctgctgctgttcctggccatcttcatctacgccttcccgaactatgctgccatgaagctggtgaagcccttcagctgaggactctcctgccctgtagaaggggccgtggggtcccctccagcatgggactggcctgcctcctccgcccagctcggcgagctcctccagacctcctaggcctgattgtcctgccagggtgggcagacagacagatggaccggcccacactcccagagttgctaacatggagctctgagatcaccccacttccatcatttccttctcccccaacccaacgcttttttggatcagctcagacatatttcagtataaaacagttggaaccacaaaaaaaaaaaaaaaaaaaaaaaaa

SEQ ID NO: 2059 - DNA, 12596 bp, Homo Sapiens
  NM_003496
cgcgccggggcctggtgctcggtcggcgggtgctgccgctttaagcgggggcgggactgcgcgcggccgagcggttgcgacgagggctcggctgggggtcgccggggtcgcgggccgggcctgcaggagccgggccgccgaggtcggggctggttgaactcatggacctgatacttttctcttgagaagcaaaccagcccaaaagaaaaatggcgtttgttgcaacacagggggccacggtggttgaccagaccactttgatgaaaaagtaccttcagtttgtggcagctctcacagatgtgaatacacctgatgaaacaaagttgaaaatgatgcaagaagttagtgaaaattttgagaatgtcacgtcatctcctcagtattctacattcctagaacatatcatccctcgattccttacatttctccaagatggagaagttcagtttcttcaggagaaaccagcacagcaactgcggaagctcgtacttgaaataattcatagaataccaaccaacgaacatcttcgtcctcacacaaaaaatgttttgtctgtgatgtttcgctttttagagacggaaaatgaagaaaatgttcttatttgtctaagaataattattgagctacacaaacagttcaggccaccgatcacacaagaaattcatcattttctggattttgtgaaacagatttacaaggagcttccaaaagtagtgaaccgctactttgagaaccctcaagtgatccccgagaacacagtgcctcccccagaaatggttggtatgataacaacgattgctgtgaaagtcaacccggagcgtgaggacagtgagactcgaacacattccatcattccgaggggatcactttctctgaaagtgttggcagaattgcccattattgttgttttaatgtatcagctctacaaactgaacatccacaatgttgttgctgagtttgtgcccttgatcatgaacaccattgccattcaggtgtctgcacaagcgaggcaacataagctttacaacaaggagttgtatgctgacttcattgctgctcagattaaaacattgtcatttttagcttacattatcaggatttaccaggagttggtgactaagtattctcagcagatggtgaaaggaatgctccagttactttcaaattgtccagcagagactgcacacctcagaaaggagcttctgattgctgccaaacacatcctcaccacagagctgagaaaccagttcattccttgcatggacaagctgtttgatgaatccatactaattggctcaggatatactgccagagagactctaaggcccctcgcctacagcacgctggccgacctcgtgcaccatgtccgccagcacctgcccctcagcgacctctccctcgccgtccagctcttcgccaagaacatcgacgatgagtccctgcccagcagcatccagaccatgtcctgcaagctcctgctgaacctggtggactgcatccgttccaagagcgagcaggagagtggcaatgggagagacgtcctgatgcggatgctggaggttttcgttctcaaattccacacaattgctcggtaccagctctctgccatttttaagaagtgtaagcctcagtcagaacttggagccgtggaagcagctctgcctggggtgcccactgcccctgcagctcctggccctgctccctccccagcccctgtccctgccccacctccacccccgcccccacccccacctgccacccctgtgaccccggcccccgtgcctcccttcgagaagcaaggagaaaaggacaaggaagacaagcagacattccaagtcacagactgtcgaagtttggtcaaaaccttggtgtgtggtgtcaagacaatcacgtggggcataacatcatgcaaagcacctggtgaagctcagttcattcccaacaagcagttacaacccaaagagacacagatttacatcaaacttgtgaaatatgcaatgcaagctttagatatttatcaggtccagatagcaggaaatggacagacatacatccgtgtggccaactgccagactgtgagaatgaaagaggagaaggaggtattggagcatttcgctggtgtgttcacaatgatgaaccccttaacgttcaaagaaatcttccaaactacggtcccttatatggtggagagaatctcaaaaaattatgctcttcagattgttgccaattccttcttggcaaatcctactacctctgctctgtttgctacgattctggtggaatatctccttgatcgcctgccagaaatgggctccaacgtggagctctccaacctgtacctcaagctgttcaagctggtctttggctctgtctccctctttgcagctgaaaatgaacaaatgctgaagcctcacttgcacaagattgtgaacagctctatggagctcgcgcagactgccaaggaaccctacaactacttcttgctgctacgggcgctgtttcgctctattggtggaggtagccacgatctcttgtatcaggagttcttgcctctccttccaaacctcctgcaagggctgaacatgcttcagagtggcctgcacaagcagcacatgaaggacctctttgtggagctgtgtctcaccgtccctgtgcggctgagctcgcttttgccgtacctgcccatgcttatggatcccttggtgtctgcactcaatgggtctcagacattggtcagccaaggcctcaggacgctggagctgtgtgtggacaacctgcagcccgacttcctctacgaccacatccagccggtgcgcgcagagctcatgcaggctctgtggcgcaccttacgcaaccctgctgacagcatctcccacgtggcctaccgtgtgctcggtaagtttggcggcagtaacaggaagatgctgaaggagtcgcagaagctgcactacgttgtgaccgaggttcagggccccagcatcactgtggagttttccgactgcaaagcttctctccagctccccatggagaaggccattgaaactgctctggactgcctgaaaagcgccaacactgagccctactaccggaggcaggcgtgggaagtgatcaaatgcttcctggtggccatgatgagcctggaggacaacaagcacgcactctaccagctcctggcacaccccaactttacagaaaagaccatccccaatgttatcatctcacatcgctacaaagcccaggacactccagcccggaagacttttgagcaggccctgacaggcgccttcatgtctgctgtcattaaggacctgcggcccagcgccctgccctttgtcgccagcttgatccgccactatacgatggtggcagtcgcccagcagtgtggccctttcttgctgccttgctaccaggtgggcagccagcccagcacagccatgtttcacagtgaagaaaatggctcgaaaggaatggatcctttggttctcattgatgcaattgctatttgtatggcatatgaagaaaaggagctttgcaaaatcggggaggtggccctagctgtgatatttgatgttgcaagtatcatcctgggctccaaggagagggcctgccagctgcccctgttttcttacatcgtggagcgcctgtgtgcatgttgttatgaacaggcgtggtatgcaaagctggggggtgtggtgtctattaagtttctcatggagcggctgcctctcacttgggttctccagaaccagcagacattcctgaaagcacttctctttgtcatgatggacttaactggagaggtttccaatggggcagtcgctatggcaaagaccacgctggagcagcttctgatgcggtgcgcaacgcctttaaaagacgaggagagagccgaagagatcgtggccgcccaggaaaagtctttccaccatgtgacacacgacttggttcgagaagtcacctctccaaactccactgtgaggaagcaggccatgcattcgctgcaggtgttggcccaggtcactgggaagagtgtcacggtgatcatggaaccccacaaagaggtcctgcaggatatggtcccccctaagaagcacctgctccgacaccagcctgccaacgcacagattggcctgatggaggggaacacgttctgtaccacgttgcagcccaggctcttcacaatggaccttaacgtggtggagcataaggtgttctacacagagctgttgaatttgtgtgaggctgaagattcagctttaacaaagctgccctgttataaaagccttccgtcactcgtacctttacgaattgcggcattaaatgcacttgctgcctgcaattaccttcctcagtccagggagaaaatcatcgctgcactcttcaaagccctgaattccaccaatagtgagctccaagaggccggagaagcctgtatgagaaagtttttagaaggtgctaccatagaagtcgatcaaatccacacacatatgcgacctttgctgatgatgctgggagattaccggagcttgacgctgaatgttgtgaatcgcctgacttcggtcacgaggctcttcccaaattccttcaatgataaattttgtgatcagatgatgcaacatctgcgcaagtggatggaagtggtggtgatcacccacaaagggggccagaggagcgacggaaacgaaatgaagatttgctcagcaattataaacctttttcatctgatcccggctgctcctcagacactggtgaagcctttgctagaggttgtcatgaaaacggagcgggcgatgctgatcgaggcggggagtccattccgagagcccctgatcaagttcctgactcgacatccctcgcagacagtggagctgttcatgatggaagccacactgaacgatccccagtggagcagaatgtttatgagttttttaaaacacaaagacgccagacctctgcgggatgtgctggctgccaaccccaacaggttcatcaccctgctgctgccggggggtgcccagacggctgtgcgccccggttcgcccagcaccagcaccatgcgcctggacctccagttccaggccatcaagatcataagcattatagtgaaaaacgatgactcctggctggccagccagcactctctggtgagccagttgcgacgtgtgtgggtgagtgagaacttccaagagaggcaccgcaaggagaacatggcagccaccaactggaaggagcccaagctgctggcctactgcctgctgaactactgcaaaaggaattacggagatatagaattgctgttccagctgctccgagcctttactggtcgttttctctgcaacatgacattcttaaaagagtatatggaggaagagattcccaaaaattacagcatcgctcagaaacgtgccctgttctttcgctttgtagacttcaacgaccccaacttcggagatgaattaaaagctaaagttctgcagcatatcttgaatcctgctttcttgtacagctttgagaagggggaaggagagcagctcttgggacctcccaatccagaaggagataacccagaaagcatcaccagtgtgtttattaccaaggtcctggaccccgagaagcaggcggacatgctggactcgctgcggatctacctgctgcagtacgccacgctgctggtggagcacgccccccaccacatccatgacaacaacaagaaccgcaacagcaagctgcgccgcctcatgaccttcgcctggccctgcctgctctccaaggcctgcgtggacccagcctgcaagtacagcggacacttgctcctggcgcacattatcgccaaattcgccatacacaagaagatcgtcctgcaggtttttcatagtctcctcaaggctcacgcaatggaagctcgagcgatcgtcagacaggcgatggccattctgaccccggcggtgccggccaggatggaggacgggcaccagatgctgacccactggacccggaagatcattgtggaggaggggcacaccgtcccgcagctggtccacattctgcacctgatagtgcaacacttcaaggtgtactacccggtacggcaccacttggtgcagcacatggtgagcgccatgcagaggctgggcttcacgcccagtgtcaccatcgagcagaggcggctggccgtggacctgtctgaagtcgtcatcaagtgggagctgcagaggatcaaggaccagcagccggattcagatatggacccaaattccagtggagaaggagtcaattctgtctcatcctccattaagagaggcctgtccgtggattctgcccaggaagtgaaacgctttaggacggccaccggagccatcagtgcagtctttgggaggagccagtcgctacctggagcagactctctcctcgccaagcccattgacaagcagcacacagacactgtggtgaacttccttatccgcgtggcctgtcaggttaatgacaacaccaacacagcggggtcccctggggaggtgctctctcgccggtgtgtgaaccttctgaagactgcgttgcggccagacatgtggcccaagtccgaactcaagctgcagtggttcgacaagctgctgatgactgtggagcagccaaaccaagtgaactatgggaatatctgcacgggcctagaagtgctgagcttcctgctaactgtcctccagtccccagccatcctcagtagcttcaaacctctgcagcgtggaattgccgcctgcatgacatgtggaaacaccaaggtgttgcgagccgtccacagccttctctcgcgcctgatgagcattttcccaacagagccgagtacttccagtgtggcctccaaatatgaagagctggagtgcctctacgcagccgtcggaaaggtcatctatgaagggctcaccaactacgagaaggccaccaatgccaatccctcccagctcttcgggacccttatgatcctcaagtctgcctgcagcaacaaccccagctacatagacaggctgatctccgtctttatgcgctccctgcagaagatggtccgggagcatttaaaccctcaggcagcgtcaggaagcaccgaagccacctcaggtacaagcgagctggtgatgctgagtctggagctggtgaagacgcgcctggcagtgatgagcatggagatgcggaagaacttcatccaggccatcctgacatccctcatcgaaaaatcaccagatgccaaaatcctccgggctgtggtcaaaatcgtggaagaatgggtcaagaataactccccaatggcagccaatcagacacctacactccgggagaagtccattttgcttgtgaagatgatgacttacatagaaaaacgctttccggaagaccttgaattaaatgcccagtttttagatcttgttaactatgtctacagggatgagaccctctctggcagcgagctgacggcgaaacttgagcctgcctttctctctgggctgcgctgtgcccagccactcatcagggcaaagtttttcgaggtttttgacaactccatgaaacgtcgtgtctacgagcgcttgctctatgtgacctgttcgcagaactgggaagccatggggaaccacttctggatcaagcagtgcattgagctgcttctggccgtgtgtgagaagagcacccccattggcaccagctgccaaggagccatgctcccgtccatcaccaacgtcatcaacctggccgatagccacgaccgtgccgccttcgccatggtcacacatgtcaagcaggagccccgggagcgggagaacagcgagtccaaagaggaggatgtagagatagacatcgaactagctcctggggatcagaccagcacgcccaaaaccaaagaactttcagaaaaggacattggaaaccagctgcacatgctaaccaacaggcacgacaagtttctggacactctccgagaggtgaagactggagcgctgctcagcgctttcgttcagctgtgccacatttccacgacgctggcagagaagacgtgggtccagcttttccccagattgtggaagatcctctctgacagacagcagcatgcactcgcgggtgagataagtccatttctgtgcagcggcagtcaccaggtgcagcgggactgccagcccagcgcgctgaactgctttgtggaagccatgtcccagtgcgtgccgccaatccccatccgaccctgcgtcctgaagtacctggggaagacacacaacctctggttccggtccacgctgatgttggagcaccaggcttttgaaaagggtctgagtcttcagattaagccgaagcaaacaacggagttttatgagcaggagagcatcaccccgccgcagcaggagatactggattcccttgcggagctttactccctgttacaagaggaagatatgtgggctggtctgtggcagaagcggtgcaagtactcggagacagcgactgcgattgcttacgagcagcacgggttctttgagcaggcacaagaatcctatgaaaaggcaatggataaagccaaaaaagaacatgagaggagtaacgcctcccctgctattttccctgaataccagctctgggaagaccactggattcgatgctccaaggaattgaaccagtgggaagccctgacggagtacggtcagtccaaaggccacatcaacccctacctcgtcctggagtgcgcctggcgggtgtccaactggactgccatgaaggaggcgctggtgcaggtggaagtgagctgtccgaaggagatggcctggaaggtgaacatgtaccgcggatacctggccatctgccaccccgaggagcagcagctcagcttcatcgagcgcctggtggagatggccagcagcctggccatccgcgagtggcggcggctgccccacgtagtgtcccacgtgcacacgcctctcctacaggcagcccagcaaatcatcgaactccaggaagctgcacaaatcaacgcaggcttacagccaaccaacctgggaaggaacaacagcctgcacgacatgaagacggtggtgaagacctggaggaaccgactgcccatcgtgtctgacgacttgtcccactggagcagcatcttcatgtggaggcagcatcattaccaggcgattgtaactgcctatgagaatagctctcagcatgatcccagttcaaataacgctatgcttggggttcatgcatcagcttcagcgatcatccagtatggaaaaatcgcccggaaacaaggactggtcaatgtagctctggatatattaagtcggattcatactattccaactgttcctatcgtggattgcttccagaagattcgacagcaagttaaatgctacctccagctggcaggcgtcatgggcaaaaacgagtgcatgcagggccttgaagttattgaatctacaaatttaaaatacttcacaaaagagatgacagccgaattttatgcactgaagggaatgttcttggctcagatcaacaagtccgaggaggcaaacaaagccttctctgcagctgtgcagatgcacgatgtgctggtgaaagcctgggccatgtggggcgactacctggagaacatctttgtgaaggagcggcagctgcacctgggcgtgtctgccatcacctgctacctgcacgcctgccggcatcagaacgagagcaaatcgaggaaatacttagccaaggtgctgtggcttttgagttttgatgatgacaaaaacactttggcagatgccgtcgacaagtactgcattggtgtgccacccatccagtggctggcctggatcccacagctgctcacctgcctggttggctcggagggaaagctgctcttgaacctcattagccaggttggacgcgtgtatccccaagcggtctactttcccatccggaccctgtacctgaccctgaaaatagaacagcgggaacgctacaagagcgatccagggcccataagagcaacagcacccatgtggcgctgcagccgaatcatgcacatgcagcgagagctccaccccacccttctgtcttccctggaaggcatcgtcgatcagatggtctggttcagagaaaattggcatgaagaggttctcaggcagctccaacagggcctggcgaaatgttactccgtggcgtttgagaaaagtggagcggtgtccgatgctaaaatcaccccccacactctcaattttgtgaagaagttggtgagcacgtttggggtgggcctggagaatgtgtccaacgtctcgaccatgttctccagcgcagcctctgagtctctggcccggcgggcgcaggccactgcacaagaccctgtctttcagaagctgaaaggccagttcacgacggattttgacttcagcgttccaggatccatgaagcttcataatcttatttctaagttgaaaaagtggatcaaaatcttggaggccaagaccaagcaactccccaaattcttcctcatagaggaaaagtgccggttcttgagcaatttctcggcacagacagctgaagtggaaattcctggggagtttctgatgccaaagccaacgcattattacatcaagattgcacggttcatgccccgggtagagattgtgcagaagcacaacaccgcagcccggcggctgtacatccggggacacaatggcaagatctacccatacctcgtcatgaacgacgcctgcctcacagagtcacggcgagaggagcgtgtgttgcagctgctgcgtctgctgaacccctgtttggagaagagaaaggagaccaccaagaggcacttgtttttcacagtgccccgggttgtggcagtttccccacagatgcgcctcgtggaggacaacccctcttcactttcccttgtggagatctacaagcagcgctgcgccaagaagggcatcgagcatgacaaccccatctcccgttactatgaccggctggctacggtgcaggcgcggggaacccaagccagccaccaggtcctccgcgacatcctcaaggaggttcagagtaacatggtgccgcgcagcatgctcaaggagtgggcgctgcacaccttccccaatgccacggactactggacgttccggaagatgttcaccatccagctggctctgataggcttcgcggaattcgtcctgcatttaaatagactcaaccccgagatgttacagatcgctcaggacactggcaaactgaatgttgcctactttcgatttgacataaacgacgcgactggagacctggatgccaaccgtcctgtcccatttcgactcacgcccaacatttctgagtttctgaccaccatcggggtctccggcccgttgacagcgtccatgattgcggtcgcccggtgcttcgcccagccaaactttaaggtggatggcattctgaaaacggttctccgggacgagatcattgcttggcacaaaaaaacacaagaggacacgtcctctcctctctcggccgccgggcagccagagaacatggacagccagcaactggtgtccctggttcagaaagccgtcaccgccatcatgacccgcctgcacaacctcgcccagttcgaaggcggggaaagcaaggtgaacaccctggtggccgcggcaaacagcctggacaatctgtgccgcatggaccccgcctggcacccctggctgtgactgtggccgccacggccacccggaatgtgaagggcgctccgggctctgagcccgcagcttttacgacttctccctgcctcgttccttatattcacagaagccccatagtttcactgggttgcggttattttcctggtagtttgcgtgtaagaaagggagaatatagttttagaggaagctgaactatgacgatgctgggcgaagcggttggaaatggcagagctgaaacttattccaagctttcaaaataatcttttaagaagccaggattctccggtctggaatttctgagtgagtcctttttttatggtgtcctccctctgtgaatgtacaggcggaactgtacgaacagctcccttccatccatttttaactctttcggaaataacacctcacagcagcttcgtgcttttgtacagacctttgtaacaagtgtacagaaaactcattttgtttgagaaacaggagttgatgaacccatcatgctggtttttctctgagcacaaagttttaggctgtacacagccagccttgggaatctcgttgagcgttcggcgtggatccacggggccaggccaccctgcgggagcgccacacgcatccacttcggattcagtgggtgaagacagaactctgagagtctgcaggcggctcctgtgctttttatttctggctcttcggatgtcttctagacatttactatcactgcacctgaagaaaaaatcacttttaccttcctaatttaaaaagacaaaacagaaatgtacgttccttcgctagctttagtctttctgttcccatttttataaatctgagcattgataatgttctatctaaatttgtacagtgtgatttttttttttagaataaatattttataaaagggaaaaaaaa

SEQ ID NO: 2060 - DNA, 2356 bp, Homo Sapiens
  NM_003500
cacaagcctgccagaggctgcggcctacagccggggagaggccagcccggcctacagtgcggacacaggacagaggggagccaggttctttgcactgaccaatgctgagagcagaccctcggagcagccgggttggaagtgtctctccatagtcaccagacagatccaggataggatgggcagcccagtgcaccgagtgtcattgggggatacctggagcaggcaaatgcaccccgacatagagagcgagaggtatatgcagtcctttgacgtggaacggctcaccaacatccttgatggaggtgcccagaacactgcactccgcaggaaagttgagagcatcatccacagttacccggagtttagctgtaaggacaattatttcatgacccagaatgagcgttataaggctgccatgcggagggcattccacatccggttgatagctcggcgcctgggttggttagaagatggtcgtgaattaggctacgcttacagagccctttctggagacgtggccttaaatatacacagagtcttcgtgagagccctcaggagcctgggctcagaggagcagattgccaaatgggacccactctgcaaaaacatccagatcatcgcaacgtatgcacagacagagttgggacatgggacatatcttcagggcctggagactgaagccacctatgacgcagccacccaggagtttgtgatacacagccccacgctgactgccaccaaatggtggcctggagacttgggacggtcagccacccatgccctggtccaggcccagctgatctgctcaggagccaggcggggcatgcacgcttttattgtgccaatccggagtcttcaggaccacaccccactgccaggaatcatcattggggacatcggacccaagatggactttgatcaaacagacaatggcttcctgcagctgaaccatgtgcgggtccccagggagaacatgctgagtcgctttgcacaggtcttgccagatggcacctacgtcaaactcggtacagcacagagcaactaccttcccatggtggtggtgcgggtggagctgctgtcaggggagatcctccctatactgcagaaggcctgtgtcatcgccatgcgctactcggtcatccgccgccaatcccggctccggcccagtgacccagaggcaaaggtcctggactaccagacacaacagcagaaactctttcctcagctggccatcagttatgccttccatttcctggcagtcagcctcttggagttcttccagcactcctacactgccattctgaaccaagacttcagcttcctgcctgagctccacgcactgagcacgggcatgaaggccatgatgtcagaattctgcacccagggagctgagatgtgccgcagggcctgtggcggacatggctactcaaagctgagtggcctgccatcactggtcaccaaattgtcggcctcctgtacctacgagggtgagaacacagtgctctacctgcaggtggccaggttcctggtgaagagctacctgcagactcagatgtcccctggctccacgccacagagatctctctctccatctgtcgcatatctcaccgcacctgacctggccaggtgtccagcccagagggcagccgacttcctctgcccggagctctacaccacggcctgggcacatgtggcagtaaggctcataaaggactcagtgcagcatttacagaccctgacgcaatccggagctgaccagcacgaggcttggaaccagaccactgtcatacacctccaggctgctaaggtgcactgctactatgtcactgtgaagggttttacagaagctctggagaaactagaaaatgaaccagcgattcagcaggtgctcaagcgcctctgtgacctccatgccatacatggaatcttgactaactcgggtgactttctccatgacgccttcctgtctggtgcccaagtggacatggcaagaacagcctacctggacctgctccgcctgatccggaaggatgccatcctgttaactgatgcttttgacttcaccgatcagtgtttaaattcagcacttggctgttatgatggaaacgtctacgaacgcctgttccagtgggctcagaagtcaccaaccaatactcaggagaaccctgcctatgaggaatatataagaccacttttacaaagttggagatccaagctatgaaataaccaacagtattcaagaagcaaccagcaccatcatgtgataatggtactatggcatatatgcaacattaaaattttaaattagaaaaaaaaaaaaaaaaaaaaaaaaaaaaaaaaaaaaaaaaaaaaaaaa

SEQ ID NO: 2061 - DNA, 1938 bp, Homo Sapiens
  NM_003504
gatttggcgggagtcttgaccgccgccgggctcttggtacctcagcgcgagcgccaggcgtccggccgccgtggctatgttcgtgtccgatttccgcaaagagttctacgaggtggtccagagccagagggtccttctcttcgtggcctcggacgtggatgctctgtgtgcgtgcaagatccttcaggccttgttccagtgtgaccacgtgcaatatacgctggttccagtttctgggtggcaagaacttgaaactgcatttcttgagcataaagaacagtttcattattttattctcataaactgtggagctaatgtagacctattggatattcttcaacctgatgaagacactatattctttgtgtgtgacacccataggccagtcaatgtcgtcaatgtatacaacgatacccagatcaaattactcattaaacaagatgatgaccttgaagttcccgcctatgaagacatcttcagggatgaagaggaggatgaagagcattcaggaaatgacagtgatgggtcagagccttctgagaagcgcacacggttagaagaggagatagtggagcaaaccatgcggaggaggcagcggcgagagtgggaggcccggagaagagacatcctctttgactacgagcagtatgaatatcatgggacatcgtcagccatggtgatgtttgagctggcttggatgctgtccaaggacctgaatgacatgctgtggtgggccatcgttggactaacagaccagtgggtgcaagacaagatcactcaaatgaaatacgtgactgatgttggtgtcctgcagcgccacgtttcccgccacaaccaccggaacgaggatgaggagaacacactctccgtggactgcacacggatctcctttgagtatgacctccgcctggtgctctaccagcactggtccctccatgacagcctgtgcaacaccagctataccgcagccaggttcaagctgtggtctgtgcatggacagaagcggctccaggagttccttgcagacatgggtcttcccctgaagcaggtgaagcagaagttccaggccatggacatctccttgaaggagaatttgcgggaaatgattgaagagtctgcaaataaatttgggatgaaggacatgcgcgtgcagactttcagcattcattttgggttcaagcacaagtttctggccagcgacgtggtctttgccaccatgtctttgatggagagccccgagaaggatggctcagggacagatcacttcatccaggctctggacagcctctccaggagtaacctggacaagctgtaccatggcctggaactcgccaagaagcagctgcgagccacccagcagaccattgccagctgcctttgcaccaacctcgtcatctcccaggggcctttcctgtactgctctctcatggagggcactccagatgtcatgctgttctctaggccggcatccctaagcctgctcagcaaacacctgctcaagtcctttgtgtgttcgacaaagaaccggcgctgcaaactgctgcccctggtgatggctgcccccctgagcatggagcatggcacagtgaccgtggtgggcatccccccagagaccgacagctcggacaggaagaacttttttgggagggcgtttgagaaggcagcggaaagcaccagctcccggatgctgcacaaccattttgacctctcagtaattgagctgaaagctgaggatcggagcaagtttctggacgcacttatttccctcctgtcctaggaatttgattcttccagaatgaccttcttatttatgtaactggctttcatttagattgtaagttatggacatgatttgagatgtagaagccattttttattaaataaaatgcttattttaggctccgtccccaaaaaaaaaaaaaaaaaaaaaaaaaaaaa

SEQ ID NO: 2062 - DNA, 487 bp, Homo Sapiens
  NM_003514
actcactttctgacttaggccacaggtcgttttaccatgtctggacgtggcaagcagggcggcaaggctcgcgccaaggccaaaacccgctcctctagagctgggctccaatttcctgtaggacgagtgcaccgcctgctccgcaagggcaactacgctgagcgggtcggggccggcgcgccggtttacctggcggcggtgctggagtacctaactgccgagatcctggagctggcgggcaacgcagcccgcgacaacaaaaagacccgcatcatcccgcgccacttgcagctggccatccgcaacgacgaggagctcaacaagctgcttggtaaagttaccatcgctcagggcggtgttctgcctaacatccaggccgtactgctccccaagaagactgagagccaccacaaagctaagggcaagtaagggctgaactttaaaaatgtaaacttacaagacaaaaggctcttttcagagccaccca

SEQ ID NO: 2063 - DNA, 534 bp, Homo Sapiens
  NM_003516
cgactttcccgatcgccaggcaggagtttctctcggtgactactatcgctgtcatgtctggtcgtggcaagcaaggaggcaaggcccgcgccaaggccaagtcgcgctcgtcccgcgctggccttcagttcccggtagggcgagtgcatcgcttgctgcgcaaaggcaactacgcggagcgagtgggggccggcgcgcccgtctacatggctgcggtcctcgagtatctgaccgccgagatcctggagctggcgggcaacgcggctcgggacaacaagaagacgcgcatcatccctcgtcacctccagctggccatccgcaacgacgaggaactgaacaagctgctgggcaaagtcaccatcgcccagggcggcgtcttgcctaacatccaggccgtactgctccctaagaagacggagagtcaccacaaggcaaagggcaagtgaggctgacgtccggcccaagtgggcccagcccggcccgcgtctcgaaggggcacctgtgaactcaaaaggctcttttcagagccaccca

SEQ ID NO: 2064 - DNA, 437 bp, Homo Sapiens
  NM_003517
atgtctggtcgtggcaaacaaggaggcaaggcccgcgccaaggccaagtcgcgctcgtcccgcgctggcctccagttcccggtagggcgagtgcaccgcttgctgcgcaaaggcaactacgcggagcgggtgggggccggcgcgcccgtctacatggcggcggtcctcgagtacctgaccgccgagatcctggagctggcgggcaacgcggctcgggacaacaagaagacgcgcatcatccctcgtcacctccagctggccatccgcaacgacgaggaactgaacaagctgctgggcaaagtcaccatcgcccagggcggcgttttgcctaacatccaggccgttctgttaccaaagaaaaccgaaagccacaaagccaaaagcaaataaatgcagacaaacaaaccaagaccaaaggctctttttagagccaccca

SEQ ID NO: 2065 - DNA, 2223 bp, Homo Sapiens
  NM_003528
acttcttttcttggctaagccgcgtttgtactgtgtcttaccatgcctgaaccggcaaaatccgctccggcccctaaaaagggctccaagaaagccgtcaccaaagcccagaagaaagacggcaagaagcgcaagcgcagccgcaaagagagctactccatctacgtgtacaaggtgctgaagcaggtccaccccgacaccggcatctcgtccaaggccatgggcatcatgaactccttcgtcaacgacatcttcgagcgcatcgcgggagaggcttcccgcctggcgcactacaacaagcgctccaccatcacatcccgcgagatccagacggccgtgcgcctgctgctgcccggcgagctggccaagcacgccgtgtccgagggcaccaaggcggtcaccaagtacaccagctccaagtgagtccctgccgggacctggcgctcgctcgctcgagtcgccggctgcttgactccaaaggctcttttcagagccacccacctaatcactagaaaagagcttgttcacttattcccttagtttcttttcataaagtaagttattttagtgtgaaggtcatgggaaatggcatacgtagctttttaactatttggaactcgaggtccccagtgcgtcattggatttgcttttgaatctagagcgtgtctttactcattgtgctgcttagccttcccaggagtcggttctcaattaggctgttgggaatccgcctctttacccgcccccactcccgccccacacgcgccctggtggctccttgggtctgtttcattctaaaacgaagtggctgagttcggctgtcatttaagagaactccaggacacaattcagcccgggttccgcaaacactgcgtgacagctctgtatgactgacgcttggcagcagcttttgtgtccggtcaccagttctgccgtgcgatggggcctcctgtggataccagccgttctgtgtattttggacgaaggccgcgcagccgggtcccagccttgtcctgattgggcgacaagaatattcaaaattctgcgcctttttctaatttgtagatttcagtttccgtcgttcactttgagactttgaaattcctatttctcattttgttgataatttctgcatttaatggtctgtgctttaaatggtaacgctacggccccaggtcactgcgaggcacttaccatgtagatacgggctcaaaagtcacctctcagagacctacgtcatccactcaggaattcgcgcctctcatacttgcctgtctcattttatcttccttctagcagctgtctgaaattggttcgtctgttttcttgtttatggtattctcaagcccttgacagaccggctagtgtggttttcccgtgcatcttcagcctggcacattatggacacttaaatactacgtattgatctaatattgttgggttaatttttccatcccacccttttcttaatcgcttccgtggatggatgaagggtgctgttcatttccattagatgtatgtgaaggcacagtgaaaatggaaatgttcttggagctacttcctcaaaatgtatccttagtcacctcagtgcaacagctgggagggggccgtgttaagattttttttgctacaaagaggaggtggcaatggtagatccacccttatgcttctcagtttagcataacctcttatggattttcatcaaattcagcgtgttggtcactggaaagagccttttccttctccttttcttactctcccctcatggtgttcccctcttaaaggagaggagcttttaatttacacttaccacctcatttgcttttctggaggccatgcaatataggcgggactacagagttaatctcctttttacaaatgaggccaagagaagcctcattggttcacagtcatgcagctcatactgtccacccttgtattctcagatgcaggacaattgcattttagttttattttgtggaggtgcagaatatttactctttctgtccaacccttgattctgccgaggaagacactgatggtttgatgagtgattcagctgtttttggctaagggcttttggagctgatggcaggggtttgatgaatccaaatgagctctagacattatcacagactgaatagatcttaactgtctcctacatgtgtgttttcaaatgtgtatagatgctattgttattaataaagttaccaattaatttaa

SEQ ID NO: 2066 - DNA, 864 bp, Homo Sapiens
  NM_003530
gacgcggcaagcaaggcggaaaggcccgagctaaggctaagacccgctcttcgcgggccggactccagttccctgtgggccgcgtacaccgcttgctccgcaagggcaactactccgagcgagtcggggccggcgcgccagtgtatctggcggcggtgttggagtacctgaccgccgagatcctggagctggcgggcaacgccgcccgcgacaacaagaagacccgcatcatcccccgacacctgcagctggccatccgcaacgacgaggagctaaacaagttgctgggtaaagtcacaattgctcagggcggtgttctgcccaacatccaggctgtactgctccccaagaagactgagagtcaccacaaggccaaggcaggttttagaagttcgcaatggctcgtaccaagcagactgctcgcaagtccacgggtgggaaagcgccacgcaagcagctggccaccaaggctgctcgaaagagcgctccagccaccggcggcgtgaagaagccccaccgttaccggcccggcacggtggctctgcgcgagatccgccgctaccagaagtcgaccgagctgctgattcgcaaactgccattccagcgtctagtccgtgagatcgcgcaggacttcaagactgatctgcgttttcagagctcggcggtgatggcgctgcaggaggcctgcgaggcctacctggtggggctgtttgaggacaccaacctatgcgccattcacgccaagcgagtgactatcatgcccaaggacatccagcttgctcgccgcattcgtggggagagggcgtaaattgtcttgtgaatgtgtgctaaccaaaacccaaaggctcttttcagagccaacca

SEQ ID NO: 2067 - DNA, 459 bp, Homo Sapiens
  NM_003531
atggctcgtacgaagcaaacagctcgcaagtctaccggcggcaaagctccgcgcaagcagcttgctactaaagcagcccgtaagagcgctccggccaccggtggcgtgaagaaacctcatcgctaccgcccgggcaccgtggccttgcgcgaaatccgtcgctaccagaagtccaccgagctgctgatccggaagctgccgttccagcgcctggtgcgagaaatcgcccaggacttcaaaaccgacctgcgtttccagagctctgcggtgatggcgctgcaggaggcttgtgaggcctacctggtgggactcttcgaagacaccaatctgtgcgctattcacgctaaacgcgtcaccatcatgcccaaagatatccagctggcacgtcgcatccgtggggaaagggcataagtctgcccgtttcttcctcattgaaaaggctcttttcagagccactca

SEQ ID NO: 2068 - DNA, 367 bp, Homo Sapiens
  NM_003539
atgtctggccgcggtaagggcggaaagggtctaggtaagggtggcgccaagcgtcaccgtaaggtattgcgtgacaatatccaaggaatcaccaagcccgctatccgccgcctggctcgccgcggcggcgtcaagcgtatttctggcctcatttatgaggaaactcgcggagtgctgaaagttttcctggaaaatgtaatccgcgatgctgtcacctacacggaacacgccaaacgcaagacagtcacagccatggacgtggtgtacgcgctcaagcgccagggacgcactctttatggcttcggcggctgagcttacctctacagtacactaccgcaaaaccaacggcccttttcagggccaccta

SEQ ID NO: 2069 - DNA, 354 bp, Homo Sapiens
  NM_003541
atgtctggccgcggcaaaggcgggaagggtcttggcaaaggcggcgctaagcgccaccgtaaagtactgcgcgacaatatccagggcatcaccaagccggccatccggcgccttgctcgccgcggcggcgtgaagcgcatctccggcctcatctacgaggagactcgcggggtgctgaaggtgttcctggagaacgtgatccgggacgccgtgacctatacagagcacgccaagcgcaagacggtcaccgccatggatgtggtctacgcgctcaagcgccagggccgcaccctctacggtttcggtggttgagcgtccctttctatcaacaaaaggccctttttagggccccca

SEQ ID NO: 2070 - DNA, 374 bp, Homo Sapiens
  NM_003543
atgtctggccgtggtaaaggtggaaaaggtttgggtaagggaggagctaagcgtcatcgcaaggttttgcgcgataacatccagggcatcactaagccagctatccggcgccttgctcgtcgcggcggtgtcaagcgaatttctggccttatctatgaggagactcgtggtgttctgaaggtgttcctggagaacgtgattcgtgacgctgtcacttacacagagcacgccaaacgcaagaccgtgacagcaatggatgtggtctacgcgctgaagcgacagggacgcactctttacggcttcggtggctaaggctcctgcttgctgcactcttattttcattttcaaccaaaggcccttttcagggccgccca

SEQ ID NO: 2071 - DNA, 377 bp, Homo Sapiens
  NM_003545
atgtctggtcgcggcaaaggcggaaagggactgggtaaaggaggcgctaagcgtcaccgtaaggtcctgcgagataacatccagggcattaccaagcctgccatccggcgccttgctcgtcgcgggggtgtcaagcgcatttctggtctcatctacgaggagactcgcggggttctgaaggtgtttctggaaaacgtgattcgtgatgctgtgacttacacggagcacgccaaacgcaagacagtgacagcgatggatgtggtctacgcgctgaagagacagggacgcactctttacggcttcggcggctaatgctaccgcttaaacgactcagcatctcgacttcccaaatcaaaggcccttttcagggccgccca

SEQ ID NO: 2072 - DNA, 2654 bp, Homo Sapiens
  NM_003558
aacttgcagactgtggcgcaactggtcttggtagcggaggcacccgaatgctgcccgggtgagatgaggaagccaaggcccagcagagctgagatgtgactgcagagccgtccaaccccagtcctgtgacctttctctggtgcctgatacctctcagcatttgagggccttttctcttcctgcttcatctctaaaggtccttctaggagagaggtgaaagaaacctggcaaagaaaacggtctcgacaatgagtaggccacccatcactactaactacagatgacttgccatttcatttacaaagatgtcttctgctgctgaaaatggagaggcagcacctggaaaacaaaatgaagaaaaaacctataaaaagactgcatcatctgctattaaaggtgctattcagctgggaataggatacacagtgggtaatctcacttccaagccagaacgagatgttcttatgcaagacttttatgtggtggaaagtgtgttcctacccagcgaagggagcaatctgaccccagcacatcactacccagactttagatttaagacatacgctccattagcattccgatatttcagagaactttttggtatcaagcctgatgattacttgtattccatctgcagtgaacctctaatagaactgtctaaccctggagccagtggatccttgttttttgtgaccagtgatgatgaatttatcatcaaaacagttcagcacaaagaagctgagtttcttcagaagctactgccaggctattacatgaatttaaaccagaatccaaggactcttttgccaaaattttacggactgtattgtatgcaatcaggaggcattaatatcaggattgtggtgatgaacaacgttttgccacgctccatgagaatgcactttacatatgacttgaaaggctcaacgtataagcgaagagcatcccgtaaagagagagagaaatccaaccccacatttaaggacttagatttcctgcaagacatgcacgaagggttgtattttgatacggaaacatacaacgcgcttatgaaaacacttcagagagactgccgggtgctagaaagcttcaagatcatggattatagccttctgttgggaattcatttcctggaccattccctcaaagagaaagaggaggagaccccacaaaatgtgcctgatgctaagcggactgggatgcagaaggttctctactcaacagccatggaatctatccagggtccagggaaatctggagatgggataatcacagagaacccagacacaatgggaggcattccagctaaaagccataggggagaaaaactacttttatttatgggcattattgacattctgcaatcatataggttaatgaagaagttagaacattcctggaaagctcttgtttatgatggggacactgtttctgttcatagaccaagcttttatgcagacagatttcttaagttcatgaattccagagttttcaagaaaattcaagctttgaaggcttcaccgtctaagaaacggtgcaattcaatcgccgccctaaaggccacttcacaggagattgtgtcctcaattagccaggaatggaaggatgagaagcgggatttgctgactgaaggacaaagttttagcagccttgatgaagaagccctgggatcccgacacaggccagacctggtccctagcactccatcactgtttgaagctgcttccttggcaaccacaatttcatcttcttccttatacgtcaatgagcactatccacacgacaggcctacactctattcaaacagcaaagggttaccttccagttcaacatttaccttggaagaggggaccatctacttgaccgctgagcccaacactctggaagtgcaggatgacaatgcttctgtgcttgacgtctatttataagtgaaaatggtgatcacctaagcacatggatgagacgtgagcacagttatggcagagaagtttctccgcaccagaattatccacagcaacttggctgagccccactacacacagagaaatcatcaacctgacttaagagttttcaagatgtcaacttcaggctgatcagcagatgggatgtgaaaaatactaccctattctatcatttgctgttgcttgctgaactgtgaagaactgcatgaactatatttaagctgctttctgtaccattgccaatcacctttttggagttggaagtgctattttcctatggacttttgcattatttcattgtgcatgcatccagtgattatacataagcaacatatgtaatctgcttatatatttttaaaaatccatccacacacatggtaaattaagtataaattcttttgcaaaattatagttcatgtcattgaaagtttaaattggtttcatttaaagatcaatatactaggtctgccttcactttatagaaaactagcttctataaagattttttcactgtttactagtgaaatgagaaaagcaaagctatttataaaaggccttatgtcgtgtacatacattgtctttgaaatatttgtgatctagtttattgcttgtaaaagagaaattatataatttatttagtaaatactactgtaaactatagttttgtgagagaaataaaatattttgttctca

SEQ ID NO: 2073 - DNA, 4270 bp, Homo Sapiens
  NM_003569
gagggccgctgtcactcagccccgcgggccaatagaaaaggggtgaaccccgccttcttcctgagttgtgctgcgggcatgcgcactgggcgtccccacgccaccgcccatcagctgagaattgcagctgagggctccggggtaggtgggtgacggcggtcggaggtgtaggagggagccgtggaggtccaggtgactgcttagaaaactgcacagcatctgatgaaattagcgaataagaacatcaaccatgtcttacactccaggagttggtggtgaccccgcccagttggcccagaggatctcttctaacatccagaagatcacacagtgttctgtggaaatacaaagaactctgaatcaacttggaacacctcaagattcacctgaattgaggcaacagttgcaacagaagcagcagtatactaaccagcttgccaaagaaacagataagtacattaaagagtttggatctctgcccaccacccccagtgaacagcgtcaaaggaaaatacagaaggatcgcttagtggcagagttcacaacatcactgacaaacttccagaaggtccagaggcaggctgctgagcgagagaaagagtttgttgctcgagtaagagccagttccagagtgtctggcagttttcctgaggacagctcaaaagaaaggaatcttgtatcctgggaaagccaaactcaacctcaagtgcaggtgcaggatgaagaaattacagaggatgacctccgtcttattcatgagagagaatcttctatcaggcaacttgaagctgatattatggatattaatgaaatatttaaagatttgggaatgatgattcatgaacaaggagatgtaatagatagcatagaagccaatgtggaaaatgcagaggtgcacgttcagcaagcaaatcagcagctgtcaagggcagcagattatcagcgcaaatccagaaaaaccctgtgcatcatcattcttatccttgtcattggagttgcgattatcagtctcatcatatggggattgaaccactgaagttataaaggagcacactgtcgcactacattgtctaaattatgtaggaagattcctgtaatcatgtttttttaattattattttaaagctattgtataaaggatggttcccatactttgttatttttattgggggggttggggtggttcctttggattaaatctgatattttctaatactgaaagattttctaaatgtcactgctgacataactcccttggtcttcaatttaatagttgttaagtttttgcccacattgcatatgcctttcatttataatttatttaccctgcttgacttagttttgggaattcgtaaatttaaaggtgtgtgtattctgtttgcatctccctgtcactgtgacacacctagatgtgtgttacttcaattaaaattctcaaatttaattttgatttgcttcagcagggaaaatattctcaataatgtaaaataattaaggtctatacatgggttgtatttttctggttcacaacagcacaaagtgtctttcatttttttgttggttttcttttaagatcttttttaccctgaagtcggtgaatacttttctagtttatttgatactctttctgtgtatatattaagcttttgctgtagattgcctagtaaaattactaaggataggttgtttttacatatggtctatttaagtctgatgtttacgggggaaagtgtagttactaaaaatgtttaacataatttggaagaagagtatgaacaaccaataccaatacctattgcgtttggattcttaagaccccagtttgttattccactaaactagttatcttaaccatatcatctggttttgtgggccattatttaccttcccttatgtcttatagaataatggttaatatttttaggtcaaaattacttttggaaagtaactttcccacaattaactgtttttgagcacctgacaaaatttagtgtttaccttgcgtgccattttgtgtcatccttcattaaaaaagcaattggaggtttgccagttatctcacttccctttttaaatcaatgttgttttaatgcactaatctgaattctgtaaagaggattatcttagtttatactttgtattttataatgttcttgtatagcagctcggtactgaaggcggtgtttaacttggcaagctctgagacttcaaatgggaacaaatagtaagtagctaagtaaaccacatctttgcaaccaaaataaagatgagttaaaaggtatctggttaggcctatttcatgaggactatgctctggtgggaccacaggtcacctgatacttagtgctgtgctgcctgaaacctcagcatggagacatcaccacatgcactgtggccattcagcatctttctggagcaccagttcactccaggtttttattttagggtgtcatcgattttacctactttgtcagactggtagaagttgctttgcatatcagaaaaactccatttttttccacaaaagggattacagaaaactcttttgtgagtgagtgattggaacttagagactcctgttgccagaatcagactgccctagaacagaatggacaatgcagggaggagaattcacacaaacagcacctgttctgaggcctgtgccagcccaccaggcctgctcaaatgtggtctttacttcaagtgcacagaggcacatgaggtttctggtgataaaccagcgtcttaccgctgttttaaagtcccatccccatggctttcacaatcagttccgttttttttgctgtacttgataaaatgtttattctcatacaggtcaagtacatttacttctattcacagtgagtacccaataacaacaaaagcgcttacaaatttggggggcgtgattttagtacctttatttgaagtgtaatcattttaaattattattattttaactggggcagttatcagtggtttaaacaggaactttagtggcttcaatttgtttaagaaacatattaagtttgagggaaaaatttcccatgaaatatttggaacgtaagagtagtattgattagagaaaattaaataagaaacatagtatggtagccaaattttttaaaaaatcttgaacttttctgtaggtcagttttagaactgctgtgaaaagtgaaggttgccctgtggagattaaaattagagttgttttcataactgacagcatggtgaatccatttgagtcaaagtgaagaatttcctcatcaagtgactatacatttgtttttgtgtgctcaaaagaaatactcaaacacagactgatattaaccagccaggtaaattgaacgacaatgtggcattaggtatttggctgtttattggtcgttaaatactatggttttgcaatatgattgatggtaaaagagtgatgtcatattgatactagagtagcttgtttttttagtaggtgtgggaccatctcttttacaagtgcaactcagtctaggacagccatggatgcagtgtctggagttggaccctctgagcccgctggctgccccagtagcatctgcattggtgaccaaggacactgcactttgaagaggtcgccactgggttatttagtgtcttcactgcttttgttaaaaattgtaaaattttgtacacaaaaagttgtgtttttgaatatcaattgtttagacacacctacaatgataaataagtgcctttaaaggcccctctttccatgaaatacatctgtggtttagcaaggaaagtacaaaatagtttatgtagttggtataatttttatttgtgtcttcatgtagaaaaaatgaatgtcataataaaatataaaacttacgtaaagaaaataaagtcattgtccaccttaatagctaaggtccacaagggtaacttatgcagcatttattttttttgaaagtcaaaattgaatttatttctttcacatggctggtttgctgcaatatgaagtttcagaatgggctgaagtaagttgattgagggatttgagttgaatgacattttcaagttcatttaaatatgataaaaattcattggtggtaaataacatctgtctttcctggaaaaaaaaaagttgtgtattttcatgattcagttaaaacaaaaaatgagcctgtgaatcccaggcctttttagtcctccataacatttgaacagtttgacttgtcagcaaagaaatacacttatcaaattttaaaccaatgggagcctgaaagtgttacag

SEQ ID NO: 2074 - DNA, 6994 bp, Homo Sapiens
  NM_003574
agaagctcccggccgggggcgcgcacgtaggcacgcagaggccgtcacgtgggtcgccgaggctcgcaagtgcgcgtggccgtggcggctggtgtggggttgagtcagttgtgggacccggagctgctgacccagcgggtggcccaccgaaccggtgacacagcggcaggcgttagggctcgggagccgcgagcctggcctcgtcctagagctcggccgagccgtcgccgccgtcgtcccccgcccccagtcagcaaaccgccgccgcgggcgcgcccccgctctgcgctgtctctccgatggcgtccgcctcaggggccatggcgaagcacgagcagatcctggtcctcgatccgcccacagacctcaaattcaaaggccccttcacagatgtagtcactacaaatcttaaattgcgaaatccatcggatagaaaagtgtgtttcaaagtgaagactacagcacctcgccggtactgtgtgaggcccaacagtggaattattgacccagggtcaactgtgactgtttcagtaatgctacagccctttgactatgatccgaatgaaaagagtaaacacaagtttatggtacagacaatttttgctccaccaaacacttcagatatggaagctgtgtggaaagaggcaaaacctgatgaattaatggattccaaattgagatgcgtatttgaaatgcccaatgaaaatgataaattgggtataactccaccagggaatgctccgactgtcacttcaatgagcagcatcaacaacacagttgcaacacctgccagttatcacacgaaggatgaccccaggggactcagtgtgttgaaacaggagaaacagaagaatgatatggaacctagcaaagctgttccactgaatgcatctaagcaagatggacctatgccaaaaccacacagtgtttcacttaatgataccgaaacaaggaaactaatggaagagtgtaaaagacttcagggagaaatgatgaagctatcagaagaaaatcggcacctgagagatgaaggtttaaggctcagaaaggtagcacattcggataaacctggatcaacctcaactgcatccttcagagataatgtcaccagtcctcttccttcacttcttgttgtaattgcagccattttcattggattctttctagggaaattcatcttgtagagtgaagcatgcagagtgctgtttctttttttttttttctcttgaccagaaaaagatttgtttacctaccatttcattggtagtatggcccacggtgaccatttttttgtgtgtacagcgtcatataggctttgcctttaatgatctcttacggttagaaaacacaataaaaacaaactgttcggctactggacaggttgtatattaccagatcatcactagcagatgtcagttgcacattgagtcctttatgaaattcataaataaagaattgttctttctttgtggttttaataagagttcaagaattgttcagagtcttgtaaatgttattttaataatccctttaaattttatctgttgctgttacctcttgaaatatgatttatttagattgctaatcccactcattcaggaaatgccaagaggtattccttggggaaatggtgcctcttacagtgtaaatttttcctcctttacctttgctaatatcatggcagaatttttcttatcccttgtgaggcagttgttgactgagtttttcatccttacaatcctgtcccatggtatttaacataaaaaaaaataaaactgttaacagattcttgctcgatagcttgtttgtgtctgtcgtgttattagagggaactccactatatatggtcacttgaaattatgatgcaaaggtttctcttgcattgaaaccctcttggatattacagtatttttaattgaaagtcctaattctgttaaggaaaggagttgattaaattttaaggtaccactggtattttgggagattataatcagtttgttttcaagataatagaaaataaggtccatgagaatagaagttatgtgatttcagtgagttgatgtgtacagcatggctgtgctccatctgatttaccccattcttaagttctgagagtatgttctcaaggaagatttaactctctttggttttaaattactttttaaccagcctaataaataagtcttactacttttcataatatttcataatagttaaaagtaggtgtttttttcgtgctcaatttggcactcaaaataatgttcattatggaagtttggtaatactgagcaagcctgtggaattttctttatgaaaaatgattttagcctttgcaaatgttaaccatgtgaaacacattttcagtataagtatgcgttacagggtttgatactttcctgcacttaggtttgtcctattcttcatttattcatactaggatagaaaattttggaatcagaaaatagatccagtgtttagctacatacaatctagtacaagtgaatttttattcttaaacataggtgtgttggctctttttttaaaagatgcgctctacctgaaaaggaaattggattttagaactggatgtggtgcagtgaagtattttaggcccaggtctgtgtacacattttatagaagaatgaagtactctgaagtattttggttgccttttcatttcaactgtgttttgaatttgtcagatcacacatatattgtgttattgggcgctgtggtatcttttataaaacctcttgcttgtgtgcaaaagttcctaaaaggaaacacaagtaatgcctatccattactagcatgctatgctgcatgctttactgccattgctgtatgctttactgtctttgtaaaaatccccctctccccttttctggtaactggaaaagcatgctaaaaatagtcttatattttcaccccataaatgcagaatcagtaattccttggcttaaagctcttatataatcaatattattggtggtaaataccaagtttggtatctcatagctatctttttttaaagaaattaagttcttgaaaatttagccaaatcccgttttatgggaatgctctttagaattcattttgttcagcccctttgttctatggttgagaaatctgaggccttacgaaggttaagagaactttccccgtgtctcacaggtaggtagaggcagagctggaactagatatctggtctgttgactctagctcagtgtcttctggtaactgttgaaaattgtcttagtttgagagatggctgaaataatgaacataaaatgctatttataataacaagtatatgtgaaatttcttattgtaagactactaccggcttactgttgaatagtttggttatagtgtttaggctagaaatgcctcccacattggtaataaacattacaaaatacaatgtatttttaggtaggcattttataaaatgcattatgccatggttgcttttgagatagattgtagtctgggtagcatctttaaaatgtatgtgggcttaactgttgttcatatcaggagatgctctgattgtataggtgagactctgtttctgttatttttaattgctgtatgaaatgtgatcagattattttactaccaacagttatagtttgaaagtccaactgtattaattgactgataatatgataatatagagattaaattgtttgtcttcattccttatatgtttagaagtttttgctttgtctgcctgcttacttgtatatgtaagcatgagggaaatacactgttgctaatactgaaattacaatcaagtaactaaggccttgagttcatatgtgacactgaatgcactagcttccttcgttctataactaatgtaccttaacttcccccattcttatatttacaagaagctaagtcattatgttctgagtgtgtggtatgttcccttaaaaaaaaatgacacttggaagaaaaatgtatgaaattcagaaattccgatcaaagaaaagtaattctttctttttttttttgagacagagtcttgctttgttgcccaggctggagggcagtggtgtgatctcacctcactgcagcttccgcctcctgggttcaagtgattctcatggctcagccgcctgagtagctgggattacaggtgtgagccaacaagcccggctaatttttgtatttttagtagagacaaggtttcaccatgttggtcaggctgggctcaaactcctgaatccgcctgcctcggcctcccaaagtgctgggattacaggtgtgagctgccgcacccagccaagaaaaataatactcttaaatacttagatgttcacctaaagttgatattatttggtatgggaattacttttgaactgtaatctttcagattacaccactttgaaaacaagttttaacagtagggtaaaaatatagtttttgagggtattcccaacttgtgatcttctaccactttagagacattcaagtaatagttttcttagagctttgcacattcctattcactgagattttaaaaatttcacctttattcgagggaaggatcaatgcttattaccatttggaaaaacgaagatcagaaggtaaatgatctttattttctagctttaaagggaaattaaaccattcatgaataaactttaaaaatgtgaagtgtccttttccttttcacaatacaaaaaaaatttcaacagattgtgtggtttgtgcatttatatcctgttaagcattaatagctaatcactgggacttgaattctgatggcagatagtctcttgcttagtgagatggagttaactattttttagtaggaagtgagaacagctgattttcatgccacgtttcatagccccacttttggtagactaccaccacgcttcttcgcgtaagcagtggcatcttgggaatgaatgcccagccgctcgtgggttggtgcaaagaagtataaacatatatcactaaggaaaaagaaagtttgtcttgcccttctgacacagtgtgtgcacttcaggcaatttttggaaaatataaaaaattccaaattctgcctttcagcagcatcaattgctaggaacatttcattcatttccctgtaatattaatgttctttaagcataatcactaattataagttgtatcctatttttttccagcttaatttctgtggtttattgaaaaccaagtataaatgtgactaaaagcattttgctttgtttttatagttaactttcttaaggttatggacattttataatgtaacatttgattggcctggcctcttgacaattcccttctagttatgcatatcctcctgttgccacatttcttgttttaaaactcagtttcttgttttccagttgttgctatgtataacacccatcttgaaagagagtatataggaagttattcagataacttttgtagtagtgatattcaactatagcagtaccttaactcatgatgagcttaggaacataaaagataattgttgcttgaatagcacccccagagatactgacctaattggtctggggtggagatctggcatggtagtttttttcaagctccaatcatcggccagacagttgctttatgtaggtttttaaatgccaaaggcagatatgaagtagatttaattaagacttgacttcagcaatacaggggaacttaaaatacttatttttctttaaactgcaggagtcactgttaggtattgcttaaaaaaaattgcataaaagctttgcttgtcaagttaggattgctggaataccactaaagatttttgacttgtgaataaatgagctgtcatcgcaaaaaggcgatttgagaaatgtgggcttcagtattaattgccattttgctgacacccagtgtacctacctacctgagaaatttattttgtccatcatgtatttctcaaagcaaaaggtggttttcaagtataatgtcgttttcaacatgcttattacttagttttacgtcagctcatttcatcatcattgataacttgtgaaatacttatctccatcctatggaataggggagacgggtttagacaggttcaattagctcaagtctacacagctgaagtagcagagaaagtgggatctagatggtctgatcctagtgatctaccatatgaaggacatagtttgtgtcctggtccaagtcaaatattgactcctcacaaacagtaagtatggcaattttgtgatgcctttgattccactttacatggagtactattatttgtgaaatgtctttaagatttttggtcttaaatttttgaagactgctttccccctttatctcccagaaaattgagaagaagtaaactcctgcccactaacaatctcagtccgtgaacaaaaccaacatgaacattcctaaacaagagtgtgtgttactctaagaagaaggctatagaatttatggaaatggcttatgtaacctacaagactggagaacagaatgtgactggccttttctaatggtcctttaagatttaatgattaaagcaagagttttttataattgactttgtggtctaaattcttgatactgtttataattctacaaagaacaaaaattgttatgtactataggcacttaagaaccctgaggaaaaataatacaatgtgtgtgtgtgagagagagagtgagttactgacattgttccaaaaaaaaaaaaaaaaaaaaaaaaaatgtggagggttgaaatggtaaggaattggaatcttttgtattttcgagcaataagaattcctattcttgtttcaaatagaggtttgttaggaattacagttgtggggagcaaactttcttttttgtgctgttttaattcaaaatgtatatccttaattgtatataatatgtagataaatatatgagggtattaagctactttgaattaaatttaaggatatatttcacatgaaaacaaatacaaacgagaatcaaaataaagttttgcaaagta

SEQ ID NO: 2075 - DNA, 3736 bp, Homo Sapiens
  NM_003575
cctacgggctgtagatggagctgtccggccccggagagggggaaggcgcctggaaaacgttcttcttctccctggccgacccgagcggggaacagcactcccaggatgcagtttgtgtcaacacggccgcagcctcagcagctgggcatccagggcctggggctggacagcgggagctggagctgggcccaggctctgcccccggaggaggtctgccaccaggagccggcgctgcgcggggaaatggccgagggaatgccgcccatgcaggctcaagaatgggacatggacgcccggcggccaatgccttttcagttcccaccctttccagatagggcacctgtcttccccgaccgcatgatgcgagagccccagttgcccacagcagagatctcactctggactgtggtggctgccattcaggctgtggagaggaaggtggatgcccaggccagccagctgctgaacctggaggggcgcacggggacagccgagaagaagctggccgactgtgaaaagacggccgtggaatttgggaaccacatggagagcaagtgggccgtgctggggaccctgctgcaggagtacgggctgctgcagaggcggctggagaacttggagaacttgctgcgcaacaggaacttctgggtcctgcggctgcccccgggcagcaagggggaggcccccaaggttccagtgacttttgtcgacattgctgtgtacttctccgaagacgagtggaagaacttggacgaatggcagaaggagctttataacaaccttgttaaggagaactacaaaaccctcatgtccctggacgcggagggctcagtccccaagccagatgctccagtccaggctgagcccagggaagaaccttgtgtgtgggagcagcgccaccccgaagagagagaaatcccaatggatcccgaagcaggagcagagcccctggtgcctgcgcaggatgcgtcctcccaggtgaagcgtgaggacaccctgtgtgtccggggtcagcggggcctggaggaaagagccatccctacggaatccattaccgactccccaatttctgcccaggacctcttgtcccggattaaacaggaggagcatcagtgcgtgtgggatcagcaggatttggcagacagagatattcccacggatcccaattcagagtctctcatctcagcacatgacattttgtcatggatcaagcaggaggagcagccatacccatggggaccacgcgactcaatggacggagagcttggattagactctggccctagtgacagcctgctgatggtgaagaacccacccccggccccgccacagccccagccccagccccagccaccgcagccgcagctgcagtcgcagccccagccccagagcctgccccccatcgcggtggccgagaacccgggcggccccccgagccgagggctgctggacgacggtttccaggtgctgcccggggagcgtggctccggcgaggcgccgccgggtggggaccgcagcaccgggggcggcgggggcgatgggggcggtgggggcggcggcgcggaggcggggacgggggcaggcggcggctgtggcagctgctgccctggcgggctgcggcggagcctcctcctgcacggcgcccgcagcaagccctactcgtgccccgagtgcggcaagagcttcggcgtgcgcaagagcctcatcatccaccaccgcagccacaccaaggagcggccctacgagtgcgctgagtgcgagaagagcttcaactgccactcgggcctcatccgccaccagatgacgcaccgcggcgagcggccctacaagtgctcggagtgcgagaagacctacagccgtaaggagcacctgcagaaccaccagcggctgcacacgggcgagcggcctttccaatgtgcactgtgcggcaagagcttcatccgcaagcagaacctgctcaagcaccagcgcatccacacgggcgagcgcccctacacgtgcggcgagtgcggcaagagcttccgctacaaggagtcgctcaaggaccacctgcgcgtgcacagcggcggcccgggccccggcgccccacggcagctcccgccgcctcctgagcgagactagggctgggctgggggagggcagggccggacggagtggatcgggggcggcctgagcaccaaccaccttgccgggtgtcctcagccaccgtctggaaatcggcaacaggcattgcactccggttgggggtccccagggtggggcagggatcccccagatctgtctggtctgaatggacgcccagctcatctagggtggacccagctgctggggaagagccagggggaccgcgaggagccgagcgtcctcgggcaccgccctcacacctcctcgagtgccctgggaccactgggccacagatggtcatcaggggaagccaccagggagtcccgaagcccttctgagatcaggaaatcaggtcccaaggttaggagacgccctgaaaaaaagcgaaggccgagggatgtgctaagggtaacaccttcatgatgacaacactgcctcgcgtttcaatagcgctttatacttttttaagtgttttctatccgttatccatttcacccttggcctatccctctcagataggtggggtaggattttcctggtgaccgagtaaagtgagaggcaggtgagacggttcacccaatcacacgggaaggggcgcgcgctgcccaaccgcgctctccgcctacctccgctgctcgggaagctgctggcctggccctcctggtctctcttcctttcctggtctctcttcctttccttgctctcacccacggataaaaccagaagcgacaggaggccagctcctggggttcctgggagccgggaacagattggctacggaacgccccaggttgtacattcagagggctctttctccatgggagctcctggtgccgcctcggccccagcctgtccccagcccctcaatctggtgcagcagcatcttgtcactgcacaacagtggcctggtcccccacaggcagttagggccccaggtcagacctcaccatgatgatttgttccagttctcccagggcagaggggcgagggagaggcttttgctgtgagagtagccgtcacgtgtctcttcccagcagcgccgggcaagtgggtgctagagtctgagcctcaggctctcctgccctgggcctcccaattggtgctatctgttactgcccgtgctcacggacatggatacagaccctgctgtgctccacaccctgcaggcgcctcgggaagcgcccaaaggattccccttcacgttggtgcacctgctccatagctccgggcgctgcgtcccgaggggccacagtctccatttcagcgtcttgcatggcctggcaccgggtggggtggtatgccccaggacccttgtttgtgtcaaaaatgactttccctgcccttgccgtgggtccggcgttcctcccagccgggatcacagtgggcagccggcacccggcaccactttggcgagcgtcctgcttccgccctcgccctcatctacgctgctccgctttcctcagacccctttttgccgtgcaaagggaattcttgacattaaataaaaggtatccagattgcagactgcatgttcacagagctgggggttctccagcttgcctacagtaaagcctcaatgaactggaatccaattcaaaaaaaaaaaaaaaaa

SEQ ID NO: 2076 - DNA, 2207 bp, Homo Sapiens
  NM_003582
acttcccagccggggccagtcgggagcgaaagtgcgctgagctgcagtgtctggtcgagagtacccgtgggagcgtcgcgccgcggaggcagccgtcccggcgtaggtggcgtggccgaccggacccccaactggcgcctctccccgcgcggggtcccgagctaggagatgggaggcacagctcgtgggcctgggcggaaggatgcggggccgcctggggccgggctcccgccccagcagcggaggttgggggatggtgtctatgacaccttcatgatgatagatgaaaccaaatgtcccccctgttcaaatgtactctgcaatccttctgaaccacctccacccagaagactaaatatgaccactgagcagtttacaggagatcatactcagcactttttggatggaggtgagatgaaggtagaacagctgtttcaagaatttggcaacagaaaatccaatactattcagtcagatggcatcagtgactctgaaaaatgctctcctactgtttctcagggtaaaagttcagattgcttgaatacagtaaaatccaacagttcatccaaggcacccaaagtggtgcctctgactccagaacaagccctgaagcaatataaacaccacctcactgcctatgagaaactggaaataattaattatccagaaatttactttgtaggtccaaatgccaagaaaagacatggagttattggtggtcccaataatggagggtatgatgatgcagatggggcctatattcatgtacctcgagaccatctagcttatcgatatgaggtgctgaaaattattggcaaggggagttttgggcaggtggccagggtctatgatcacaaacttcgacagtacgtggccctaaaaatggtgcgcaatgagaagcgctttcatcgtcaagcagctgaggagatccggattttggagcatcttaagaaacaggataaaactggtagtatgaacgttatccacatgctggaaagtttcacattccggaaccatgtttgcatggcctttgaattgctgagcatagacctttatgagctgattaaaaaaaataagtttcagggttttagcgtccagttggtacgcaagtttgcccagtccatcttgcaatctttggatgccctccacaaaaataagattattcactgcgatctgaagccagaaaacattctcctgaaacaccacgggcgcagttcaaccaaggtcattgactttgggtccagctgtttcgagtaccagaagctctacacatatatccagtctcggttctacagagctccagaaatcatcttaggaagccgctacagcacaccaattgacatatggagttttggctgcatccttgcagaacttttaacaggacagcctctcttccctggagaggatgaaggagaccagttggcctgcatgatggagcttctagggatgccaccaccaaaacttctggagcaatccaaacgtgccaagtactttattaattccaagggcataccccgctactgctctgtgactacccaggcagatgggagggttgtgcttgtggggggtcgctcacgtaggggtaaaaagcggggtcccccaggcagcaaagactgggggacagcactgaaagggtgtgatgactacttgtttatagagttcttgaaaaggtgtcttcactgggacccctctgcccgcttgaccccagctcaagcattaagacacccttggattagcaagtctgtccccagacctctcaccaccatagacaaggtgtcagggaaacgggtagttaatcctgcaagtgctttccagggattgggttctaagctgcctccagttgttggaatagccaataagcttaaagctaacttaatgtcagaaaccaatggtagtatacccctatgcagtgtattgccaaaactgattagctagtggacagagatatgcccagagatgcatatgtgtatatttttatgatcttacaaacctgcaaatggaaaaaatgcaagcccattggtggatgtttttgttagagtagactttttttaaacaagacaaaacatttttatatgattataaaagaattcttcaagggctaattacctaaccagcttgtattggccatctggaatatgcattaaatgactttttataggtcaatgcaaaaaaaaaaaaaaaaaaaaaaaaaaaaaaaaaaaaaaaaa

SEQ ID NO: 2077 - DNA, 6010 bp, Homo Sapiens
  NM_003583
cgcgggggcgcgcgcgcgcgggcccgggagaggctcccgagccaggcggtcttcggtcctcgcagcgcttccagctccccgcgcccctatgtgagggagacggggaggcccgcggcgcgcaggggagggcgaggcatgtgcacgggccggagggtgctgcagccgcccgaggaagaggaggacggcggcgaggaggagagcggggggctcgcggcggcgggccccggccgaggggatgcagtggactgtgtgtgtctggctgtagcagacgcgaggcggcgacgaggcgccggggacccgcgcgaggggcggccgggaggcggcggcggcggccgccagaagtagcagcaggaccggcggcggcgacggcagccctgaaatgcattttcctctccagcggccatgttaaccaggaaaccttcggccgccgctcccgccgcctacccgaccgattggcggcagtaagcacacaatgaatgatcacctgcatgtcggcagccacgctcacggacagatccaggttcaacagttgtttgaggataacagtaacaagcggacagtgctcacgacacaaccaaatgggcttacaacagtgggcaaaacgggcttgccagtggtgccagagcggcagctggacagcattcatagacggcaggggagctccacctctctaaagtccatggaaggcatggggaaggtgaaagccacccccatgacacctgaacaagcaatgaagcaatacatgcaaaaactcacagccttcgaacaccatgagattttcagctaccctgaaatatatttcttgggtctaaatgctaagaagcgccagggcatgacaggtgggcccaacaatggtggctatgatgatgaccagggatcatatgtgcaggtgccccacgatcacgtggcttacaggtatgaggtcctcaaggtcattgggaaggggagctttgggcaggtggtcaaggcctacgatcacaaagtccaccagcacgtggccctaaagatggtgcggaatgagaagcgcttccaccggcaagcagcggaggagatccgaatcctggaacacctgcggaagcaggacaaggataacacaatgaatgtcatccatatgctggagaatttcaccttccgcaaccacatctgcatgacgtttgagctgctgagcatgaacctctatgagctcatcaagaagaataaattccagggcttcagtctgcctttggttcgcaagtttgcccactcgattctgcagtgcttggatgctttgcacaaaaacagaataattcactgtgaccttaagcccgagaacattttgttaaagcagcagggtagaagcggtattaaagtaattgattttggctccagttgttacgagcatcagcgtgtctacacgtacatccagtcgcgtttttaccgggctccagaagtgatccttggggccaggtatggcatgcccattgatatgtggagcctgggctgcattttagcagagctcctgacgggttaccccctcttgcctggggaagatgaaggggaccagctggcctgtatgattgaactgttgggcatgccctcacagaaactgctggatgcatccaaacgagccaaaaattttgtgagctccaagggttatccccgttactgcactgtcacgactctctcagatggctctgtggtcctaaacggaggccgttcccggagggggaaactgaggggcccaccggagagcagagagtgggggaacgcgctgaaggggtgtgatgatccccttttccttgacttcttaaaacagtgtttagagtgggatcctgcagtgcgcatgaccccaggccaggctttgcggcacccctggctgaggaggcggttgccaaagcctcccaccggggagaaaacgtcagtgaaaaggataactgagagcaccggtgctatcacatctatatccaagttacctccaccttctagctcagcttccaaactgaggactaatttggcgcagatgacagatgccaatgggaatattcagcagaggacagtgttgccaaaacttgttagctgagctcacgtcccctgatgctggtaacctgaaagatacgacattgctgagccttactgggttgaaaaggagtagctcagacctgtttttatttgctcaataactctactcatttgtatcttttcagcacttaattttaatgtaagaaagttgttcattttgtttttataaaatacatgaggacaatgctttaagtttttatactttcagaaactttttgtgttctaaaagtacaatgagccttactgtatttagtgtggcagaataataacatcagtggcaggccactgattacttcatgactgccacgcatttacagattggtgtcaaagacattcactatgtttttatggttcatgttatatcctccccagggtgacagccccttaaggccctccttttccctccatgctccaggtccatgcacaggtgtagcatgtcctgcttccgtttttcataaattaatctgggtgttgggggtagtgggaggagaacggtcagaatcaaagtgacattctaagaaaaactgtaccttagagattttcctctagtgctcaaacaaatacaaaataagatccccaaggtttaaactgcccagttagcattctgacattctaaaagccggcaaagcagcttttagtggataaatgggaatggaaacgtgtgtgttcctccaaattttctagtatgatcggtgagctgttttgtaaagaagcctcatattacagagttgcttttgcacctaaatttagaattgtattccatgaactgttcctcccttttctctgcttttctcctctctgttcctcttttaataccacacgtctgttgcttgcatttagtttgtcttcttccttcagctgtgtatcccagactgttaatacagaaaagagacatttcagctgtgattatgaccattgtttcatattccaattaaaaaaagaacagcagcctagctacttaaggtggggatttccatagttccaaagaagatttagcagattagagtgagttcacacttttcaggtgccactgtaaggttctctcagcctgggaaactatcaactctttctttaaaaagaaagagggttgaaaatcctctggacgaacagaagtcactttggctgttcagtaaggccaatgttaacaacacgtttagaggaggaaaagttcaacctcaagttaaatggtttgacttattcttcgtatcattagaagaaccccagagatagcattcctctattttattttactttcttttggattgcactgattgtttttgtgggaatgacactttatctggcaaagtaactgagagtttggtaaaagaatattttcttctctgaataataattattttcacagtgaaaatttcagtattttatcactaatgtatgagcaatgatctatatcaatttcaaggcacgtgaaaaaaattttttagtatgtgcaatttaatatagaaagatttctgcctgtttggacaataggttttgggtagtacagattaggataagtaagcttatatatgcacagagattattgtattacctgtaaattgatttacaagtacttaaaagcgtggtccccagtgaggccaagaaagtttccggttaagttctttaataataatcctacagtttatcttaagaaaaaaaaaaaggtttgaaaaaaacactttaatttaggcttcgttggttgatggtggaaaaaaatgctcaggaaatatttcagatatttgccaaaaaaccagtaataaggttaccttattaaaatagtgatatttgctttactatttaaggtgtcactgataaattaatttgtacttctgtgtttagaaattatagcttcttttcccttagtcaaattttttagcatattatacacatttctgtgtaatctgtggaagtgcaataatatgttagtaagttacattttaaataatgctcatgtgacaatactcccaatcaatggcttatagaatttaaagatctgtatattagattttggcttaaaggcatgagaagtataagacttggtttggtggctttgtaagaccaccagcctcttaatgatggttagcttctttaggtcattaaatcaataaaaacatataatgctgttttgctcttctaatgctcctcttccatttccagttatcttcacatttacatttaaatatacaaacctgagcctgccattattaatttccctataaaatgacgatacatgtgaacatttataaatggactaatactgcttgtctttcccccaccgcacaaaactggttcttaagatgccagcaatgaatttgagactatctttatttataaatggaaaccggaaacttttataccaaactataataatgtgcagcactgtagggcttttttttttttccctccaaatacagtgaaatttttttattcacaagagctgccacatctcagcatttagtaatagagctgctttaataaaattctagtttgattgtcatgtcaaaaaaagaaaaatgttgcatctttgtgattttaaaacataaattaatgaaggctctgataggctattaggagttggcttggaaacagtttttggtctcacaggttaccattgtttggggatgtctgagctgttttcagatctaggaatagcacagtgttgtcttgtctttggcagtctcatttggctctgtttcttgcaccaccagcgtgttcattaccacttaaatatattgctacagcagtggaacaacagagtggtgcaagacactgtagattaacggtagaggagaaattgtgcccttagtgttaacaatgtgccttttgttctgaatgccatgttgtagggcatgcattttttggcctctttaactcttcgaattctagtcagtaagaatggaacccatctctgcaaagatacatctgtcttaaatatctagttacaggccttaatagaaaccataaggcatgactcatcttcaggcactgaaaaaagataaccatcaggtagtgttacacaaggacttcctatatttaaggggttaaagatggtctttgttgtatcttaacatcagactgatttttacattttttttttgttatgctaacactagacaaaaatcaactgtatttgtaaaaatttacctcaaaccatttaattttatagtgtgattaatcccagggcatttggtatgaaccaaagtgcattccttttatatgtgcctggctctagtaaggatggccagggatttttacaatttgggtgcaaggcacttaagccacttttaaacttaatgggtggtttggggtcgtgttaaatgactccatcagaatgttagaaaacactttaggcatcagtagcattgggccatattggaatcctaaagtgtgaattattttaaggagagcattcatttttgtaatttttttcatcaaaaatatttctggtaagcagaagactttttaaaaaaactgatctggtctcggtaaaggttttaatattgcccaacataatgctgtaatagcattaaaaaaagtatttgtgaactctgtttcttaggggcttgtacatctctctgctatggacatacataaaattaattgtaattatactcagctcaactgctacagttctgtctaggcagtggcttgggtttttatcgagcaacaacttagacacgtgactgtaatatgctgcaactgtgtgtactgaaaatatgtgaaaatggttgaatgtggactgtgtatatatgtatgtaaaaatttctgtgagatgctgctgtcgccacttaacattaaatatgttctagtggattttaatcctagtggccagttctatgatactgtatgtattatacagctgatgacaggagtaagactgtttagtgaatatctgttaaattttattgttgtggccagagataatttcagaataaaattttaatgtcctacctta

SEQ ID NO: 2078 - DNA, 3226 bp, Homo Sapiens
  NM_003592
aggaggagggccgggcgggcaggggaggaggaggaggcgggcgccgtgtcgcacgcagctccaggcggggcagccccggtagctgagggacgcagctagaccttggcgggacggggctttcgccggggcccaggcccagggaccaggcggaggcgtcgcgggagcctttggggcaccacagagatgcgggtttgcctgcaatgagatttcattctctacatttaaaggacatcctttctgagctgctgtgaataaatttggaatggtactgtatattttcatctaatggagaactagctgtactttgaataaggattgctgcactggacgactttagaacatccctcacaatgtcgtcaacccggagccagaacccccacggcctgaagcagattggcctggaccagatctgggacgacctcagagccggcatccagcaggtgtacacacggcagagcatggccaagtccagatatatggagctctacactcatgtttataactactgtactagtgttcaccagtcaaaccaagcacgaggagctggagttcctccttctaagtcgaaaaaggggcagacacctggaggagctcagtttgttggcctggaattatataaacgacttaaggaatttttgaagaattacttgacaaatcttcttaaggatggagaagatttgatggatgagagtgtactgaaattctacactcaacaatgggaagattatcgattttcaagcaaagtgctgaatggaatttgtgcctacctcaatagacattgggttcgccgtgaatgtgacgaaggacgaaaaggaatatatgaaatctattcgcttgcattggtgacttggagagactgtctgttcaggccactgaataaacaggtaacaaatgctgttttaaagctgattgaaaaggaaaggaatggtgaaaccatcaatacaagattgattagtggagttgtacagtcttacgtggaattggggctgaatgaagatgatgcatttgcaaagggccctacgttaacagtgtataaagaatcctttgaatctcaatttttggctgacacagagagattttataccagagagagtactgaattcttgcagcagaacccagttactgaatatatgaaaaaggcagaggctcgtctgcttgaggaacaacgaagagttcaggtttaccttcatgaaagcacacaagatgaattagcaaggaaatgtgaacaagtcctcattgaaaaacacttggaaattttccacacagaatttcagaatttattggatgctgacaaaaatgaagatttgggacgcatgtataatcttgtatctagaatccaggatggcctaggagaattgaaaaaactgttggagacacacattcataatcagggtcttgcagccattgaaaagtgtggagaagctgctttaaatgaccccaaaatgtatgtacagacagtgcttgatgttcataaaaaatacaatgccctggtaatgtctgcattcaacaatgacgctggctttgtggctgctcttgataaggcttgtggtcgcttcataaacaacaacgcggttaccaagatggcccaatcatccagtaaatcccctgagttgctggctcgatactgtgactccttgttgaagaaaagttccaagaacccagaggaggcagaactagaagacacactcaatcaagtgatggttgtcttcaagtacatagaagacaaagacgtatttcagaagttctatgcgaagatgctcgccaagaggctcgtccaccagaacagtgcaagtgacgatgccgaagccagcatgatctccaagttaaagcaagcttgcgggttcgagtacacctctaaacttcagcgcatgtttcaagacattggcgtgagcaaagatctgaacgagcaattcaaaaagcacttgacaaactcagaacccctagacttggatttcagcattcaagtgctgagctccgggtcctggcccttccagcagtcttgtacatttgccttgccgtcagagttggaacgtagttatcagcgattcacagctttctacgccagccgccacagtggccgaaaattgacgtggttatatcagttgtctaaaggagaattggtaactaactgcttcaaaaacagatatactttgcaggcgtcgacattccagatggctatcctgcttcagtacaacacggaagatgcctacactgtgcagcagctgaccgacagcactcaaattaaaatggacattttggcgcaagttttacagattttattaaagtcgaagctattggtcttggaagatgaaaatgcaaatgttgatgaggtggaattgaagccagataccttaataaaattatatcttggttataaaaataagaaattaagggttaacatcaatgtgccaatgaaaaccgaacagaagcaggaacaagaaaccacacacaaaaacatcgaggaagaccgcaaactactgattcaggcggccatcgtgagaatcatgaagatgaggaaggttctgaaacaccagcagttacttggcgaggtcctcactcagctgtcctccaggttcaaacctcgagtccctgtgatcaagaaatgcattgacattctaattgagaaagaatatttggagcgagtggatggtgaaaaggacacctacagttacttggcttaacccttctggaagggtctgactgtgtgacccgcagcaaatagttcatgttggaaagaatgaaaacaactcaagttcatagcagccagcctgccgccattggacctcccttttaaaaactgagaccaagactcccatcagctggtctcggatttacatcggaactgctcaggattgatacatttcaagtctgtaaatacggacaccaacgccatttaccctaatttaagaacagcggggactgaccctccgtgccgagggctgcatgctaccgcactaagtcaatacatgggctccccgattcgcagctgtcgtcttggcagcacttgtcacgttggcagcactttgagagcaagtctgagtggacccacatgtaacctgctatgaaaaccatttgtatagtgtgtttcattttttaatgtgtgaaaataaagaaaattaaaggatttctgtacaagtcgcattgggttttgttttaagttttactaatttctatatgtaaataaaagatataatgattgtgcaaatttaaaaaaaaaaaaaaaaaa

SEQ ID NO: 2079 - DNA, 4860 bp, Homo Sapiens
  NM_003594
aacttgggggacccagcgaaatggaagaagttaggtgtccagagcacgggactttctgctttcttaagaccggcgtccgcgatggcccgaataaaggaaagagcttctacgtgtgccgggcagacacgtgcagcttcgtgcgggccaccgacattcctgtttcccattgcttattgcatgaggactttgtggtagagcttcagggtttgcttctgccacaggacaagaaagaatacagattgttcttccgatgcattagaagtaaggcagaggggaaacgctggtgtggaagtattccatggcaggatcctgattccaaagaacattctgtatccaataagtctcagcatgcatctgagacatttcatcattcttccaactggctgagaaatccattcaaggtacttgacaagaatcaagaaccagctctctggaaacagctcatcaaaggtgaaggtgaggaaaagaaggctgataagaagcaaagagaaaagggagatcagcttttcgatcaaaagaaagaacagaagcctgaaatgatggagaaagacctctcatctggcctggtaccaaagaaaaaacaatctgtagttcaagagaagaagcaagaagagggagcagagattcagtgtgaggcagagactggaggcacacacaaaagagacttttctgaaattaaatctcaacagtgccaaggtaatgagcttacaagaccatctgcatcttctcaggagaaatcaagtggtaagagtcaagatgtccaaagagaatcagaacctctgagagaaaaggttacccagcttttgcctcaaaatgttcacagtcacaactcaataagcaagccccagaaagggggacccctcaacaaggagtacacgaactgggaggctaaagaaacaaaggcaaaggatggccctagcatacaggccacccagaaaagcctgcctcaggggcatttccaagagcggccggagacccacagtgtgcctgctcctggaggaccagcggctcaggctgcaccagcagcaccagggctttccctgggtgagggccgtgaagctgccacaagcagtgacgacgaggaggaagatgatgttgtttttgtttcctctaagcctgggagccccctactctttgactcgactctggacttagagacgaaggaaaacctccaattccctgatcgaagtgtgcaaagaaaggtgtctcctgcctcaggtgtttccaagaaggtagaaccctcagacccagtagcccggcgtgtctaccttacaacacaactgaaacaaaagaagagcacactggcatcagtgaacatccaggctcttccagacaagggtcagaagttgatcaaacaaatccaggagctggaggaagtactcagtggtcttaccctttccccagagcaaggaactaatgagaagagtaacagtcaagtaccacagcagagtcacttcaccaaaactaccactggccctccccacctggtgcctccccaaccccttcctcgtcgtggtacccaacctgtgggttctctagaactaaagtctgcctgccaggtgactgctggaggatccagtcagtgctatcgaggccatacaaaccaagatcacgttcatgcagtgtggaaaatcacaagtgaagccatcggtcaactgcatcgctcacttgagtcatgtcctggtgagacggttgtggcagaagatcccgccgggctgaaggtccctttgctactacaccagaagcaggcattggcttggttactatggcgagaaagtcagaagccacaaggaggaattctggcagatgatatgggcttaggaaaaaccctgacaatgattgcgctcatcctgacccagaagaatcaagagaaaaaggaagaaaaggagaaaagcacagctttgacgtggctctccaaagatgactcttgtgactttacttcccatggaacactaatcatctgtcctgcctccctgatccatcattggaaaaatgaggtggagaaacgggtgaacagcaacaaactaagagtctatctctaccatgggccaaaccgggattcacgtgccagagtcctctctacatatgacatcgtgatcactacctatagcctcgtggccaaggagattcccacaaacaagcaagaggcagagatcccaggtgcaaacctcaatgtggagggcacctcaacacctttgcttcgaatagcctgggctcgaatcatattggatgaagctcacaatgttaagaatccccgagtgcagacttccatagctgtgtgtaagctacaagcctgtgcccgttgggctgtcactggaacccccattcaaaacaacttattggatatgtattcgctgctgaagtttctccgttgctctccatttgatgagttcaatctgtggaggagtcaggttgacaatggctcaaagaaaggaggagaacggttaagtattttaaccaagagccttttgctgaggagaacaaaagaccagctggactctactggcagacctttggtgatactgccccagcgtaaatttcagttgcaccatttaaagctttctgaagatgaagagactgtttacaatgtgttttttgcaagatcaaggtcagctctgcaatcctatctaaaaagacatgaaagtagaggcaaccaatctggaagaagccctaataatccattcagtagagtggcactggagtttgggtctgaggagcctagacactcggaggcagcagactcaccgagatccagcaccgtccacatactgtcccagttgctgagactccgccagtgttgctgtcatctttctttactgaagtcggccctggatccaatggaactgaagggtgaaggtcttgtcctttccctggaagaacagctcagtgctttgaccttgtcagaactccgtgactcagagccatcttccactgtttcccttaacggcaccttcttcaagatggagctttttgaaggcatgcgagagagcaccaagatttcatctctgttggcagaattggaggcaattcaaagaaattcagcatcccaaaagagtgtcattgtctctcagtggaccaacatgctgaaagttgtagcattgcacctgaagaagcatggactgacttatgccaccatcgatggctctgtcaatcccaagcagagaatggacttggtagaggcatttaaccactccagaggccctcaggtaatgctaatctctctcttggccggaggtgttggtctaaacctgactggaggaaatcacctctttcttttggacatgcactggaatccatcacttgaagatcaagcttgtgaccgaatttaccgagtagggcagcagaaagatgttgtcatacacagatttgtttgtgagggaacagtagaagaaaagatcttacagctccaagaaaaaaagaaagatttggccaaacaagttctatcagggtctggagaatctgtcaccaagctcaccttggctgacctcagagtcctttttggcatctaacctcctgtggataagggctcagaatagcaccattgctggtttgtattaggatctgggaataacaacctaaccatgagccttgaactctgttctttgcatttcaatttcaccgtcaagcctttcaccttcctcaaaatgaggcataatcttatccccagaattgaggaggggttgtgttaaccaattagttaaccaattatgttaataatttatttaatgagtggtatggaaaccaattgatttttttagataaaagaatatgttttagagttggatgattttggaaaacaactctggcagaattgtatataagcttcagtaaagttcaaaaagcgggccaggtgtggtggctcatgcctgtaatcccgacactttgggaggccaaggcaggaggatggcttgaagccagtagttcaagaccagcctgggcaacatagtaagaccccatctctatgaagaataaaaaaatgagctaggcgtggtagtgcacacctgtagtcctagctacttgggaggctgaggcaggaggatcccttgagtccaggaggttgaggctgcagtgagctgtgattgtgccactgttttccagcctgggcaatacagtgagaccctgtctcaaaaaaaggaaaaaaaagctcaaaaagttctgtgttgcctttctcttcttagctgatgatgggagaaccagttactaccttctctaacacaggctccatcctatctcttcatctcttcttgccagtgatgttgcacctgtaaccatctttttatgggtggagcagagagtcaatccctgcagccaccctgcagccagccatctctgcagttctctcagtgcaggcagttcttcctctcaggctgaagatcaaggagatgctttgtacatgaacagatgctgagtatctgttatcattgtattgtttagtgtcagtgtatcatttagtatttgtatcactgtaccatttagtgttgtatatcactcagtcatttaatattggttatcaccatacagtttaatatttgtatcatttggttcattgtatcgtttagtatttctattataacatttctatttgtagtatttgtataatatttgtgtcatttttaatagtatttgtatttttacaaatttgcagtatttgtagcatttagtatcattgtttcatttagtatttggtacaatctaataaatactaatccagtccaatactaatccaatccaatactaataatactattggtacaatccaatactaataatactattggtacaatccaatactaataatactaacagtagtattgatacaatctaataaataatgtgtttgacagtgtagcagaaaaaaaa

SEQ ID NO: 2080 - DNA, 2062 bp, Homo Sapiens
  NM_003596
agatgtgtgatcccgccacctccccggaccctggcggttgtcgctgagttggcgaccgcgggagacgctgctgaggcggcttcggttgcgggtcggaacggcgctgctctgcggggccggtccaggctggcagctgccggcgcttggcggtgagggcgggctcccgagtggccccccaccgaaggcggtgggaccagcggctgaggccaggatgccgtccaggcggcgcggcggctcctcactcatcccagatgttggttatctttctgaagtagactgtccatggcctgaacattttccgaaaatcattttgagcaaaatatctgtttaataacaagataaccacatcaagatggttggaaagctgaagcagaacttactattggcatgtctggtgattagttctgtgactgtgttttacctgggccagcatgccatggaatgccatcaccggatagaggaacgtagccagccagtcaaattggagagcacaaggaccactgtgagaactggcctggacctcaaagccaacaaaacctttgcctatcacaaagatatgcctttaatatttattggaggtgtgcctcggagtggaaccacactcatgagggccatgctggacgcacatcctgacattcgctgtggagaggaaaccagggtcattccccgaatcctggccctgaagcagatgtggtcacggtcaagtaaagagaagatccgcctggatgaggctggtgttactgatgaagtgctggattctgccatgcaagccttcttactagaaattatcgttaagcatggggagccagccccttatttatgtaataaagatccttttgccctgaaatctttaacttacctttctaggttattccccaatgccaaatttctcctgatggtccgagatggccgggcatcagtacattcaatgatttctcgaaaagttactatagctggatttgatctgaacagctatagggactgtttgacaaagtggaatcgtgctatagagaccatgtataaccagtgtatggaggttggttataaaaagtgcatgttggttcactatgaacaacttgtcttacatcctgaacggtggatgagaacactcttaaagttcctccagattccatggaaccactcagtattgcaccatgaagagatgattgggaaagctgggggagtgtctctgtcaaaagtggagagatctacagaccaagtaatcaagccagtcaatgtaggagctctatcaaaatgggttgggaagataccgccagatgttttacaagacatggcagtgattgctcctatgcttgccaagcttggatatgacccatatgccaacccacctaactacggaaaacctgatcccaaaattattgaaaacactcgaagggtctataagggagaattccaactacctgactttcttaaagaaaaaccacagactgagcaagtggagtagcagaaccaggagcctcttccatacatgaggaaagattgctgccttttcagcagaagggaaattcctaggattggctgtcccctgccaagcttggtggagcgtctgcaccttggctgcgccgcctgtgcatttgccagtttcctcccactgagaggatggaggtgtccgcacagctttgggcctcgtgagggatctgcctcctgagcaaagagctcttgatcccgatttcatgcacagccctgcagtaaggagcccagaaggaacatgtgtttcctgttaaaactcctcttgttctcttttcttacattatgacgtttgttttcaaggagagggtttaaaaatgggatcctgtaagcagacttgggcagtctccttttgaaataggttgtctgtacatgttctaatgttttgtagaacacgtgtgcctgtttaagtgtattgatgtgaataatattaaatatcctaattatttaattcattgtattgtttctgagaagttgggaaattaccattatacatttacaacctaatgacttttgtattttatttttcaaaataaaagctttcaatgtgaagcattctggtaaaaaaaaaaaa

SEQ ID NO: 2081 - DNA, 2389 bp, Homo Sapiens
  NM_003609
agcgacgcggtgacgccacaaaaatggcggacgctggaaagcgccgttcctgactctaatgtacttagacacttgaagccacaaaaggatttatccccgaggttcctcatctgctcgcgaggatgccttttctcttctgccttgcgaaataacagcagcctagctgttgcccgtgaccagtgagaaaggcagcgtcgcgggctgattaggtttcacccaaagggtgccggcgccgaattggtttctaacgagaacttttaaaatgatccgttccaaaaaagggtaggagccgcgagaccctccaactgcccagagaaaacaagtctcgtctggcaaagttctcggcccacgcggtccgcggccaagggccaacggtccctcgccccacgttgccgcagcactgcgcgtgcgcgagccgctgtcaaacgcgctgacggaggccgagaagaaaaaaaggcgggagccgtcaatcccgggttgagcaaaatggcgcgggagaaggagatgcaggagttcacccgtagcttcttccgaggccgcccggacctcagcacgcttacgcattccatcgtgcggcggaggtacttagctcactcgggccgcagccacctggagcccgaggagaagcaggcactgaagcggctggtggaggaggagctgctgaagatgcaggtggatgaagccgcttccagggaagacaaactggaccttaccaagaagggcaagaggcctcccaccccttgtagcgacccggagagaaaaaggttccgcttcaattcagagtcggagtccggctctgaagcctccagcccagactactttggacccccagcaaagaatggggtggcagcagaagtcagcccagccaaagaggagaatccaaggcgagcctcaaaggcagttgaggagagcagtgatgaggaacggcagagggacctgcccgcacagaggggagaggagagcagtgaggaggaggaaaaggggtacaaggggaagactaggaagaaacctgtggtaaagaagcaggcaccaggcaaggcctcagtcagtaggaagcaggccagggaagaaagtgaggagagcgaggcagaacccgttcagaggacagcaaagaaggtggagggaaataaaggaactaaaagcctgaaggaaagtgaacaggagagtgaagaggagatcctagcccagaagaaagagcagagagaggaggaagtggaggaggaagagaaagaagaggatgaggaaaagggggattggaaacccagaaccaggagcaatggccggagaaagtcagctagggaggagaggagctgtaagcagaaaagccaggcaaagaggctcttgggagactcagacagcgaggaagagcagaaagaggcagccagcagtggggatgacagtgggagagatagagaacccccagtgcagaggaagagtgaggacaggacccagcttaagggtgggaagaggttgagtggaagcagcgaggacgaggaagacagtgggaagggggaacccacagctaaaggctctagaaagatggccagactgggcagcaccagtggtgaggaaagtgacttggagagggaggtaagtgacagcgaggcagggggaggcccccagggggagaggaagaaccgctcttccaagaagagctccaggaaaggcaggacacgaagctcctcttcctcctcagatggaagtccagaggccaaaggagggaaggctggctcaggtcgccgtggagaggaccacccggctgtgatgaggctgaagcgctacattcgggcctgtggtgcccatcgaaactacaagaagctgttgggctcctgttgctcacacaaggagcgcctgagtatcctccgggcagaactggaagcgctaggcatgaagggtaccccttccctagggaagtgtcgggccctgaaggagcagagggaggaggcagctgaggtggcctccttggatgttgcgaacatcatcagtggctcgggccggccacgcagacgtacagcctggaaccctttaggagaagcagcacccccaggggagctgtaccgacggaccctggactcagatgaagagcggccccgtcccgcacccccagactggtcacatatgcgtggcatcatcagcagtgatggcgagagtaactgagctctgccacccccaggagggacccttgatacatgtacaaagcatacatagcaccccttgccctgtgtctgtggaacagaagcagcttccttcagagaagactgcagctcccaaggacacaagctgttgggatgctacttctcagcttcacgctgtccctttaaggtgtttattttttaagactcaataaaggagtgtttttaatcacctcatcaaaaaaaaaaaaaaaaaa

SEQ ID NO: 2082 - DNA, 1815 bp, Homo Sapiens
  NM_003610
agcagtcgcttagtaacttgcagcggctacatcaactttggaccaattcgcaaactgctggtgtaaagcgtttttgcgcatgtgctgtcgccttgcgggaaaaggagcctttttcttcgacgatttccgggcgacgcaggaagtggctccagggcgcacgcgcgttgtttccgcggtagtcagggcagtttctaccgcaggcttaaggaggcttcgggctcctgggatttctgtccgcgctcctggccctcgtccttcgcgccagagcaggttcgcaaactcctcagacccttctgctcccggccgccgctttccgccggggcgagacccccaggttcaaaatgagcctgtttggaacaacctcaggttttggaaccagtgggaccagcatgtttggcagtgcaactacagacaatcacaatcccatgaaggatattgaagtaacatcatctcctgatgatagcattggttgtctgtcttttagcccaccaaccttgccggggaactttcttattgcaggatcatgggctaatgatgttcgctgctgggaagttcaagacagtggacagaccattccaaaagcccagcagatgcacactgggcctgtgcttgatgtctgctggagtgacgatgggagcaaagtgtttacggcatcgtgtgataaaactgccaaaatgtgggacctcagcagtaaccaagcgatacagatcgcacagcatgatgctcctgttaaaaccatccattggatcaaagctccaaactacagctgtgtgatgactgggagctgggataagactttaaagttttgggatactcgatcgtcaaatcctatgatggttttgcaactccctgaaaggtgttactgtgctgacgtgatataccccatggctgtggtggcaactgcagagaggggcctgattgtctatcagctagagaatcaaccttctgaattcaggaggatagaatctccactgaaacatcagcatcggtgtgtggctatttttaaagacaaacagaacaagcctactggttttgccctgggaagtatcgaggggagagttgctattcactatatcaaccccccgaaccccgccaaagataacttcacctttaaatgtcatcgatctaatggaaccaacacttcagctcctcaggacatttatgcggtaaatggaatcgcgttccatcctgttcatggcacccttgcaactgtgggatctgatggtagattcagcttctgggacaaagatgccagaacaaaactaaaaacttcggaacagttagatcagcccatctcagcttgctgtttcaatcacaatggaaacatatttgcatacgcttccagctacgactggtcaaagggacatgaattttataatccccagaaaaaaaattacattttcctgcgtaatgcagccgaagagctaaagcccaggaataagaagtagtggctggagactctggctcagccagagttgtttctctccactctgcctcatctctgtacgaatttgggtcccagccttgttgggttgtcagccatggacatggatttcaacccctggagaaaacgatgtcattgttcagcagctgagagcccaggcgtccgcggcgacttgccgtctctccattccactgcctgttgcagagtttttctgtaactaagggggttgaggttattgtagacgttagattgcgggcaccgccagggattttgcagcgcttcagtgtacgtgttagagaatattggaaaagcgtctgtgagccccgtgctgtattttgtaataaagtcttttgcagattgcttcccgaaaa

SEQ ID NO: 2083 - DNA, 3654 bp, Homo Sapiens
  NM_003611
aaggctatatttagcaggtttccggaagttgccggactggctgtgaggcggtcctgcctcgctgccttcagtccctagtgtctgggtccccgccctccagccgcctttgagtcgtgcctgggtcctcgcccttgcctcagaaccgcgaagaaaggaagctcgcgtgtttgctagaaaacctagttgggagtgcgaggcagagaacgttcagcacctttgttcctcccgaaccctcgggacagaggcagggttctgagggcagggattccccctcgtcttggccccaccgcccgggctgggcactaaactcgggccgcggcggggcgagcgaggcgggctccggagggagctgacgcctgatgatggcgcagtccaacatgtttaccgtggctgatgtgttgagtcaagatgaactgcgcaaaaagctataccagacgtttaaggatcggggtatactggatacactcaagacacaacttcgaaaccagctaattcatgagttgatgcaccctgtattgagtggagaactgcagcctcggtccatttcagtagaagggagctccctcttaataggcgcctctaactctttagtggcagatcacttacaaagatgtggctatgaatattcactttctgttttctttccagaaagtggtttggcaaaagaaaaggtatttactatgcaggatctattacaactcattaaaatcaaccctacttccagtctctacaaatcactggtttcaggatctgataaagaaaatcaaaaaggttttcttatgcattttttaaaagaattggcagaatatcatcaagctaaagagagttgtaatatggaaactcagacaagttcgacatttaacagagattctctggctgagaagcttcagcttattgatgatcagtttgcagatgcttaccctcagcgtatcaagttcgaatctttagaaataaagctaaatgagtataagagagaaatagaagagcaacttcgggcagaaatgtgtcaaaagttgaagttttttaaagataccgagatagcaaaaattaaaatggaagcaaaaaaaaagtatgaaaaggagttaaccatgttccagaatgattttgaaaaagcttgtcaagcaaaatctgaagctctcgttcttcgggaaaagagtacccttgaaagaattcacaagcaccaagagattgaaacaaaagaaatttatgctcaaaggcaacttttactaaaagatatggatttgctaagaggaagagaagcagagctgaagcaaagagttgaagcttttgaattgaaccagaagctccaggaagaaaaacataaaagcataactgaggcacttaggagacaggagcagaatataaagagttttgaggagacctatgaccgaaagctcaagaatgaacttctaaagtatcaacttgaactgaaggatgactacatcattagaactaatcgactgattgaagatgaaaggaagaataaagaaaaagctgttcatttgcaagaggagctcatagctattaattcaaaaaaggaggaactcaatcaatctgtaaatcgtgtgaaagaacttgagcttgaattagagtctgtcaaagcccagtctttggcaataacaaaacaaaaccatatgctgaatgaaaaggttaaagagatgagtgattattcactactaaaagaagagaaactggagcttctggcacaaaataaattacttaaacaacaactggaagagagtagaaatgaaaacctgcgtctcctaaaccgcctagctcagccggctcctgaacttgcagtctttcagaaagaactacggaaagccgaaaaggctatagtggttgagcatgaggagttcgaaagctgcaggcaagctctgcacaaacaactgcaagacgaaattgagcattctgcacagctgaaggcccagattctaggttacaaagcttctgtaaagagtttaactactcaggttgccgatttaaaattgcaactgaagcaaactcagacagccctagagaatgaagtgtactgcaatccaaagcagtctgtgatcgatcgttctgtcaatggattaataaatggcaatgtggtgccttgcaatggtgagataagtggggatttcttgaacaatccttttaaacaggaaaacgttctagcacgtatggttgcatcaaggatcacaaattatccaactgcatgggtggagggtagttcccctgattctgaccttgagtttgtagccaatactaaggcaagggtcaaagagcttcagcaagaggccgaacgcttggaaaaggctttcagaagttaccatcggagagtcattaaaaactctgccaaaagcccactagcagcaaagagcccaccatctctgcacttgctggaagccttcaaaaacattacttccagttccccggaaagacatatttttggagaggacagagttgtctctgagcagcctcaagtgggcacacttgaagaaaggaatgacgtcgtggaagcactgacaggcagtgcagcctcgaggctccgcgggggcacttcctccagacgcctctcttccacaccccttccaaaagcaaaaagaagcctcgaaagtgaaatgtatctggaaggtctgggcagatcacacattgcttcccccagtccttgtcctgacagaatgcccctaccatcacccactgagtctaggcacagcctctccatccctcctgtctccagccctccggagcagaaagtgggtctttatcgaagacaaactgaacttcaagacaaaagtgaattttcagatgtggacaagctagcttttaaggataatgaggagtttgaatcatcttttgaatctgcagggaacatgccaaggcagttggaaatgggcgggctttctcctgccggggatatgtctcatgtggacgctgctgcagctgctgtgcccctctcatatcagcacccaagtgtagatcagaaacaaattgaagaacaaaaggaagaagaaaaaatacgggaacagcaagtgaaagaacgaaggcagagagaagaaagaaggcagagtaacctacaagaagttttagaaagggaacgaagagaactagaaaaactgtatcaggaaaggaagatgattgaagaatcactgaagattaaaataaaaaaggaattagaaatggaaaatgaattagaaatgagtaatcaagaaataaaagacaaatctgctcacagtgaaaatcctttagagaaatacatgaaaatcatccagcaggagcaagaccaggagtcggcagataagagctcaaaaaagatggtccaagaaggctccctagtggacacgctgcaatctagtgacaaagtcgaaagtttaacaggcttttctcatgaagaactagacgactcttggtaaccatgtttgctgcccagcttctaacttacataccgtgagaagttacgtaacatttactcctttgtaaatgtttccctatcatcagacaaaactcaataaaaatgtgtgtaatccaatgtgggtttttttttccataattaattttgataccatagtgtgtgaaccaagaataatctagtcacgtgaaacctcttctccagtcatagtatttctcattcattataataaaagtaactggcttttaacctccttaaaa

SEQ ID NO: 2084 - DNA, 7757 bp, Homo Sapiens
  NM_003615
ctcactgtccctggaatcttcaagggagttactgcattacatcatcagaaacaaggcatttctatattactatggaaagatttcgtctggagaagaagttacctggtcctgatgaagaagctgttgtggatcttggcaaaactagctcaactgtgaacaccaagtttgaaaaagaagaactagaaagtcatagagctgtatatattggtgttcacgtcccgtttagtaaagagagtcgtcggcgtcataggcatcgcggacacaaacatcaccaccggagaagaaaagataaagaatcagataaagaagatggacgggaatctccttcttatgatacaccatcccagagagttcagtttatccttggtactgaagatgatgatgaagaacatattccccatgatctcttcacggaaatggatgaactgtgttacagagatggagaagaatatgaatggaaagaaactgctagatggctgaaatttgaagaggatgttgaagatggcggtgaccgatggagtaaaccttatgtggcaactctctctttgcacagtctttttgaactaaggagttgcatcctcaatggaacagtcatgctggatatgagagcaagcactctagatgaaatagcagatatggtattagacaacatgatagcttctggccaattagacgagtccatacgagagaatgtcagagaagctcttctgaagagacatcatcatcagaatgagaaaagattcaccagtcggattcctcttgttcgatcttttgcagatataggcaagaaacattctgaccctcacttgcttgaaaggaatggggaaggcctttcagcctcccgccactctttgcgaacaggtctgtctgcctcaaacctttccttgagaggagaatcacctttatctcttcttcttggtcatcttcttccttcttcaagagctggaacccctgcaggctcaaggtgtacaaccccagtacccacccctcaaaacagtcctccttctagccctagcatcagccgcctgacctccagaagttcccaagagagtcagcgtcaggccccagaactactggtttcacctgccagtgatgatattcccacagtagtaattcatccgcctgaggaagacttagaagcagcgctgaaaggcgaggagcagaagaatgaggaaaatgttgacttaactccaggtattttggcctctccccagtctgctcctggaaacttggacaatagtaaaagtggagaaattaaaggtaatggaagtggtggaagcagagaaaatagtactgttgacttcagcaaggttgatatgaatttcatgagaaaaattcctacgggtgctgaggcatccaacgtcctggtgggcgaagtagactttttggaaaggccaataattgcatttgtgagactggctcctgctgtcctccttacagggttgactgaggtccctgttccaaccaggtttttgtttttgttattgggtccagcgggcaaggcaccacagtaccatgaaattggacgatcaatagccactctcatgacagatgagattttccatgatgtagcttataaagcaaaagacagaaatgacctcttatctggaattgatgaatttttagatcaagtaactgtcctacctccaggagagtgggatccttctatacgcatagaaccaccaaaaagtgtcccttctcaggaaaagagaaagattcctgtgtttcacaatggatctacccccacactgggtgagactcctaaagaggccgctcatcatgctgggcctgagctacagaggactggacggctttttggtggtttgatacttgacatcaaaaggaaagcaccttttttcttgagtgacttcaaggatgcattaagcctgcagtgcctggcctcgattcttttcctatactgtgcctgtatgtctcctgtaatcacttttggagggctgcttggagaagctacagaaggcagaataagtgcaatagagtctctttttggagcatcattaactgggattgcctattcattgtttgctgggcaacctctaacaatattggggagcacaggtccagttctagtgtttgaaaaaattttatataaattctgcagagattatcaactttcttatctgtctttaagaaccagtattggtctgtggacttcttttttgtgcattgttttggttgcaacagatgcaagcagccttgtgtgttatattactcgatttacagaagaggcttttgcagcccttatttgcatcatattcatctacgaggctttggagaagctctttgatttaggagaaacatatgcatttaatatgcacaacaacttagataaactgaccagctactcatgtgtatgtactgaacctccaaaccccagcaatgaaactctagcacaatggaagaaagataatataacagcacacaatatttcctggagaaatcttactgtttctgaatgtaaaaaacttcgtggtgtattcttggggtcagcttgtggtcatcatggaccttatattccagatgtgctcttttggtgtgtcatcttgtttttcacaacattttttctgtcttcattcctcaagcaatttaagaccaagcgttactttcctaccaaggtgcgatcgacaatcagtgattttgctgtatttctcacaatagtaataatggttacaattgactaccttgtaggagttccatctcctaaacttcatgttcctgaaaaatttgagcctactcatccagagagagggtggatcataagcccactgggagataatccttggtggaccttattaatagctgctattcctgctttgctttgtaccattctcatctttatggatcaacaaatcacagctgtaattataaacagaaaggaacacaaattgaagaaaggagctggctatcaccttgatttgctcatggttggcgttatgttgggagtttgctctgtcatgggacttccatggtttgtggctgcaacagtgttgtcaataagtcatgtcaacagcttaaaagttgaatctgaatgttctgctccaggggaacaacccaagtttttgggaattcgtgaacagcgggttacagggctaatgatttttattctaatgggcctctctgtgttcatgacttcagtcctaaagtttattccaatgcctgttctgtatggtgttttcctttatatgggagtttcctcattaaaaggaatccagttatttgaccgtataaaattatttggaatgcctgctaagcatcagcctgatttgatatacctccgttatgtgccgctctggaaggtccatattttcacagtcattcagcttacttgtttggtccttttatgggtgataaaagtttcagctgctgcagtggtttttcccatgatggttcttgcattagtgtttgtgcgcaaactcatggacctgtgtttcacgaagagagaacttagttggcttgatgatcttatgccagaaagtaagaaaaagaaagaagatgacaaaaagaaaaaagagaaagaggaagctgaacggatgcttcaagatgatgatgatactgtgcaccttccatttgaagggggaagtctcttgcaaattccagtcaaggccctaaaatatagtcctgataaacctgtgagtgtgaaaataagttttgaagatgaaccaagaaagaaatacgtggatgctgaaacttcattatagaattgaaccaagaggcattatacatatagatatatacatatgtaatgtgtgcgtatcatgtcactatatataagaatattgtatgtcatgctgtttatgtgtgactaccgggtttttaaaagtagtgtctggagtttgtaatgagcaccgtggagactatgtatttaatgaaatgctctctttgaagtgaggtacatggttcttaactattcaaatatttattctgttagaaaaaaaaattttctgttttgcaatagaaggatgtggagaaatgctttcagtctacttttcttaaatctctgttcatcagtggcaattcgtaaaaaccttaagtgatactttgtttatatgtttataatttttaggtgtttcctgaaattttcacatattatttcacttttgttagtgctttatgggaagaatagggagtctataccagtgctgtgggaaaaatggtaacatttcagggcttctctatttgtgtttcatttctgtagatgtccatcgtgtttcactaactggcgttttcttagccatagagatgactgtagaacaatagaaactttaataatgatagtttttaacttttatgtttaaattttttttaaatcttaaaaccttcatatctaggtatccattgtgacagacaagtaaaattgcaggtgatttgataattaagcacccataccatttataacttctgaatttaaaaagttatacaatgccagtttgcaatagttgattttgatgcctttgtagaatattttttctgaatccttatgctcttttaaagccaatgattcccactctgttctctgccttgtctctctttgtcttaaaatgctttagtttccatcaggttcaagttcttgactattattctcttataagtagtaggcgtaaataatcaggagttagaattctctcagaagggtctatgatcagtattactttattaagaattacctttcattttctctttatgttattctttcacttttgtagattacatttaatagcttgttacctgtgattttattttaaaatatttattttgatatgatgcttaaatattatataaacatttggaaaagtaacaaatagagtaaattgttaatgtaaatagttggtgcttactttcatttatgtttattatcttaaagcaattgatagattttacatctttgatataaagcactgccatatttatattttaaaaggaaattagacattttatatgtagctcagattaatgacatttttattttgtgtattagtttttgcttttctgagctttttaaagtctaacaaatctttttagtcatcttttatatacttttagttccacatgaaataaatgttgttaagcctgtaggactggatgaatggggttgtgaaactgatttgacaagagaataatttacaaaaatcaaatgagtattgagaagccacagaaatatcaaaaatggtgacatcactattaggatgaaaattttatgaaattccaatgctccctttaaccatataattaaattacaaaggtatacataattaatctaataaaggatcatgaggaatgccaaaagctgaaattttagcaagtctggtgttttaaattcattataaactatttattaactaatgtaatgtcctcctctaagaccatattgtaagagtcttgttaaaatgatggattcaacttctgcctcggatgagaggttggaaatgtagctgcttttctttagaaaatatgtagctgtcatcatttggtactgcctaaaaagagttagactctattggcaattgatagagtattacccacggtgcttattattgtttatgagcttccattgtaatgattcctttttatttgtagcagcataattatttccaaagaccccagtatttgctgctatttttaaaactcccctgatgtacctgaacaagaggatttcctcacatcatttccttgtgtctggacatcaggggtaacaactgtacttactttacaggaagaaattttaaaactgaaaactacctgggatcatagtgtttctgtgattttatttaattgtgtatagtaattatccagtgccagaaaaaccgtcacttgcaaaatactttgcactcaaaatgtttttacaatgcttctaaatgttactggtttctgctttcttttgactacttgactgacaaaatgatctgactactccatttaagagcaaaggtaactcatgtttaggtaattaactgcttgttttaagtgattatatttcttccactgtttttgaaaaataatcaaagatagcattcattgagagacagtgacagatataatttactacatatattgatttttaaataaagttgccttaaataagtgtatgtaagcagtagtagttgctatgtactgatttacctcaaggtgcaaaataattaaacctgtacatattccatttacaaaataaattcagccctgcactttctttagatgccttgatttccagaatggagcttagtgctactgaataccctggccacagagccacctcaggatattcttttctccaccctagtttatttatttatagatatctgtttacaaagtctgtagtaaatcctgatgctgaccatctgaaatgtactttttttctgaatgctgtttcaatctaaaatagcagcttttgagaaaacaatgatgtaaattccttatgataaaaggatgattctatatattctttaatgatattaaatatgccgaagccaagcacacagtctttctaaagtgtgtgtatgtttgtgtgaatgtgaatgatactgatcttatatctgttaaaagttgttttaaaaagctgtggcatcccattgttcatatttgccaagtcttctgtaaagatgtctaggacgaaatattttatgtgctaatgcatgtatttgtaaaccagatttgtttaccactcaaaattaacttgttttcttcatccaaaaaagtttatttcttccacgtacttaaattttctgtgtgggtataatatagctttctaatttttttctttcacaaaggcaggttcaaaattctgttgaaagaaaaatgctttctgaaactgaggtataacaccagagcttgctgtttaaaggattatatgatgtacatcagttctataaatgtgctcagcagtttaacatgtgaatcctgttttaaagtgctcagatttcaactgtgtaagccattgatataacgctgtaattaaaaatgtttatatgaaataacttaatgttttaaatttatttatgtagatcacatcatttttatcgtatgcagtgcaaatatgtgaaatgtcttttggtttattccaacaattatttattttagaaagtaagtttaaagactttaaggacattcaaagtttaaaatagtgttcaaattgcaaaatttggcaatcttcatataaattggtttcttttctaacttttcaaaaactaacattaaatgtcaattataggaaaacatagttggaaatgtaatcatccaaagatcatttttaaaatgaaatttaattagcacatattgaacatttgacttaattgttaaaccccagttttgttttgtttttttaatcagatttttgcacactgattagtttttgtgttgtggcttttgttgctttattattcaaggttttttttttttttcttccccatgggggagattgtcttccaatgtttaactacgtttaaataaataaaaattgaattttattgttcatttatataaaatctgataccttgatgtaatttcacaatacagttccaatttttatggcttttataattacaatgatattttcttctataataaaatccaaagtaaacatttaaattgtagaactgatatttttcatttatatgaagtataagcctctactgggtctatattgtgaatcatcctgcctttcaaatttgtttcataattgttagatgaaaactatttttttggagatgttactgaagttgattgagcaataaaagtctacttaatta

SEQ ID NO: 2085 - DNA, 3582 bp, Homo Sapiens
  NM_003621
gctgaccaggccggtcccccgggaacaggaaccctggtggacgggtcccagcaggcttcttcggtgcccgagagggagcgggtgcccaagggggtggtccctgtggcaggtcccggggtgggggcgcggcgctccgggaagagccttccgcaggtccccgccccgtcacgtgggcgccggccccggccgctgcggtcggtccgctggttggtcgggcgcttggtccggcagttggtcggtgggccagtggcccgtcgctcgcttctgggctctcatgtttgaaggtgggagggacacgggagcggcccgcacacctgagccgcccggagaggagcctcggccccgtacccagtaagaagaggaggaggccaggcaggcaaaaggagtcatggcttctgatgctagtcatgcgctggaagctgccctggagcaaatggacgggatcattgcaggcactaaaacaggtgcagatcttagtgatggtacttgtgagcctggactggcttccccggcctcctacatgaaccccttcccggtgctccatctcatcgaggacttgaggctggccttggagatgctggagcttcctcaggagagagcagccctcctgagccagatccctggcccaacagctgcctacataaaggaatggtttgaagagagcttgtcccaggtaaaccaccacagtgctgctagtaatgaaacctaccaggaacgcttggcacgtctagaaggggataaggagtccctcatattgcaggtgagtgtcctcacagaccaagtagaagcccagggagaaaagattcgagacctggaagtgtgtctggaaggacaccaggtgaaactcaatgctgctgaagagatgcttcaacaggagctgctaagccgcacatctcttgagacccagaagctcgatctgatgactgaagtgtctgagctgaagctcaagctggttggcatggagaaggagcagagagagcaggaggagaagcagagaaaagcagaggagttactgcaagagctcaggcacctcaaaatcaaagtggaagagttggaaaatgaaaggaatcagtatgaatggaagctaaaggccactaaggctgaagtcgcccagctgcaagaacaggtggccctgaaagatgcagaaattgagcgtctgcacagccagctctcccggacagcagctctccacagtgagagtcacacagagagagaccaagaaattcaacgtctgaaaatggggatggaaactttgctgcttgccaatgaagataaggaccgtcggatagaggagcttacggggctgttaaaccagtaccggaaggtaaaggagattgtgatggtcactcaagggccttcggagagaactctctcaatcaatgaagaagaaccggagggaggtttcagcaagtggaacgctacaaataaggaccctgaagaattatttaaacaagagatgcctccaagatgtagctctcctacagtggggccacctccattgccacagaaatcactggaaaccagggctcagaaaaagctctcttgtagtctagaagacttgagaagtgaatctgtggataagtgtatggatgggaaccagcccttcccggtgttagaacccaaggacagccctttcttggcggagcacaaatatcccactttacctgggaagctttcaggagccacgcccaatggagaggctgccaaatctcctcccaccatctgccagcctgacgccacggggagcagcctgctgaggctgagagacacagaaagtggctgggacgacactgctgtggtcaatgacctctcatccacatcatcgggcactgaatcaggtcctcagtctcctctgacaccagatggtaaacggaatcccaaaggcattaagaagttctggggaaaaatccgaagaactcagtcaggaaatttctacactgacacgctggggatggcagagtttcgacgaggtgggctccgggcaaccgcagggccaagactctctaggaccagggactccaagggacagaaaagtgacgccaatgccccctttgcccagtggagcacagagcgtgtgtgtgcatggctggaggactttggcctggctcagtatgtgatctttgccaggcagtgggtatcttctggccacaccttattgacagccacccctcaggacatggaaaaggagctaggaattaagcacccactccacaggaagaagcttgttttagcagtgaaagccatcaacaccaaacaggaggagaagtctgcactgctagaccacatttgggtgacaaggtggcttgatgatattggcttaccccagtacaaagaccagtttcatgaatctagagttgacggacgaatgctgcaatacctaactgtgaacgatttactcttcttaaaagtcaccagccaactacatcatctcagcatcaaatgtgccattcacgtgctgcatgtcaacaagttcaacccccactgcctgcaccggcggccagctgatgagagtaacctttctccttcagaagttgtacagtggtccaaccacagggtgatggagtggttacgatctgtggacctggcagagtatgcacccaatcttcgagggagtggagtccatggaggcctcattatcctggagccacgcttcactggggacaccctggctatgcttctcaacatccccccacaaaagacgctcctcaggcgccacctgaccaccaagttcaatgccttgattggtccggaggctgaacaggagaagcgagagaaaatggcctcaccagcttacacaccactgaccaccacagccaaagtccggccaaggaaactaggattttcacacttcggaaacataagaaaaaagaagttcgatgaatcgacggactacatttgcccaatggagcccagtgacggtgtcagtgatagtcacagggtctacagtggctaccggggcctcagcccccttgatgcccctgaactggatgggctggaccaggtgggacagattagctgatgcccttgtcacctgccctctgtgcaccctgagagctcacagtaacactgtgtgtgtcaccatataactgcacctcacccccgcacgtgtgcatgactcgcagagaatattccagcaattgtgtacccctgggccagtctctttgaaccctgagggtggccaggatctggagctgcatctctaaggggccaggctttggggaccattgccaaaggtggactcaggaggaaagacacttaaagacacttttacatgtctagtaattcttgatgttcatcttcagcaccagtggaaacacatgaacttcgatgcaggtccagagaccatggacactcccacgaggctcagctctcaggcaccccctacacttcagttgagggaaaagctcaagtgccttaggcccgtggaccacagtcttggctgagatcaaagggatgagcaacagggacttctgccacagtgacaatggaattgtgttgtgccttacttcagaggtggtctcttctttcttgtaataaaagcaatatttatgcggaaagcaaaaaaaaaaaaaaaaaaaaaaa

SEQ ID NO: 2086 - DNA, 3400 bp, Homo Sapiens
  NM_003624
agatggctcgtgcgcaggtgcgtgctaggagcgcggctcgtcagggcaggctgctctgcagggcaggcgatccggggctcgcctccgcgcggcattcagcgcgcaggcgcgagctggccgcctcacacggagtcggcttgttaagtgcgcacgcgcgggagtttctggcagaaagcaggcgagcctgggccggcgcggggccttgtgggagggcttaaggaagtaaaatggcggacctggcgaacgaagaaaagcctgccattgctccgcccgtctttgtgtttcagaaggataaaggacaaaagtcccctgcagagcaaaaaaacttgtcggattcgggagaggagcctcggggggaggctgaggccccccaccatggcacgggtcaccccgagtcagctggcgagcatgccctagaacctcctgcccctgctggcgcctcagccagcactcctccgcctcccgctcctgaagcccagcttcctccttttccgcgagaactggcagggaggtcagctggcggctccagtcctgaaggcggagaagattctgacagagaagatggaaattactgccctcctgtcaagcgagaaagaacatcctctttaacccagttcccaccctcacagtcagaggaaaggagcagtggcttccggttgaagccaccaacgctgatccacggccaagcccccagcgcaggtctgccaagccagaagcccaaggagcagcagcggagcgtgcttcgcccggcagtgttacaagctccgcagccaaaggcgctgtcccagactgtccccagcagtggcaccaacggggtcagcctcccagcagactgcacgggggcagtgcccgcagcatcccctgacactgctgcatggagaagtccttccgaagctgccgatgaggagaaagagccccagaaaaatgagtccagcaatgcctctgaagaggaagcctgtgagaaaaaagaccccgccacacagcaagcctttgtatttgggcagaacttgagggacagagttaagctgataaatgagagcgtggacgaagccgacatggagaatgctggacaccccagcgcagacacgccaaccgcaacgaactatttcctccagtatatcagttccagtttagagaactcaaccaatagtgccgacgcctccagcaacaaatttgtatttggccagaacatgagcgagcgagttttgagccccccaaaattaaacgaggtcagttcagatgccaacagggaaaatgcagctgccgagtcagggtctgagtcctcgtcccaggaggccacccctgagaaagagtccctggctgagtcggcagccgcctacaccaaggcaacagcgcggaagtgtttgttggaaaaagtggaagtcatcaccggggaggaggcggagagcaatgtgttacagatgcagtgcaagctgtttgtctttgacaagacctcacagtcctgggtggagagaggccgggggctgctcagactcaatgacatggcgtccaccgatgacggcacactacagtcccgactagtgatgcggacccaggggagcctgcgactgatcctcaacaccaagctgtgggcccagatgcagatcgacaaggccagcgagaagagcattcgcatcacagccatggacaccgaggaccagggcgtgaaggtcttcctgatctcggccagctccaaggacacaggtcagttgtatgcagccctgcaccaccgcatcctggccctgcgcagccgcgtggagcaggagcaggaggccaagatgcccgcgcctgagcctggggcagccccatccaacgaggaggacgacagcgacgatgacgatgtcctggctccttcaggggccaccgcagctggtgctggtgacgaaggggacgggcagacgaccgggagcacatagcggccgggagcccggctgcacaccaggctgctgctttgtccgtctatccacccgcccacccgcccccaccccaccggcagcgtccaggtgcggggccgggaaccacacaccccactgggccggccacagtctggacccgcacgtcctgttcaaaagcagactcgggaactgcctgaatgtggtttgggacacgagacctcatcatattgatgagcgaacaaacaagaacatttcctccctcccctcctttgaattgaaatggcacattaagacttgtcacggcttctcactgggactggagacctcgttccttcaccccgcgtgtcgccagcctctgggtccagccagagcccctggcttctccgccacccacacccttcccaccctgctgtggggccctgcctttgtggggagcagccagccctctgcccctgcccagggctccccaactataggcctgggacccccgcccagcttggggggctgctcgtacgagtgtagacactgggcccattggacgtgctgttaactactatcttcatttcccacttcccctctctgattgggggtgtatattttacatctttttttctttttattttcgaaggctttgttttggtttcttaggttaagatgctctcgagcgttgagcaggcacagctctgtcgaggtccctgtcccccacctgtggttctggcctctgaggttgggggactacttgtttcccaccccaggttcctccaggccaagtcatggggtgatgaggagttggggccctgtctgtcctaggcctggagagtgcctgtctgggaaaaggtcactggacctggaagggtccccagggtcccctgactcccgtctccatctgtcacgtggttcaccatcatcaggcaccaggcgcaaactgcttcccgctgttggccatcccttccccagccacaggtgtccctgcccccaggacagtccagggccaggggcttctgtgagaggcagagggggaccctcaccaaatcttggtggaagagcccaggggctggtcccagaacaggcagtctcacaagcacgcagcacactggagtggacgcctgtgcccacccgagcctggagcatggccaagagccagcttgcaccacccacctgggaggccgaggaggaggtcccctgggcacagggcctctttgggacttcagaggaaatctcccagtcccactctcggagggttaagagaaggcctcctgcagctgtgccgtccacacctctaggtcgccagagccctggcccccagcccccagcaagcctgagcccgggaagaaccagaggccctcccgagagacccagtcacacgtctctgctttaagccttagccagctagtgacgagtacaacgagataacgcccatgtgttttggaacatttatgtaagattgtcatatgaaatgtatttgggaactacattaaacttttaactaaaaaaaaaaaaaaaaa

SEQ ID NO: 2087 - DNA, 5471 bp, Homo Sapiens
  NM_003632
aagagcggaggaccaggaaccagagagagagagagagaaaagagagaggagagacagagcgcttgggggcgaaaggagagagggagggaagggtgggtaaggaggagagagcggtctgctgcaaaccccaggaggagagcttggagcccaagccagaactcgagccctagccggagccgttcacagggaggcggctgccgggaccgtcagccctgcatgatgcatctccggctcttctgcatcctgctcgccgcggtctcaggagccgagggctggggctactacggctgcgacgaggagctggtgggtcccctgtatgcacgctccctgggcgcctcctcctactacagtctccttactgcgccgagattcgccaggctgcacggcataagcgggtggtcaccacggattggggatccgaatccctggctccagatagacttaatgaagaagcaccggatccgggccgtggccacacagggctcctttaattcttgggactgggtcacacgttacatgctactctacggcgaccgagtggacagctggacaccgttctaccagcgagggcacaactcgaccttctttggtaacgtgaacgagtcggcggtggtgcgccatgacctgcacttccacttcactgcgcgctacatccgcatcgtgcccctggcctggaacccacgcggcaagatcggcctgaggctcggcctctatggctgcccatacaaggccgacatactctatttcgacggcgacgatgccatctcctaccgcttcccgcgaggggtcagccgaagcctgtgggacgtgttcgccttcagcttcaagaccgaggagaaggacggtcttctgctgcacgccgagggcgcccagggcgactacgtgacgctcgagctggagggggcacacctgctgctgcacatgagcctgggcagcagccctatccagccaagaccaggtcacaccaccgtgagcgcaggcggagtcctcaatgaccagcactggcactatgtgcgggtggaccgatttggccgcgatgtaaatttcaccctggacggctatgtgcagcgctttattctcaatggagacttcgagaggctgaacctggacactgagatgttcatcggaggtctggtgggcgccgcgcggaagaacctggcctatcggcataacttccgcggctgcatagaaaacgtaatcttcaaccgcgtcaacatcgcagacctggccgtgcggcgccattcccggatcaccttcgagggtaaggtggcttttcgttgcctggacccggtaccgcaccctatcaacttcggaggccctcacaacttcgttcaagtgcccggtttcccacgccgtggccgcctggcagtctcatttcgcttccgcacctgggacctcaccgggcttctccttttctcccgtctgggggacgggctgggccacgtggagctgacgctcagcgaagggcaggtcaacgtgtccatcgcgcagagcggccgaaagaagcttcagttcgctgctgggtaccgactgaatgacggcttttggcacgaggtgaattttgtggcacaggaaaaccatgcagttatcagcattgatgatgtggaaggggcagaggtcagggtctcatacccgttgctgatccggacagggacctcatatttctttgggggttgtcccaagccagccagtcgatgggactgccactccaaccagacggcattccatggctgcatggagctgctcaaggtggatggtcaactggtcaacctgactctggtggagggccggcggcttggattctatgctgaggtcctctttgatacatgtggcatcactgataggtgcagccctaacatgtgtgagcatgatggacgctgctaccagtcttgggatgacttcatttgctactgcgaactgacgggctacaagggagagacctgccacacacctttgtataaggaatcctgtgaggcttatcggctcagtgggaaaacttctggaaacttcaccattgatcctgatggcagtggccccctgaagccatttgtagtgtactgtgatatccgagagaaccgagcgtggacagttgtgcggcatgacaggctgtggacaactcgagtgacaggttccagcatggagcggccattcctgggggctatccagtactggaatgcatcctgggaggaagtcagtgcccttgccaatgcttcccagcattgtgaacagtggatcgagttctcctgctacaattcccggctgctcaacactgcaggaggctacccctacagcttttggattggccgaaatgaggagcagcacttctactggggaggctcccagcctgggatccagcgctgtgcctgtggtctggaccggagctgtgtggaccctgccttgtactgcaactgtgacgctgaccagccccagtggagaactgacaagggactgctgacctttgtggaccatctgcctgtcactcaggtagtgataggggatacgaaccgctccacttctgaggcccagttcttcctgaggcctctgcgctgctatggcgatcgaaattcctggaacaccatttccttccacaccggggctgcactacgcttccccccaatccgtgccaaccacagcctggatgtctccttctacttcaggacctctgctccctcgggggtcttcctagagaatatggggggcccttactgccagtggcgccgaccttatgtgcgggtggaactcaacacatcccgggatgtggtcttcgcctttgatgtggggaatggggatgagaacctcacagtacactcagacgactttgagttcaatgatgacgagtggcacctggtccgggctgaaatcaacgtgaagcaggcccggctccgagtggatcaccggccctgggttctgcggcctatgccactgcagacctacatctggatggagtatgaccagcccctctatgtgggatctgcagagcttaagagacgcccctttgtgggttgcttgagggccatgcgtctgaacggagtgactctgaacctggagggccgtgccaatgcctctgagggtacctcacccaactgcacaggccactgtgcccaccctcggctcccctgtttccatggaggccgctgcgtggagcgctatagctactacacgtgtgactgtgacctcacggcttttgatgggccatactgcaaccacgatattggtggtttctttgagccgggcacctggatgcgctataacctacagtcagcgctgcgctctgcagccagggagttctcccacatgctgagccggccagtgccaggctatgagcctggctacatcccgggctatgatactccgggctatgtgcctggctaccatggccccgggtaccgcctgcccgactacccccggcctggtcggcctgtgcccggttaccgtgggcctgtctacaacgttacgggagaggaggtctccttcagcttcagcaccagctccgcccctgctgtcctgctctacgtcagttcctttgttcgtgactacatggctgtgctcatcaaggatgatgggacccttcagctgcgatatcagctgggcaccagtccctacgtgtaccagctaaccactcgaccagtgaccgatggccagccccatagcatcaatatcacccgtgtttaccggaacctcttcatccaggtggactacttcccactgacagagcagaagttctcgctgttggtggacagccagttggactcacccaaggccttgtatttagggcgtgtgatggagacaggagtcattgacccggagatccagcgctacaacaccccaggtttctcaggctgcctgtctggtgttcgattcaacaacgtggctcccctcaagacccacttccgaacccctcgacccatgactgctgagctagctgaggcccttcgagttcagggagaactgtccgaatctaattgcggagctatgccacgtcttgtttcagaggtgccacctgagcttgatccctggtatctgcccccagacttcccctactaccatgatgaaggatgggttgccatacttttaggctttttggtggcctttctgctgctggggctggtgggaatgttggtgctcttctatctgcaaaatcatcgctataagggctcctaccataccaatgagcccaaggctgcccacgagtaccatcctggcagcaaacctcccctacccacttcaggccctgcccaggtccccacccctacagcagctcccaaccaagctccagcctcagccccagccccagccccaactccagccccagcccctggcccccgggatcagaacctaccccagatcctggaggagtccaggtctgaatgagtcagaagggcttctgggaccaattccagctcctgacattcccccagtcctgcctctcccccatcctatcagggacatttggctcctcttagctggctctgctcatccagaggatattcccccatcccccccccatcaagtttggtgggcagagctacagatgggacccaagggagtggccgagcctcactgcctaaaccaatgcccttctcatccctgtttccccaggctcctggctgtttatctgccccaaaggagaagcctcatggggttgacataggtcctttctgccatctctgttccagctgctgtcagggattaacaacagagtgtaggggagattaactgcctcccttccaatagacactatcagcagggacagatgtgtgggagtgcagggctgcagagggtatggggggaggaggctgctaaaccctatcccccagcctcccccctgccctgaagatcttccatttgcttccactcagctggaggctcaagagggcttgatggctgtcccctgcccccctccttttgttttgtacacagagaccaagaggcctcagtttagcaccttagtacctccgctgcttcacttgctttagccaaagccataaaaaacctgcaacgtagagaaaataatgcagataccctgactagccagccctctactcctccaaccttttccaagatatgcaatggcctttgtgcctgcccaaaggcttcgccccctccagtgcatgaggaaccctctttcctccgctcagagatgctgcttcatttacccaggaggtcatattctttatatatattttttgttgcaaagtgtctctctagagaaactctatatattattcgaatttttaaattatttgtttatatataaaagaaaagctcaattggctgtgctgtcctgtgctgtgctgtgcccacagtctgtagtttgcctttcctgtgttggaagtgtcgtgagtcctgctggtcacccaccagcctggtccggcctccactctgaagcagggttgagcctgctgtgctctcagacgcggagccgttccaataaagcagagtggcagagccccaaaaaaaaaaaaaaaaaa

SEQ ID NO: 2088 - DNA, 2259 bp, Homo Sapiens
  NM_003634
ccacgctcccattttaccgaggtggatcctgaggcccagagtgggcaaagggcttgccaaggtcgcagagcgcgcagaggattagaaccctgacttccgtccagcacctgcggagttggagacgcccacaggaaacgcccacctgaccgggtgagtgagggggcgggcgagccggaggggtggagtttattcgcgccccgcctccgccaccagggcttgggggcggggccttcctgcaacctttgcggctccaacatggctccgcggctgtgcagcatctctgtgacggcgcggcggctgctggggggcccggggcctcgcgctggggacgttgcgtctgcagctgcggcgcgtttctattccaaggacaatgaaggcagctggttccgctccctctttgttcacaaagtggatccccggaaggatgcccactccaccctgctgtccaagaaggaaaccagcaacctctataagatccagtttcacaatgtaaagcctgaatacctggatgcctacaacagcctcacggaggctgtgctgcccaagcttcacctggatgaggactacccatgctcactcgtgggcaactggaacacgtggtatggggagcaggaccaggcagtgcacctgtggcgattctcaggtggctacccagccctcatggactgcatgaacaagctcaaaaacaataaggagtacctggagttccgaagggagcggagccagatgctgctgtccaggagaaaccagctgctcctcgagttcagcttctggaatgagccacagcccagaatgggtcccaacatctatgagctgaggacatacaagctcaagccaggaaccatgatcgagtgggggaacaactgggctcgggccatcaagtaccggcaggagaaccaggaggcagtgggcggcttcttctcacagataggagagctctacgtggtgcaccatctctgggcctataaagacctgcagtctcgggaggagactcgaaacgctgcctggaggaagagaggctgggatgaaaatgtctactatacagtccccctggtgcgacacatggagtctaggatcatgatccccttgaagatctcgcctctgcagtgatgctgcctacacctccacctccttccccttctccctcaggcaaccccgacagacagtggcactcctggtcctgctgtcttggttttgtcttggctctgggaggactctgaggggcagtgctcagttcagacaagggggaactgaaggctgacaagttctgaggattacagctctgcccaggccctttctactttccctgcctgcctccctccccctgctagaagtagtttctgatttccctgaatgaaagatagtgatcttttaggccttcatttatcttctaaaattcctcatctcaaggccaccagtccccagttatcacccttggaaatcctctgtttagcttagttgcacaaaaggtagtatgtccagtggctagaggtggggtgggaagagaggaggccaggccaggccctcaggaattccctggtttccactgggccacccacttgctggacagtctgagccaagtccctcctgctggagaaaagcctggaactgccaaaacaaaaaaacaaatacaaacaaacctcgtcaccacggtcaggaggaggttcagacattctgcccagaggggctggggaaagggatgggagccaggaaagatttaggggcaggagacagacacgtaacaggaactcggaaggtagaacttagaattcagaacttgggtttcaattgtagaatttggaatctggaatacagaattgggaagaagaacagagatgacaaaagaccacttgaagagaggttcctaatactagacagatggagagtggcttggctgtttccccctgcatattggggttgaaaacttaaatgtgtagttccagtccttctatgcagagtctctcctgccctccctccttcctgcaggcaaatatacaagctagaccctgttccctcaccctgtatcctgtctcccctaattgacattctatcagcccaaccctcattctgcagggccacctggtgtgtggaggtggcgggaggggtcagtgactctgggggtctcctcagtgacccccatacctcatcatgaacccttgggtagcttgattctgcctaccatccaggaaaacttgtgctggaattgctgatggaaacaattaaatatttactataaaaaaaaaaaaaaaaaaaaaaaaa

SEQ ID NO: 2089 - DNA, 4006 bp, Homo Sapiens
  NM_003635
gctcggccggcagtgccatcgcgcggagaggagggggtgcgcttccgcgggcggggcgcggagcccgccgtctcggaggccgcggctcggcccggcactgcggagggccgcttgatttcccggaacccaggtcgcgcggctgctagggccggagccggtggatccgagcgggtgccaccagcggcggcgcgccgcctcccccggtgggagcggtggttgggccaggctgcggcagagcgttcgctcggagatggcggagcagccgcgacgcggcccgtggccccgaaagcagggaagccgggcagccccgggacgcggcggagcccggggacagcggggacgccgcccagtcctccgggtatgaagctaaaatgcagcggctaagaacgcggctctggagcttgacaggcctgacgtcgaatcccagccctcccaccaactgagctgtgtgatcctgggcaaggtagaggggaagagattgaactttgctgacctttgatgtgaggcgctcagccagggccaaggggagagcctggcaagatttgcagcctgaagccatgggccagggggccatggtgacctgagacaagtggactctgtatagttgccccctgcttccccttctacctcccctaccctatgctaaggggactcgtctccacctcgtaaaggaaactccccaagggaatccctgtcccctattttcctatccttctacccttccaagacagtcctagcctatagaactcctacctcccatcccctgaggtggtccccattcctccctcccttcctccccccgccatgctccagttgtggaaggtggtacgcccagctcggcagctggaactgcaccgcctcatactgctgctgatcgctttcagcctgggctccatgggcttcctggcttattatgtgtccaccagccctaaggccaaggaacccttgcccctgcccttgggagactgcagcagcggtggggcagctggtcctggccctgcacggcctccagttccacctcggccccccaggcctccagagacagctcgaactgaacccgtggtccttgtgtttgtggagagtgcatactcacagctggggcaggaaattgtggccatcctggagtctagtcgttttcgttatagcactgagttggcacctggccgaggggacatgcccacattgactgataatacccatggccgctatgtcttggtcatttatgagaacctgctcaagtatgtcaacctggatgcctggagtcgggaactgctagaccggtactgcgtggagtatggtgtgggcatcattggctttttccgagcccacgagcacagcctactgagcgcccagctcaagggctttcccctttttttacactcaaacttggggctccgggactaccaagtgaatccttctgccccgctactgcatctcacacgccccagccgcctagaaccagggccactgcctggtgatgactggaccatcttccaatccaatcatagtacatatgaaccagtgcttcttgccagccttcggccagctgagcccgcagtgccaggaccagttcttcgtcgggcccggcttcccactgtggtacaggacctggggcttcatgatggcatccagcgggtgctctttggacatggcctttccttctggctccacaaacttatcttcgttgatgctgttgcatacctcactggcaagcgcctctgcctggaccttgaccgctacatcttggtagacatcgatgacatctttgtgggcaaggaagggacccgcatgaaggtggctgatgttgaggctctgttgaccacccagaacaaactcaggaccttagttcccaacttcaccttcaacttgggcttctcgggcaagttctatcatactgggacagaggaggaggatgcaggggacgacatgctgctgaagcaccgcaaagagttctggtggttcccccacatgtggagccacatgcagccacacctgttccacaatcgctccgtgctggctgaccagatgaggctcaacaaacagtttgctctggagcatgggattcccacggacctggggtatgctgtggccccccaccactcgggtgtgtaccccatccacacgcagctctatgaggcctggaaatccgtgtggggcatccaggtgaccagcactgaggagtatccccatctccgccctgcccgctaccgccgtggcttcattcacaatggcattatggtgctgccccggcagacatgtggcctcttcactcacacaatcttctataatgagtatcctggaggctctcgtgaactagaccggagcatccgaggtggagagctctttctgacagtgctgcttaatccgatcagcatctttatgacccatctgtccaattatggaaatgaccggctgggcctatacacctttgagagcttggtgcgcttcctccagtgttggacacggctgcgcctacagacccttcctcctgtcccacttgcacagaagtactttgaacttttccctcaggagcgaagccccctttggcagaatccctgtgatgacaagaggcacaaagatatctggtccaaggagaaaacctgtgatcgtctcccgaagttcctcattgtgggaccccagaaaacagggactacagctattcacttcttcctgagcctgcacccagctgtaactagcagcttccctagccccagcacatttgaggagattcagttcttcaacagccctaattaccacaagggtattgactggtacatggatttcttccctgttccttccaatgccagcactgatttcctatttgaaaaaagtgccacctactttgactctgaagttgtaccacggcggggggctgccctcctgccacgagccaagatcatcacagtgctcaccaaccctgctgacagggcctactcctggtaccagcatcagcgagcccatggagacccagttgctctgaactataccttctatcaggtgatttcagcctcctcccagacccctctggcactacgctccctgcagaaccgctgtcttgtccctggctactattctacccatctacaacgctggctgacttactacccctctggacagttgctgattgtggatgggcaagagctgcgtaccaacccagcagcctcaatggagagcatccagaagttcctgggtatcacaccctttctgaactacacacggaccctcaggtttgatgatgataagggattttggtgccagggacttgaaggtggtaagactcgctgtctaggccggagcaaaggccggaggtatccagatatggacactgagtcccgtcttttccttacggattttttccggaaccataatttggagttgtcgaagctgctgagccggcttggacagccagtgccctcgtggcttcgggaagaactgcagcattccagtctgggctgatgtcccagcctcccataccagcaaaatgccccctgcttccctaaggggcaggtccagagcagggcccacaagggggattagagtggcctggcccctccccctctacctcagtagcccccaggcctgagatggctgagaagggaagggtatccttttcccacagttctgggacaaataaaggggcttcctttggtaccccacataatagtgctaggtacctttgacccatcatcttgggaggtggggaggaatgagagggtccaggcagggtgtaggggaatgtattagtccaatgagatttccctcttcatccgcagcagtgtatctattctatacctggctatgggagagaccccttgcatgggagggaccccttgctatggcccctttagccaggcagtgggatctacctgtggcccggcctccctaatgtcattcacattgaatggggatgaggtcggacagtggctcatagagccgagtatgagccctagctgtgggctagaaatgtccttaataaacatccttatttttctgtttaaaaaaaaaa

SEQ ID NO: 2090 - DNA, 733 bp, Homo Sapiens
  NM_003641
aaacagcaggaaatagaaacttaagagaaatacacacttctgagaaactgaaacgacaggggaaaggaggtctcactgagcaccgtcccagcatccggacaccacagcggcccttcgctccacgcagaaaaccacacttctcaaaccttcactcaacacttccttccccaaagccagaagatgcacaaggaggaacatgaggtggctgtgctgggggcaccccccagcaccatccttccaaggtccaccgtgatcaacatccacagcgagacctccgtgcccgaccatgtcgtctggtccctgttcaacaccctcttcttgaactggtgctgtctgggcttcatagcattcgcctactccgtgaagtctagggacaggaagatggttggcgacgtgaccggggcccaggcctatgcctccaccgccaagtgcctgaacatctgggccctgattctgggcatcctcatgaccattggattcatcctgttactggtattcggctctgtgacagtctaccatattatgttacagataatacaggaaaaacggggttactagtagccgcccatagcctgcaacctttgcactccactgtgcaatgctggccctgcacgctggggctgttgcccctgcccccttggtcctgcccctagatacagcagtttatacccacacacctgtctacagtgtcattcaataaagtgcacgtgcttgtgaaaaaaaaaaaaaaaaa

SEQ ID NO: 2091 - DNA, 1682 bp, Homo Sapiens
  NM_003642
ctgtgcggtcacttccggcccgggagcgcgcgggttgattcgtccttcctcagccgcgggtgatcgtagctcggaaatggcgggatttggtgctatggagaaatttttggtagaatataagagtgcagtggagaagaaactggcagagtacaaatgtaacaccaacacagcaattgaactaaaattagttcgttttcctgaagatcttgaaaatgacattagaactttctttcctgagtatacccatcaactctttggggatgatgaaactgcttttggttacaagggtctaaagatcctgttatactatattgctggtagcctgtcaacaatgttccgtgttgaatatgcatctaaagttgatgagaactttgactgtgtagaggcagatgatgttgagggcaaaattagacaaatcattccacctggattttgcacaaacacgaatgatttcctttctttactggaaaaggaagttgatttcaagccattcggaaccttacttcatacctactcagttctcagtccaacaggaggagaaaactttacctttcagatatataaggctgacatgacatgtagaggctttcgagaatatcatgaaaggcttcagacctttttgatgtggtttattgaaactgctagctttattgacgtggatgatgaaagatggcactactttctagtatttgagaagtataataaggatggagctacgctctttgcgaccgtaggctacatgacagtctataattactatgtgtacccagacaaaacccggccacgtgtaagtcagatgctgattttgactccatttcaaggtcaaggccatggtgctcaacttcttgaaacagttcatagatactacactgaatttcctacagttcttgatattacagcggaagatccatccaaaagctatgtgaaattacgagactttgtgcttgtgaagctttgtcaagatttgccctgtttttcccgggaaaaattaatgcaaggattcaatgaagatatggcgatagaggcacaacagaagttcaaaataaataagcaacacgctagaagggtttatgaaattcttcgactactggtaactgacatgagtgatgccgaacaatacagaagctacagactggatattaaaagaagactaattagcccatataagaaaaagcagagagatcttgctaagatgagaaaatgtctcagaccagaagaactgacaaaccagatgaaccaaatagaaataagcatgcaacatgaacagctggaagagagttttcaggaactagtggaagattaccggcgtgttattgaacgacttgctcaagagtaaagattatactgctctgtacaggaagcttgcaaattttctgtacaatgtgctgtgaaaaatctgatgactttaattttaaaatcttgtgacattttgcttatactaaaagttatctatctttagttgaatattttcttttggagagattgtatattttaaaatactgtttagagtttatgagcatatattgcatttaaagaaagataaagcttctgaaatactactgcaattgcttcccttcttaaacagtataataaatgcttagttgtgatatgttaatgtgtgatgatatgattcttaaatacttacaataaacctcattcttaaatacttaaaaaaaaaaaaa

SEQ ID NO: 2092 - DNA, 2780 bp, Homo Sapiens
  NM_003643
cctgctgggacttgaaccagcagtaagattttcacgacacagtgctgtctgcttctccgtaagaagttagaagccctagaaaacaatctcctggtccaaggtgcttgagtgggccgatccagctatatcaagaacctttgagaacaaaattctcaagcatttctgaggggagtcgaataggtgaaaaccttggctggcctgaccttatcatggaacctgacgactttgattctgaagacaaagagatattaagctgggatattaatgatgtgaaactgccacagaacgtgaaaaaaaccgactggttccaggagtggccagattcctatgccaaacacatctacagctcggaggacaagaatgcgcagcggcacctgagcagctgggccatgcgcaataccaacaaccacaactcccgcatcctcaagaagtcctgcctgggtgtggtggtgtgcggccgcgactgtctcgcagaggaggggcgcaagatctacctgagacctgccatctgtgacaaggcccggcagaagcagcagcggaaacgctgtcccaactgtgacgggcctctgaagctcatcccttgccgaggtcatgggggcttcccggtcaccaacttctggaggcacgacggacgctttatatttttccagtcaaagggagagcatgatcatccaaaaccagaaaccaagttagaagctgaggcaagaagagccatgaagaaagtgaacacagcaccttcctccgtctcattgagcctgaaggggagcacagagaccaggtctcttccaggtgaaacacaaagtcaggggagtttacctttaacttggtctttccaggaaggcgtccaattgcctggtagttacagtggacatttaatagctaacactcctcagcagaactcactaaatgattgcttttccttctccaagagttatggtctgggaggaatcacagatctgactgaccagacttccactgtggaccccatgaagctctatgaaaagcgcaaattgtccagtagcagaacctacagtagtggagacctgcttcctccttctgcctccggagtctactctgatcatggcgatctacaagcgtggagtaaaaatgctgctttggggagaaatcatcttgctgacaactgttattccaattatccttttcctctgaccagctggccttgcagcttctctccttcccaaaactcttcagaacccttttaccagcagcttccattggagccacctgcagccaaaactggctgtcccccattatggccaaatccagcgggtaatctttatgaagagaaagtacatgtggattttaacagctacgtccagtctcctgcataccattcacctcaagaagacccctttctcttcacctacgcctctcatcctcatcagcaatattcactgccaagcaagagcagcaaatgggattttgaggaagaaatgacatacttgggtttggatcactgcaacaatgatatgcttctgaacctgtgtcctttgagatgacccaaatctttcactatgtgcaccccagcccctcaaaaatggggaagggctgaaagaatttccttaggaaataatttttaaaacataaccacagataaatgagaatcatgataagcagtagacaaggcttttttctttttcttttttccttctttttttttttttttttttttttttgagacagagtcttgctcttttgcccaggcaggaatgcagtggcgccatctcggctcactgcaacctctgcctcccgggtttgagtgattctcctgcgtcagcctcccgagtagctgggattacaggcacctgccactgcgcctggctaatttttctatttttagtagagacagggttttgccatgttggtcaggctgctctcaaactcctgatctcaagtgatctgcccacctcaccatcccaaagtgctgggattacaggcgtgagccattgtgcccggctgacaaggcttttttcttcacatgagtaatttttttggcttcttctcctccactctagtatttccaccctcagtaaggaatggaaacctgtcccgtctggggtgtgaagtgccctctgctttttcccccacattgtttggggttcccagcacctcagccacattgcatgctgggttttcattgtcattgttgcaaatgaaatggagtagacatgtgaaatgctaacctatctaggacctgatctatgccttcttgggaactgagaatgaagaaacagaaatagatggtggaagaactgcctaaggtgtgaaaagctgaagattctaccactgaagtactgaatatgttgtctagttgtgagactagtgtgtaaaatatatgttttctagatgatttctgagacttgtgatgacaaggaacctgacctaaccccatttttcataaagacaaagaacagcaatgttaaattgccatatgaagagaaacactagtgatgtgcgtggtctccttgcctcttgtttccttccctcttcctcactgacttccccttgcacaggggcttctgttttatcccatttattatttgtggcacctatatcaatgtggggtttgtaataggtgagaaatatttgcttggagaagctcttgtgcaattagcctggcaatgattggccggccatgtttgaatgccagtttctcttctttgctgaagtactttatgataaaagtaagcctagacataaaatctggagagaaccatgcaataaacaagtatttttgaaataaaaaaaaaaaaaaaaaa

SEQ ID NO: 2093 - DNA, 940 bp, Homo Sapiens
  NM_003650
gctgtggccctggcacctgcccctgggctgggacagcccactgttccatgctgcccaagaaggctcagcacaggcacaaaccattgcccggcactggcccgtgctgcctgagaaggattggcacgggcacagaccactgcccccacctgccctgcgccatctacccaagaaggctcggcacgggcaccaaccactgcctccaactgccccatgctgcctgagaaggcactgcacggccacccccaactgccccgcactgtccctacccgggcagccatgcgagcggctggaactctgctggccttctgctgcctggtcttgagcaccactgggggcccttccccagatacttgttcccaggaccttaactcacgtgtgaagccaggatttcctaaaacaataaagaccaatgacccaggagtcctccaagcagccagatacagtgttgaaaagttcaacaactgcacgaacgacatgttcttgttcaaggagtcccgcatcacaagggccctagttcagatagtgaaaggcctgaaatatatgctggaggtggaaattggcagaactacctgcaagaaaaaccagcacctgcgtctggatgactgtgacttccaaaccaaccacaccttgaagcagactctgagctgctactctgaagtctgggtcgtgccctggctccagcacttcgaggtgcctgttctccgttgtcactgacccccgcctcttcagcaagaccacagccatgacaaacaccaggatgcatgctccttgtcccctcccacccgcctcatgacccagcctcacagaccctctcaggcctctgacgagtgagcgggtgaagtgccactgggtcaccgcagggcagctggaatggcagcatggtagcacctcctaacagattaaatagatcacatttgcttctaaaattaaaaaaaaaaaa

SEQ ID NO: 2094 - DNA, 1501 bp, Homo Sapiens
  NM_003656
ggagagagccgccgagccgagccgagccccagctccagcaagagcgcgggcgggtggcccaggcacgcagcggtgaggaccgcggccacagctcggcgccaaccaccgcgggcctcccagccagccccgcggcggggcagccgcaggagccctggctgtggtcggggggcagtgggccatgctgggggcagtggaaggccccaggtggaagcaggcggaggacattagagacatctacgacttccgagatgttctgggcacgggggccttctcggaggtgatcctggcagaagataagaggacgcagaagctggtggccatcaaatgcattgccaaggaggccctggagggcaaggaaggcagcatggagaatgagattgctgtcctgcacaagatcaagcaccccaacattgtagccctggatgacatctatgagagtgggggccacctctacctcatcatgcagctggtgtcgggtggggagctctttgaccgtattgtggaaaaaggcttctacacggagcgggacgccagccgcctcatcttccaggtgctggatgctgtgaaatacctgcatgacctgggcattgtacaccgggatctcaagccagagaatctgctgtactacagcctggatgaagactccaaaatcatgatctccgactttggcctctccaagatggaggacccgggcagtgtgctctccaccgcctgtggaactccgggatacgtggcccctgaagtcctggcccagaagccctacagcaaggctgtggattgctggtccataggtgtcatcgcctacatcttgctctgcggttaccctcccttctatgacgagaatgatgccaaactctttgaacagattttgaaggccgagtacgagtttgactctccttactgggacgacatctctgactctgccaaagatttcatccggcacttgatggagaaggacccagagaaaagattcacctgtgagcaggccttgcagcacccatggattgcaggagatacagctctagataagaatatccaccagtcggtgagtgagcagatcaagaagaactttgccaagagcaagtggaagcaagccttcaatgccacggctgtggtgcggcacatgaggaaactgcagctgggcaccagccaggaggggcaggggcagacggcgagccatggggagctgctgacaccagtggctggggggccggcagctggctgttgctgtcgagactgctgcgtggagccgggcacagaactgtcccccacactgccccaccagctctagggccctggacctcgggtcatgatcctctgcgtgggagggcttgggggcagcctgctccccttccctccctgaaccgggagtttctctgccctgtcccctcctcacctgcttccctaccactcctcactgcattttccatacaaatgtttctattttattgttccttcttgtaataaagggaagataaaaccaaaaaaaaaaaaaaaaaaa

SEQ ID NO: 2095 - DNA, 4506 bp, Homo Sapiens
  NM_003663
gcaggcggacggggcgcggcgggggacacggcggccgccgcggggctcgatcgggcaacggcggcgacggcggcagcgacggatcctcctcctcccttattcccttgctcctctttcttccttttcttttcctttccggccgggcctcgtccactttccctaacggcggcctcgatcctacgtaaaggcatgacttcctggcaccacagggaaaatcgggtgcaagcccagaaactatttccccaccaccacttgttgaaaaactgatttgaaggcatctccggggttgaacaaacggaaagtgccaggatttgatgcgtctctggtttcgctctggagaccattccctgctaagtatcaagacgaaaaaaactggaaactaatccgaaccatatttatttagagtcagaatggagcgatttgtagtaacagcaccacctgctcgaaaccgttctaagactgctttgtatgtgactcccctggatcgagtcactgagtttggaggtgagctgcatgaagatggaggaaaactcttctgcacttcttgcaatgtggttctgaatcatgttcgcaagtctgccattagtgaccacctcaagtcaaagactcataccaagaggaaggcagaatttgaagagcagaatgtgagaaagaagcagaggcccctaactgcatctcttcagtgcaacagtactgcgcaaacagagaaagtcagtgttatccaggactttgtgaaaatgtgcctggaagccaacatcccacttgagaaggctgatcacccagcagtccgtgctttcctatctcgccatgtgaagaatggaggctccatacctaagtcagaccagctacggagggcatatcttcctgatggatatgagaatgagaatcaactcctcaactcacaagattgttgactaggaggttaccaccattgtgatcaagataaatgtggagtattaaagttatgtgttgattgtgtggttcatttttgtatttatttcatttaaaatcatgtgacgcagaatagttttgcaatgtgtatatagttgcaggcaaaaaaaaaaccacctcactgcaaaacttattgttaattttagtcaccaatggtataaagcaaaacctaggtttagagtgtgctaggatacctgaaacctgatggttatctttaaaattaatggtttttctcctgaaatgtttgtgcatggaagaactgccctgcttttttaccctgttgccatgtatgattattccttgtgagattacttaattacttggattgaagactagcctattgaagctgctgccaggcaacaccacttaacagtaacttaaaggaattattttctttagaggatcctcttcaaaaaggaagggagatagtggaaaactgttcttatatcttcagatccctagcagaaatgactgtttatttcaaactatgttttacttgtatatgatgtagtcaccttaactatctttcaattccatacttcccccgcccccattttaaaggcttattgttgtattttgtagcagcttcaagtgaccaaaagactaaaatctttcaacgtcaatgccaaaagccaaggggaattttgcagtgacaggattttagtctcttactatgaatactaatttcgaaccatagctttcattttaagcatcatcttgaatttctaaacttttttctatgtcttggtgttaaaagatttcaagattggcatttttacttaaacagacattttatggttgagttttctctttattatagagaattagtaatttttttttggctgacagatcagataaaattactttctattcattaatttttctctacaactttatgagtttatttaggtgaatagtctagactagaaacaagtttactttatctgctttgcctctggtggtacaaggtttttaacatggatggtaaacaattgtctagaaattctggcaggttttttgtattggagatctggcagtatcctgcataactttgggtgaggaaattgttctcttaaagatcagccatgttcaggaaatgatctctgtttgaacctcactatcctgtaaggttatccaagtagcttagcccagctaagttctatcagagacccaaattatattttttaaaaatttaacagctggaaacttggactagagctttaataaaaaatcttaaattctttgaaattcaagttaaaaatacttatatatttctattacaaagcagtgacaaatgatgccctgtgtgacttggagttatctttgacttttaccacaaatcttcatttataaaagaaaaagccaaagtgaaaaaaagttagattgtgtatttttcagtaacagctttccatgtcttaagatttttttacagacttaagtttctaattcaggttgtcaaactggccatttgacttcagagatttgttttcattaaaaaataagcctgccgccaaaataaatcacttatcaaaatgtgaactgttttcctcatgttcagttatgttaaagtagtatgataaatgcatgcctagagtagtgctctcgttgatgaagcacatgtatgaggagaccagcagcaaaacataaccatatgtgttttgcgtttacttcctctagaaaagaatttgcaggcaaccatgtttaatttgaactatctaagatggtagattttagaagctaggaataattgagttttatagcactattttcagaatacgaaaagatacacaatcattctgttttttgaaattccatgtgattcaaactgctccctattatttgggtattaatttgcactaatagcaaaatgtaatggcagatcagctttgagagtggtcctaagcagtaaactggatgatgttgcattagaaaaacatcaataattcatatttaagttttagtagttactactgatttgataatcacttaaattttatatatcttaatgtattttttcagactcctaattaattcccacattcactgtaactaggggcatagtccattctgttaggattatatcctctccttagaaatgttttccatcctgttgtggggatttggtattaatgtttcttcattgattatggaacttttgttccctgaagctagttaactgtgtctaaagttaaataaatacagcagaatgattgttttagcctgctcgaactgatacaaatccctgaaaccatgattggcatatgttagataacaaatgaggatgtctaagaggcatatgctgctttggaggtgtagtgaacgtgtgtacagaagttttcaatcttaactatatagtgttagtgtgatgctatactattggaaaaatagcagcttttttctattttataagttgtatgcataaacataagatttgtaatgtttcatttataaactgccttcttcaacacatgttaatagtgttttctcaaagtattgatagtatgtcttccagaatttcacaatatgcttacagtaaatatttcctagcttgttgaaatgttcaattctttgttggctttcttcttgattctgtgggggtgtataacaagcctgaaggacattgtaatcatttcttacaaggtgaaaattaagaaagattgtgtatgagagcctatatagttgttttatccattatcatctttgattaagactttaaaaaaatgctatttccagttaatgcatttggccctattgaattttcagggaccagaaaacattaaaaagttctgcatcttataatggtaaccaattaagcttgagattgttctgaaagtatcaattgctttaaaactgttgtaagtacagttggcaagatctccaagctgaaacttccacgttaaaacttttgcctgtaagaatttgcacatgaatgttaatggaaaacacaaaacttaagatggcccaaaacaaaagccacaaacagttcatcatttggtgcttagtctttgtaagggctctctgtggtttgacttaccccagctaccgttaaatgaggacaaatcaccttaaaacatgttcatttgattcataacaaggaaaattgggtctatgattttttgccaatcttagcctaaaagaaattgctttagcttctggtcagcactgattaaaatgtgaatagtgaagtggctatcctaaactggtttatctccacccacactatcatagatttcttaggtaaatacaattcttatctagtggtattctacttgtattcagaatactgtattaaaattttactatttcatttttgtattctgtgcttattttttttgctcacgcatgtatgcttagtataaatgtgtcacttctaaagttttgtctctgacttttagaaataaatttcagaaaaattgtttcaaaagattttgaaagcacattttgttttgtgagtcaatgacaaatatatttcctgattacaaaacaaaaaaaaaaaaaaaaaaaaaaaaaaaaaaaaaaaaaaaaaaaaaaaaaaaaaaaaaaaaaaaaaaaaaa

SEQ ID NO: 2096 - DNA, 3061 bp, Homo Sapiens
  NM_003670
cgcctccccgcccgccccacttctcattcacttggctcgcacggcgcagacagaccgcgcagggagcacacaccgccagtctgtgcgctgagtcggagccagaggccgcggggacaccgggccatgcacgcccccaactgaagctgcatctcaaagccgaagattccagcagcccaggggatttcaaagagctcagactcagaggaacatctgcggagagacccccgaagccctctccagggcagtcctcatccagacgctccgctagtgcagacaggagcgcgcagtggccccggctcgccgcgccatggagcggatccccagcgcgcaaccaccccccgcctgcctgcccaaagcaccgggactggagcacggagacctaccagggatgtaccctgcccacatgtaccaagtgtacaagtcaagacggggaataaagcggagcgaggacagcaaggagacctacaaattgccgcaccggctcatcgagaaaaagagacgtgaccggattaacgagtgcatcgcccagctgaaggatctcctacccgaacatctcaaacttacaactttgggtcacttggaaaaagcagtggttcttgaacttaccttgaagcatgtgaaagcactaacaaacctaattgatcagcagcagcagaaaatcattgccctgcagagtggtttacaagctggtgagctgtcagggagaaatgtcgaaacaggtcaagagatgttctgctcaggtttccagacatgtgcccgggaggtgcttcagtatctggccaagcacgagaacactcgggacctgaagtcttcgcagcttgtcacccacctccaccgggtggtctcggagctgctgcagggtggtacctccaggaagccatcagacccagctcccaaagtgatggacttcaaggaaaaacccagctctccggccaaaggttcggaaggtcctgggaaaaactgcgtgccagtcatccagcggactttcgctcactcgagtggggagcagagcggcagcgacacggacacagacagtggctatggaggagaatcggagaagggcgacttgcgcagtgagcagccgtgcttcaaaagtgaccacggacgcaggttcacgatgggagaaaggatcggcgcaattaagcaagagtccgaagaaccccccacaaaaaagaaccggatgcagctttcggatgatgaaggccatttcactagcagtgacctgatcagctccccgttcctgggcccacacccacaccagcctcctttctgcctgcccttctacctgatcccaccttcagcgactgcctacctgcccatgctggagaagtgctggtatcccacctcagtgccagtgctatacccaggcctcaacgcctctgccgcagccctctctagcttcatgaacccagacaagatctcggctcccttgctcatgccccagagactcccttctcccttgccagctcatccgtccgtcgactcttctgtcttgctccaagctctgaagccaatcccccctttaaacttagaaaccaaagactaaactctctaggggatcctgctgctttgctttccttcctcgctacttcctaaaaagcaacaaaaaagtttttgtgaatgctgcaagattgttgcattgtgtatactgagataatctgaggcatggagagcagattcagggtgtgtgtgtgtgtgtgtgtgtgtgtatgtgcgtgtgcgtgcacatgtgtgcctgcgtgttggtataggactttaaagctccttttggcatagggaagtcacgaaggattgcttgacatcaggagacttgggggggattgtagcagacgtctgggcttttccccacccagagaatagcccccttcgatacacatcagctggattttcaaaagcttcaaagtcttggtctgtgagtcactcttcagtttgggagctgggtctgtggctttgatcagaaggtactttcaaaagagggctttccagggctcagctcccaaccagctgttaggaccccacccttttgcctttattgtcgacgtgactcaccagacgtcggggagagagagcagtcagaccgagctttctgctaacatggggaggtagcaggcactggcatagcacggtagtggtttggggaggtttccgcaggtctgctccccacccctgcctcggaagaataaagagaatgtagttccctactcaggctttcgtagtgattagcttactaaggaactgaaaatgggccccttgtacaagctgagctgccccggagggagggaggagttccctgggcttctggcacctgtttctaggcctaaccattagtacttactgtgcagggaaccaaaccaaggtctgagaaatgcggacaccccgagcgagcaccccaaagtgcacaaagctgagtaaaaagctgcccccttcaaacagaactagactcagttttcaattccatcctaaaactccttttaaccaagcttagcttctcaaaggcctaaccaagccttggcaccgccagatcctttctgtaggctaattcctcttgcccaacggcatatggagtgtccttattgctaaaaaggattccgtctccttcaaagaagttttatttttggtccagagtacttgttttcccgatgtgtccagccagctccgcagcagcttttcaaaatgcactatgcctgattgctgatcgtgttttaactttttcttttcctgtttttattttggtattaagtcgttgcctttatttgtaaagctgttataaatatatattatataaatatattaaaaaggaaaatgtttcagatgtttatttgtataattacttgattcacacagtgagaaaaaatgaatgtattcctgtttttgaagagaagaataattttttttttctctagggagaggtacagtgtttatattttggagccttcctgaaggtgtaaaattgtaaatatttttatctatgagtaaatgttaagtagttgttttaaaatacttaataaaataattcttttcctgtggaagagaaaaaaaaaaaaaaaaaaaaaaaaaaaaa

SEQ ID NO: 2097 - DNA, 4287 bp, Homo Sapiens
  NM_003672
agagtaactgctgaaaggaggtggcgaaggaggatccggagcagctgctgccagcccgcgggcactgaagtcctcccggctgccgctcgagtagccacgggcgcgatcgggaccagaagtctcctcctccatgatcactttggaagccgggggaagactttgccctgccctgagagctggtctgcgtttcccaggcgcggcggcggcggagcagcagctgcagcagccgagtccaaataggagcggccacagccaggggcgtgagcgccccgcgcggagcgagctcgggttcccctcggaatgtccccggggcgcccggcgcgctgaccccgaagccgcctccgccttcggcgcctgctgcctccctcggccaggcttgttgttcgggactgtgagcttcctggctcctgggcagtggggaagcccccgggggcgagtgacctcagctggccacgacccagccctcccccgtgcgtatctcgcttaagatggcagcggagtcaggggaactaatcggggcttgtgagttcatgaaagatcggttatattttgctactttaaggaatagaccaaaaagcacagtaaatacccactatttctccatcgatgaggagctggtctatgaaaatttctatgcagattttggaccgctgaacttggcaatggtgtacagatattgctgcaaactaaacaagaaactaaaatcatacagtttgtcaagaaagaaaatagtgcactacacctgttttgaccaacggaaaagagcaaatgcagcatttttgataggtgcctatgcagtaatctatttaaagaagacaccagaagaagcctacagagcactcctgtctggctcaaaccccccctatcttccattcagggatgcttcctttggaaattgcacttacaatctcaccattctcgactgtttgcagggaatcagaaagggattacaacatggattttttgactttgagacatttgatgtggatgaatatgaacattatgagcgagttgaaaatggtgacttcaactggattgttccaggaaaatttttagcatttagtggaccacatcctaaaagcaaaattgagaatggttatcctcttcacgcccctgaagcctactttccttatttcaaaaagcataatgtgactgcagttgtgaggctaaacaaaaagatttatgaggcaaagcgcttcacagacgctggcttcgagcactatgacctcttcttcatagatggcagcacacccagtgacaacatcgtgcgaaggttcctgaacatctgtgagaacaccgaaggggccatcgccgttcactgcaaagctggtcttggaagaacagggacattgatagcctgttatgtaatgaaacactacaggtttacacatgctgaaataattgcttggattagaatatgccggccaggctctattataggaccccagcagcacttcctggaagaaaaacaagcatcgttgtgggtccaaggagacattttccgatccaaactgaaaaatcgaccatccagtgaaggaagtattaataaaattctttctggcctagatgatatgtctattggtggaaatctttcaaaaacacaaaacatggaacgatttggagaggataacttagaagatgatgatgtggaaatgaaaaatggtataacccagggagacaaactacgtgccttaaaaagtcagagacagccacgtacctcaccatcctgtgcatttaggtcagatgatacaaaaggacatccaagagcagtgtcccagcctttcagattaagttcatccctgcaaggatctgcagttactttgaagacatcaaaaatggcactgtccccttcagcaacggccaagaggatcaacagaacttctttgtcttcgggtgccactgtaagaagcttttccataaactcccggctagccagttctctagggaacttgaatgctgcaacagatgatccagagaacaaaaagacctcctcatcctctaaggcaggcttcacagccagcccgtttaccaacctcttgaatggcagctcccagccaactaccagaaattaccctgagctcaacaataatcagtacaacagaagcagcaacagcaacgggggcaacctgaacagccccccaggcccccacagcgccaagacagaggagcacaccaccatcctccgaccctcctacaccgggctttcttcttcttcagcgagattcctgagccgttctatcccttcccttcagtctgaatatgttcattactaaggccttgccactccagtgaaagctgttcttctcttagacacaatttcttcatctggacgagcagtggagagggaaagcaacttcttgctggaagaatatctctgccttcttaccttaaattaaaaagagcactaagataacaccttcaagagacttgaaaacagaaaactggttaatgactactataaatgcactgaaactatgtttatggagatttccatacttttaaagacagttttaatgttgaatttggtattttgaagggttatttttaatgtattttggtaatacatttattattatatttacatgtacagtgttacattatatatgtattgtgaactttaaaagactattttgataaatttataaatatataaaattatgtaaaaactacactatattttgatttagattttcctgctgtttgctaccaaaaatttgtattttaaatctgtttagttttagtatggttttgtctctaatgaataaataattccttcttattaagaagaagtaagggagaaagtttttagaaagtgatttttatgctcgcactataaatatggcaggtcagttcattcttttgggaagtcagtttagttacactgagtttatccaagtttatctctaccaagagtataatggcatgggatggcttatttaggacaattccctttcctattgtttttgttgctgagccaatttgagttagttttgcatcctggggggctttaaaatacagcatgcagtgaaagatcagaattcactgaatatttcttctgagagcatggtttcatggtttttctctatgaaatgactcaatattccaaatgtttttttttccttcctcctttcaaaagagttcttaacccaattaggatatcctgctttgggtatgaggttgttgttgcctgtaatcacacatggtttgacatcagttttaaatcaatggagagaaaaaactgaaaaagatgctgctaagtagttctctgtattaaaggagatatttttaaaacagggtacaaccccctgctgcacacgctagcatatctggaacctactatgaaaatgaaaggacccttataggtactcacagccctttcatgtaagtatgatctgatatttaggtcttcagaagcctgtaggtttcatttctatgaggaatcgaggagcgttacatcctgatatccttccaggctgcttaagaatggactgcttcgacactgaaagtgctagttaaatggattcatatgaagtgctttactcccaaccattgagttatttataatgtatttattaggggagggtaccttgagtctattatatatgcttcatcaaaacatcttgttcatgttttatgtttttaaaaaaggcatttgaatgaatgtttgactcaggtttgttaaattaaccttcagtaactgcagtaccaaaaattacactcaactgatgaaaaaaacgaattgtatgatttaggaatcaaaaactaaaataagtggaattatgtatcttttctaaagttaaaaaagtaaaatattttattatgagttattataaaaattggttaattgtataggaagatgacagtatttttttcaagttatcataaaaagtaattcagatgacatttgagaagtaggggaaagggaatcatgttgacagttttagttctgtgaacactaatttgtgtgaagctattaaaatgattgtaaagttgactactgtaaatttcccataattatgtgtgtatatgtgtcatatgtatgtacatgtatatgtctaaaaattactttacacatgtgcctacatagacacaccaagaagtggatgtatataatatagaaagtatatagcaaagtaattttactctgataataaaaattgtttgacatgtattttgttatgaatagtttatcttccaaaagatattttgctctattttaaagtgtagaagaatacactgctaataaataataaaagttttattcaatttaaaaaaaaaaaaaaaaaa

SEQ ID NO: 2098 - DNA, 1711 bp, Homo Sapiens
  NM_003675
agcttccgccggaagcggctcctgtcagttgttctcaggtgtttgggcttgttgttccgtatactcagtgggttcgcggccgccggcccagtgaggctgggttcgaggagctggagcgggaaactggagcttaaattctggcggcgagatggacattctgaaatcagagatccttcggaagcggcagctggtggaggacaggaacctgctggtggaaaataaaaaatatttcaagcgtagtgagctcgccaaaaaagaagaggaagcatattttgaaagatgtggctacaagatacagccaaaagaggaggaccagaaaccattaacttcatcgaatccagtgttagaacttgaactggcagaggaaaaattacctatgacgctttctaggcaagaggtcatcagaagattgagagaaagaggagaaccaatcagactatttggagagactgattatgatgcttttcaacgtttaaggaaaatagagatcctcacaccagaagttaacaagggattgaggaatgatttgaaagcagccttggataagattgatcagcagtacctcaatgaaatcgtcggcggtcaggagcctggagaggaagacacacagaatgatctgaaagttcatgaggaaaacaccacaattgaagagttagaggcgcttggagagtccttagggaaaggcgatgatcataaagacatggacatcatcaccaaattcctgaagtttcttcttggcgtttgggctaaagaattgaatgccagagaagattatgtgaaacgcagtgtgcagggtaaactgaacagtgcgacccagaaacagaccgagtcctacctaagaccactttttagaaagctacggaaaaggaatcttcctgctgatattaaagaatcaataacggatattattaaattcatgttgcagagagaatacgtgaaggcaaatgatgcttatcttcagatggccattggaaatgcgccttggcccatcggtgtcactatggttggtatccatgccagaactggcagagaaaagattttttccaagcatgttgcacatgttttaaatgacgaaactcagcggaaatatattcagggattgaagaggttaatgaccatttgccagaaacactttcctacagacccatccaaatgtgtggagtacaatgcactgtgagatctgtgtatggtgtgttaataacaataagaaacttagggaagcaggctgtggacttctggaattaccaacaggaatgaggaaagaagaaaactggagtttccagtctctgagttctacctgatgtaactcttgattggttttaagaactttgttggccttcatttcatatctgactgcaagctgatttttctttcttgctttcattttaattagtccaaaattaagttttaaagatttttcctcacaatttaaatccatagacaacagaagggggtttaaaatgacctttttttcagttgacccgaaagttgtggttagatgattaaaaagaaacatttgaggatggacttaattatttcagtaaaatattataatttgcctattgtcttttatgtaatatttatataaaatatttttatatatttcaaaaacatgggaccattgaatgaaactttatagtccttaaatgttgctgaacttttgctgtcttgcaatagaatttgaatgtaaatattattactggtaaaaaaa

SEQ ID NO: 2099 - DNA, 2058 bp, Homo Sapiens
  NM_003676
cacagccggccgacaccacaccagccggggagccgccgccgccgccgccacctctgagcagccggctgggagcgagagccgacagctagtctgcaagccaccgctgtcgccatggggagccgcgtctcgcgggaagacttcgagtgggtctacaccgaccagccgcacgccgaccggcgccgggagatcctggcaaagtatccagagataaagtccttgatgaaacctgatcccaatttgatatggattataattatgatggttctcacccagttgggtgcattttacatagtaaaagacttggactggaaatgggtcatatttggggcctatgcgtttggcagttgcattaaccactcaatgactctggctattcatgagattgcccacaatgctgcctttggcaactgcaaagcaatgtggaatcgctggtttggaatgtttgctaatcttcctattgggattccatattcaatttcctttaagaggtatcacatggatcatcatcggtaccttggagctgatggcgtcgatgtagatattcctaccgattttgagggctggttcttctgtaccgctttcagaaagtttatatgggttattcttcagcctctcttttatgcctttcgacctctgttcatcaaccccaaaccaattacgtatctggaagttatcaataccgtggcacaggtcacttttgacattttaatttattactttttgggaattaaatccttagtctacatgttggcagcatctttacttggcctgggtttgcacccaatttctggacattttatagctgagcattacatgttcttaaagggtcatgaaacttactcatattatgggcctctgaatttacttaccttcaatgtgggttatcataatgaacatcatgatttccccaacattcctggaaaaagtcttccactggtgaggaaaatagcagctgaatactatgacaacctccctcactacaattcctggataaaagtactgtatgattttgtgatggatgatacaataagtccctactcaagaatgaagaggcaccaaaaaggagagatggtgctggagtaaatatcattagtgccaaagggattcttctccaaaactttagatgataaaatggaatttttgcattattaaacttgagaccagtgatgctcagaagctcccctggcacaatttcagagtaagagctcggtgataccaagaagtgaatctggcttttaaacagtcagcctgactctgtactgctcagtttcactcacaggaaacttgtgacttgtgtattatcgtcattgaggatgtttcactcatgtctgtcattttataagcatatcatttaaaaagcttctaaaaagctatttcgccaggcacggtggctcatgcctataatcccagcactttgggaggccaaggtgggtggatcacctgaggtcaggagttcgagaccagcctggccaacacggtgaaaccccatctctactaaaaatgcaaaaattagccgggcgtggcggcacatgcctgtaatcccagctacatgggaggctgaggtgggagaattgcttgaacccaggaggcggaggcagaggctgcagtgacccaagattgtgccactgcactccaccctgggcaacagagcaagaccccatctcaaaaataaataaatatatataaaaaataaaaagctatttctagtttatttcactataaagttttgctttattaaaaagctaataaacagctattaatcacagtgtattagtatttgttacatttttgtatttcactatctttatactatataatatggtaacttgggtaccgggggaactttaaaatttcatctcaaaaataatttttaaaaagcctgaggtatgatatagcataaaagattgagatgaaaatatatttccctgtaagctgaattactcatttaaaaattttaacttctatatgggacccgaattagacactgctgaatcctgtacagccttactcataaataaagtacttactgaatttccaccattcaaaaaaaaaaaaaaa

SEQ ID NO: 2100 - DNA, 5015 bp, Homo Sapiens
  NM_003679
gacacagaaatcagtgtcactcagtgacagaagcaacaataattgtgaaaaatacttcagcagttatggactcatctgtcattcaaaggaaaaaagtagctgtcattggtggtggcttggttggctcattacaagcatgctttcttgcaaagaggaatttccagattgatgtatatgaagctagggaagatactcgagtggctaccttcacacgtggaagaagcattaacttagccctttctcatagaggacgacaagccttgaaagctgttggcctggaagatcagattgtatcccaaggtattcccatgagagcaagaatgatccactctctttcaggaaaaaagtctgcaattccctatgggacaaagtctcagtatattctttctgtaagcagagaaaatctaaacaaggatctattgactgctgctgagaaataccccaatgtgaaaatgcactttaaccacaggctgttgaaatgtaatccagaggaaggaatgatcacagtgcttggatctgacaaagttcccaaagatgtcacttgtgacctcattgtaggatgtgatggagcctattcaactgtcagatctcacctgatgaagaaacctcgctttgattacagtcagcagtacattcctcatgggtacatggagttgactattccacctaagaacggagattatgccatggaacctaattatctgcatatttggcctagaaatacctttatgatgattgcacttcctaacatgaacaaatcattcacatgtactttgttcatgccctttgaagagtttgaaaaacttctaaccagtaatgatgtggtagatttcttccagaaatactttccggatgccatccctctaattggagagaaactcctagtgcaagatttcttcctgttgcctgcccagcccatgatatctgtaaagtgctcttcatttcactttaaatctcactgtgtactgctgggagatgcagctcatgctatagtgccgttttttgggcaaggaatgaatgcgggctttgaagactgcttggtatttgatgagttaatggataaattcagtaacgaccttagtttgtgtcttcctgtgttctcaagattgagaatcccagatgatcacgcgatttcagacctatccatgtacaattacatagagatgcgagcacatgtcaactcaagctggttcatttttcagaagaacatggagagatttcttcatgcgattatgccatcgacctttatccctctctatacaatggtcactttttccagaataagataccatgaggctgtgcagcgttggcattggcaaaaaaaggtgataaacaaaggactctttttcttgggatcactgatagccatcagcagtacctacctacttatacactacatgtcaccacgatctttcctccgcttgagaagaccatggaactggatagctcacttccggaatacaacatgtttccccgcaaaggccgtggactccctagaacaaatttccaatctcattagcaggtgatagaaaggttttgtggtagcaaatgcatgatttctctgtgaccaaaattaagcatgaaaaaaatgtttccattgccatatttgattcactagtggaagatagtgttctgcttataattaaactgaatgtagagtatctctgtatgttaattgcaattactggttggggggtgcattttaaaagatgaaacatgcagcttccctacattacacacactcaggttgagtcattctaactataaaagtgcaatgactaagatccttcacttctctgaaagtaaggccctagatgcctcagggaagacagtaatcatgccttttctttaaaagacacaataggactcgcaacagcattgactcaacacctaggactaaaaatcacaacttaactagcatgttaactgcacttttcattacgtgaatggaacttacctaaccacagggctcagacttactagataaaaccagaaatggaaataaggaattcaggggagttccagagacttacaaaatgaactcattttattttcccaccttcaaatataagtattatcatctatctgtttatcgtctatctatctatcatctatctatctatctatcatctatctatctatctatctatctatctatctatctatctatctctatttatttatgtatttagagatcaggtctcactctgttgaccaggctggagtgcagtggtgagatctgggttcactgcaacctctgcctcctgggctcaagcaatcctcccacttcagcctcccaaatagctggggctaccatggtatttttcagtagagaccgggtcttgccatgctgcccaggccagtctcaaactcctggcctcatgtgatctgcccacctcagcctcccaaagtacagggattagagttgtgagccaccgctgccagcccagagttaccctctaaagataagaaaaaggctattaatatcatactaagtgaaggacaggaaagggttttattcataaattaaatgtctacatgtgccagaatggaaaggaaacaaggggagacaacttttatagaaatacaaagccattactttattcaatttcagaccctcagaagcaatttactaatttattcttcgactacatactgcagcagaaccagcaatacacttgatttttaaaagcacatttagtgaaatgttttctttggttcatccttctttaacaggctgctgagtcactcagaaatccttcaaacatgattaattatgaagatgaaacactagagtcatataagaaataaaaattgggcaataaaataaaatgattcagtgtttcttttctatattgtcaatgaaaaccttgagttctaataatccatgttcagtttgtagggaaagaaaaaataatttttccttctacccactttaggttccttggctggggcccctataacaaaagacagattgacaagagaaaaacaaacataaatttattagcgggtatatgtaatatatatgtgggaaatacaggggaatgagcaaatctcaaagagctggcgtcttagaactccctggcttatatagcatcgacaaagaacagtaaatttttagagaaacaacaaaacaaagaaaaagagctttgagtctgtaggggcagcaatttgggggaagcaaatatatgggagtttgccttgtagattcctctggtgctggtctccaggctgacaaggattcaaagttgtctctgaaactcctctttgtcatactgcacatataaaacgtcttttgtttccaacaagaggattttctttttcattctagaattatctccttgataacttgatcagatataggacatgacactgaatagagtccaacagtacaaaaaaaattcagtatgttctagctacttcacacatgtgtacgcgacagttatttttacagtaaggtattttcgagaaaaatgcattacgtgttttggaaaatagagtaatttaaaaaatatatttgaaatgaaaatctccaacacattagaagatgatgatgttagatgcccatcgtgtgccacaagtggttttttcattatgtaaagcacccgttgaattaaaagaatttgtttttgttcaacctcttcctgaggcccaagagcatatgggcaattcggatttcctgctggaccacaaggttctgttgatattacatagaacgggtattccagacacttcttatgatgaaagtccaaaagtggcatccaatttaaggccccatctttcgttgccattcttcattcctacaaaggacgaacttggattacatcaactttggacccattggttttgtcgctgtcgtcaactgacagtgattcatcactggtgatgataaaaatgatggaagaagagttgaaagtcacttttttctttggcctgtccccatctttctgtgacatcacaatgggtctgatctgcatttcacttccagctgctggtaggtctttagcaggcctctggcacctcagcagtcggaggcacagaagctgcaaaagggatcttcgaaactgggcagagaaaaaataaagtggaatattaagtaaaagttgggcactaatctggattaacattcgaggaaatcagttgagctgaatttaagttgttttttgtttgttagcaggtgtggatgtggggttatgtggtcatgctcagatctacctaaatcaccccagagctttatgtcttttattcattctaattcttattaaccggaatatgtaggaccatttcaataccttgtaatcctccaagcttcaatctgcacacactttctatgagggcaggtacaactattaagagattttgaacattaagttagtccacaaatattcagtgggcatctactaggtgacagccactgtgctataattagagactttttactataagcatcaaaaacagataaggctcttcctggcagagtttacagcctggtgtacttgctaatgtctctttaattaggtgaagaattttttttttctatcgaaattactaatcagttggggaaaaaaatactatagcagacagcactaatgtcatcaacaaacattgttcttctccgtgtcctgggtacaacatcgaataatatttcttggcctcctttccgcttctcctctctgctgttcctctctacaagaacctgggaggccaacgcctaaagatcataatatcacacaatggaaggaacctagattcctaaatgactgcataggacagatcccatctcctccacccaatacattattagactgaactgtgacctgaaatgagcaataaactctgtattaattcactgaaatgttggggttgcttgttatagtagtcggtccatcatgaccagtaaaacataaatcaaaagttaatgtaattgttatcccattatttagagcgaaataaatgttgaatatatggactttctcagattaggaaataccaattaaaaatataataaatagcta

SEQ ID NO: 2101 - DNA, 3117 bp, Homo Sapiens
  NM_003680
gcaacagcctcccgccgagccggccgggacagaggcggcccccacccccactgggcaggggactgcagacggcgctccccgactctcaagacgaccagggagcttcccttttcctcagcggggtgaggggcatctgtcgcccgccgacttggaggtggaggggcagggacattccctcgccatcacctcaggagctagaacgcgcccttctcgcagcagggcgtgggcctcccaatccctccaaggggcggacggcgtgcgcaaccccctggagaagcaacaggcgcccccatccccctccaagccgggtaacgccgaccccctcgtccctcccgctcttcacctccggaagccgggccaaagcctgggcgaacgactgcgcctcactccgccccctgcgccattttatcgccccctccccgacctcccctaccccgagtcagccgggccaacaccagggggagggcaaaccagcagtgattggcaggaaaccgtcccgcctctaggagggttgtgccccgctcaggcgcctcagccccgccctccgcaccgcccaccgtgcccactggctccaccttttcccgtctcatcgacctgctcgactctctgctgctcctcactttttccggccgctgccggaggggtccaggccgagtaagcggagcgccgagcccagctgatgcaacctggctggactcgcgtgacagttcccggcacgcggcggcgacggtgacccaggaaggggctctggtgccgggctgagcgggggaagcaggggtagcggagccatgggggacgctcccagccctgaagagaaactgcaccttatcacccggaacctgcaggaggttctgggggaagagaagctgaaggagatactgaaggagcgggaacttaaaatttactggggaacggcaaccacgggcaaaccacatgtggcttactttgtgcccatgtcaaagattgcagacttcttaaaggcagggtgtgaggtaacaattctgtttgcggacctccacgcatacctggataacatgaaagccccatgggaacttctagaactccgagtcagttactatgagaatgtgatcaaagcaatgctggagagcattggtgtgcccttggagaagctcaagttcatcaaaggcactgattaccagctcagcaaagagtacacactagatgtgtacagactctcctccgtggtcacacagcacgattccaagaaggctggagctgaggtggtaaagcaggtggagcaccctttgctgagtggcctcttataccccggactgcaggctttggatgaagagtatttaaaagtagatgcccaatttggaggcattgatcagagaaagattttcacctttgcagagaagtacctccctgcacttggctattcaaaacgggtccatctgatgaatcctatggttccaggattaacaggcagcaaaatgagctcttcagaagaggagtccaagattgatctccttgatcggaaggaggatgtgaagaaaaaactgaagaaggccttctgtgagccaggaaatgtggagaacaatggggttctgtccttcatcaagcatgtcctttttccccttaagtccgagtttgtgatcctacgagatgagaaatggggtggaaacaaaacctacacagcttacgtggacctggaaaaggactttgctgctgaggttgtacatcctggagacctgaagaattctgttgaagtcgcactgaacaagttgctggatccaatccgggaaaagtttaatacccctgccctgaaaaaactggccagcgctgcctacccagatccctcaaagcagaagccaatggccaaaggccctgccaagaattcagaaccagaggaggtcatcccatcccggctggatatccgtgtggggaaaatcatcactgtggagaagcacccagatgcagacagcctgtatgtagagaagattgacgtgggggaagctgaaccacggactgtggtgagcggcctggtacagttcgtgcccaaggaggaactgcaggacaggctggtagtggtgctgtgcaacctgaaaccccagaagatgagaggagtcgagtcccaaggcatgcttctgtgtgcttctatagaagggataaaccgccaggttgaacctctggaccctccggcaggctctgctcctggtgagcacgtgtttgtgaagggctatgaaaagggccaaccagatgaggagctcaagcccaagaagaaagtcttcgagaagttgcaggctgacttcaaaatttctgaggagtgcatcgcacagtggaagcaaaccaacttcatgaccaagctgggctccatttcctgtaaatcgctgaaaggggggaacattagctagccagcccagcatcttccccccttcttccaccactgagtcatctgctgtctcttcagtctgctccatccatcacccatttacccatctctcaggacacggaagcagcgggtttggactctttattcggtgcagaactcggcaaggggcagcttaccctccccagaacccaggatcatcctgtctggctgcagtgagagaccaacccctaacaagggctgggccacagcagggagtccagccctaccttcttcccttggcagctggagaaatctggtttcaatataactcatttaaaaatttatgccacagtccttataattggaaaaatactggtgcccaggttttcttggagttatccaagcagctgcgcccctagctgggatctggtacctggactaggctaattacagcttctccccaacaggaaactgtgggatttgaaaaggaaagggaagggaaaacagagaacctagtggtctaccaagtggttggcaactttcccaatgtctgcttactctgaggcttggcactgggggccagggcctgccccagggctcctggaatttcccttgatccagctaggctgggacactccctaaatcagctgcgtgttgttagcatcaggcagaatgaatggcagagagtgattctgtcttcatagagggtggggtacttctccataaggcatctcagtcaaatccccatcactgtcataaattcaaataaaatgtctgaacaaggg

SEQ ID NO: 2102 - DNA, 7390 bp, Homo Sapiens
  NM_003681
cggaactcgcgggttcggagccgcccgctgaggtcagaaggaggcgtctgcgctgatcgggtccgccgcgcgccagagccagagtcgcagccgaggggagccggggccggagcccgagcccgagccgagccggagcccgagcgagcggcggagaccgtgcccccgcctcggccccgcgccgccgcggccaggcccggcatggaggaggagtgccgggtgctctccatacagagccacgtcatccgcggctacgtgggcaaccgggcggccacgttcccgctgcaggttttgggatttgagattgacgcggtgaactctgtccagttttcaaaccacacaggctatgcccactggaagggccaagtgctgaattcagatgagctccaggagttgtacgaaggcctgaggctgaacaacatgaataaatatgactacgtgctcacaggttatacgagggacaagtcgttcctggccatggtggtggacattgtgcaggagctgaagcagcagaaccccaggctggtgtacgtgtgtgatccagtcttgggtgacaagtgggacggcgaaggctcgatgtacgtcccggaggacctccttcccgtctacaaagaaaaagtggtgccgcttgcagacattatcacgcccaaccagtttgaggccgagttactgagtggccggaagatccacagccaggaggaagccttgcgggtgatggacatgctgcactctatgggccccgacaccgtggtcatcaccagctccgacctgccctccccgcagggcagcaactacctgattgtgctggggagtcagaggaggaggaatcccgctggctccgtggtgatggaacgcatccggatggacattcgcaaagtggacgccgtctttgtgggcactggggacctgtttgctgccatgctcctggcgtggacacacaagcaccccaataacctcaaggtggcctgtgagaagaccgtgtctaccttgcaccacgttctgcagaggaccatccagtgtgcaaaagcccaggccggggaaggagtgaggcccagccccatgcagctggagctgcggatggtgcagagcaaaagggacatcgaggacccagagatcgtcgtccaggccacggtgctgtgagggccccgccgcttgcccgtgacacgcagcgcgttggtgtctccgtgtttgtccctgtgaaaacatgtaacgtctgccttagagccatgaccgaaacttgatatttttttctttcatgagtgtccggcatctgctggtcttcattgtgaaacgtgccagtcgtgctttgtgaaaaataacaaagtggtcacagaaatttgtgatctgaaaacccggctcccttccccacaaggctcctgggcctccgggaagacgggcccctgtttgccatctcgggggtgttccctgtgggagggtgagtgggtgaggccgagcctgctgcgtgtggagcctcgagtgggccctggctgccactaccgtacagaggccgtgtcgcgctgggctgggcctgggtggcctctgtctttgcatctctgagaaggagtcgggtggtaacggttggggtcaggaagaattctgccaagtatctttactgtcattctgaccatagcctctttgttcccgcattcgaacttttggttcttactttgctgctcgtttagtccctggggatttcagatcttaggctgttgtttcaccgtatgggagggttgatgtgagcttgcttggagacacacggtgcagcatcagggaccttcccaggccccagcaaattcaagtcggtctgcagacctctcagctacccgcgggacctcttgtaacccatcggcatcttccaggaatccgccgagtgacttgaggaagatgctaacgcagtaaggtctgtgctgggccaagagcagctttgaagctccagagaaccaccccgtcaggttccttgtggaagctcccctcatccgtggtgcagcaggctgagcactgcgcgtttgccacgtgctgcccgtgacagcacattgagccacagcatttgtagacaggacagaggggtgcctgccccctgcccctgctggcacatttaacccttgtcccctgacctcagttctgtgccccaccaaatgcccaggggcaagaggccaccctggaagctgccaatcttccaaggtgggtgtggggcacggtgggggcgggcagctcccaggcccttgggcaggctggggtgacggcagaggccacagcaccagctctgacaagtcctatcatcctctgctcagcagtgacctccctggccccactttgcccagagtttggggtccccccaggtatagctataggcggcagtgcctgtccctggcctgccttgatttcagccacacccctgcagccctgcatcccagctctggggtgtgcagaggtttgtgtctccagggaacccacggctggagagaaatagggagatgcaggaagtgggggcccatggggcccccaagaagcggactctccaaggggtacccccaccccgctaccttccccacggacgggcccctcctggagcccataccctcctgtgaggccattccagtgtcttctagaaagactcgcttgccaggagtgcgttctttgttgaaaaatgccctgaagcgaaaagatgcaggtttatatggaacccccaccccctcccccactctcccactctgttcgttctgaatgtcttcacgagcgtgcatcagggcgcctggctcccccacctcagccagtgagtcagacacgggtttcgcagccatgtttcctggctccgaggacacgggtggcaggcccgttgcagcccagagccactggtccctacagggcgccgccacaccagcaggaaggaggatggctgtgtccggagcctggcggggaggcggcctccccagtatgtgagtgcagggatctgccagaaccacctggccctctgtagggcgtttaactggaaataccctcactgccaagtggagactggggcgtgtgccacattgccagccaccaggaaagcttttctttttcttttttttttttttttaaacaccaagagcacgtatagcatgggggaaagaacctaaatgtctctctgtcctgtgagctggtgaaaaacccagcatgagaacgcagtgtcaggtgtgggactccttctgcccctgcagtgggtgttacgggcggtgtgccctggcgagcaagctttgattcttggttctttgagctcgtttcagaggctgagtccccacatcagctttagttcttggacttccctgtattaagcaagaattaggagaatggctgtccctgcaggcgcctcccgtaaatcctgagctctctggcgcaatctgaaacttctcttctgttttctttggctgtatcagccgaaccaggagaggcctgggctgcgactaaggagaaagaaatcgggggtttctgagagcagatggtgcctttgtgggtgcagggcttttgtggaaattgtcagcctctacgggcagagtccggcatcccctccccagactgcctgctgtcaaaccacggagcagctggagcctgccctgtccacggcccgtttccacccgggcatgttcgtctctcatgacttcggcagaggcccctggtggccttcagtttcagtttctcatccaggaaggtaaccttgggcattggcagtgggtttccctatggcttggatccagattagaattgatctttgttttcactttccatagttaataacatgcaaaataatgagaagaatttattttaaggtgacagctatactggtccaacatcgcctgcttattgtcagggtacagaagtttaatactttcttaatccagtttttcaaacttctccctgtagaccgtaaggatgaattccacaataggatcctttttaaaatcgattttaaattgttgcctagtcctgccaaggttattatgtgcatctgttatttttccaatacatgtaaacagttgcagcatgatgctttgtttaatgtcctgttcttaagctcgttagagccagttttgaaacgtttggtcttaccgtgaacggaggctggcttggcttagccacgctgatgagtaagtgagggatgtctccatcttgagatcaccaggcaagagagttgcctgcaccaggtaagaggccaaagcccctggggtaacagtccccaccgctacccgaggtaaaacaataaaagctatgtggttgagctcaggcctctcgtgcctggtgtcagagaaggcagagcccacagtaggtgcacggtgcaaggccctgggagggcactggccagggaaggtggtatagatggccctcagattgcggggccccgagcagctccccactctgcccgtccaccttccctggctccagcctcattctctctttagtttaactatgcaaagagaggaggttgagagtgttctggcagctggagctcttttccttgtccttcctgccctccgatggggccacctgtgtcggggcagcagtgtccatgtttatggagatcagaggtgtccccactgtgtggctggactgtactctgctgcccgggtagccaggagtctctccctctctcccctgccgcctgcctggtctcatgggcctccttcacacacccctccctgtggatcgcctgcctgggcccagagcaggggaactggagtttgtgagtgagcagagcaggttatgtgcagacagggaaacgagaactttggacctggctttctgagtccaggtgagagctgtgtggccccccgatgccactctgcccgccggagggatgtgcctgctgagccttttccttccacgccgcctctcactgccaggccagcggcttccgctgagactcgctggagaggcggctcccgtgtccgtccaccgagcactcagatggatgctgatcaccagggccgagggggctcccagaaggaccccaggccctggggagggtggctgtgggaggccaagtccactgcccggaagtcttgtcagccctaagccagggaagcctggagcgtggcctggcgggtctgggtggacaccgtccccactccggactcccagcacaggggaggatacctgagcctgtatggccctgtagccctgggcagagctgggcctgtcgtgtgttcctgcctggcaggtgcaggtgctggccatctgcaggtggaaggaggtgggaatcttggattttttgtttttttttgtttttttttttttgagatgaagtctcgctctgacacccaggctggcgtgcagtggtgtgatctcggctcactgcaaactccgcttcctgggttcaagtggttctcctgccccagcctcccaagtagctgggattacaggcatgcgccaccacgctcagctgatttttgtatttttagtagagatggggtttcaccatgttggccaagctggtctcaaactcctgacctcaagtgatctgcccgcctcggcctcccagagtgctgggattacaggcatgagccagtgcacccggcggaatcttggaatttttatagacagcacctcagtttctgactccagccgcacacctcctgcctctgccagcaggggttgccgccagaccagagccagggccaggtccctgcgtccatcccccccggtaggatggacgtgagccatccttctaggggacttttttcagtgtgcgactcgtctctgttaggtggtaggagccagtttgtgtggcctgtgccacgctccacagtgcgtggctgggctctgtgtgtggcctgtgtcccctgtccctgcaggacccagcaggcatcgtggcgtgacagctgtgtccaagccactgcccgggcatcccatcacccaccagggtgcacggtctctcctgctgggggctttctgtcgcatgtgtgtctcctgtcgactctgcagtttgttctcagagcagaatgtttcctgttctcagtgcacaaagacactggttttcaatcggcgtctaaaaccacgttcctgcctttcattgcaacacggtgtgttcatttgtttaaaacagtttaatgagtaagtttagatgactggtcaatatcttaaaaatgtatattagtaagaagttcttcctggaatttttctttcgattctggcagaataaacaggtgtttttagttttcccactgtctgagccaagcaggaccctgtcccagagcaagagatgtccccttccatctctgacccttgcctgggacaagctttgatggggggccccagcttcaaggctgtggtgggaacagcacccccaaatgccagcctctcctttcttcccatccaccagtatactgcggggccatttctggtctttgtccaacaggaaacccatttctggtgggatatgccttccagtgccacagggccactcaccccatgcatctctgtcctgcccgtcagtgctgggacggacagcaagggcaagcccagtgtctggcggataggtgggtgggaacagagaggggagaatgccgtcctaagcttctgcttggggatcccccacacgacctgggtactgcctgggaaacctgtcctaagtaaaactatggacctcgcctcgcccaccggcctgcgaagccagcatctccgtgaaggtggatggaagcgcctttgtcctcattttgagctgcaagctgggtcagcggctctgaagccctcgagtgactttctaacccaagacccagcccctggcaggaggagggtgggtgcagggctggtgggacaaaaagaggcctcagcaggcctggaagacccttccagtacatcccacagcgtgtcgagcagctgggagaacctgtgtcaagctcgagccgtcataggtccccatgaggtgtctgaagccccttcttggtgatgggaggcagaggtgctgacgttctggagcatggacgtgagtcctcagctggctccgcgtgggcccttggagggtgccaggtgtgtggtgaccttctggatgcctttaacttcatggctgcgtcattcctgatttagaactttaaccggagcttcatctagtgattgcaaaactggaccaatgggaggacggcggcgcagcccgctccctccgtggaatggagctcagctcttcggaggcatcaaagcacctgtcgcctccgtggtccccctgctgagggagtgcggcctctgcaaggttcgggggtggcttcgtttgcctggagtggccggccctgcttgtgccatgtggatgtttgtgagcctcggtcctacagcactgtgtaggctgcatctgtttcgtgctggtcctgttgacttgtatgatatccacaaataaatattttcatggcggtcgtgttgaaaaaaaaaa

SEQ ID NO: 2103 - DNA, 2816 bp, Homo Sapiens
  NM_003684
tctctgatcgggcccaccccctggatctagcaccgcctcttccgcgttctcggaggagcgatctgcaggtaggggtgcgcgcgaccgctccccggcgggagccagcgaaggtttccatgtcagaggccgatggagaactgaagattgccacctacgcacaaaggccattgagacacttcgtgtagctggaagacaccaacttcctgacaggagctttatttcatttgggatttcaagtttacagatggtatcttctcaaaagttggaaaaacctatagagatgggcagtagcgaaccccttcccatcgcagatggtgacaggaggaggaagaagaagcggaggggccgggccactgactccttgccaggaaagtttgaagatatgtacaagctgacctctgaattgcttggagagggagcctatgccaaagttcaaggtgccgtgagcctacagaatggcaaagagtatgccgtcaaaatcatcgagaaacaagcagggcacagtcggagtagggtgtttcgagaggtggagacgctgtatcagtgtcagggaaacaagaacattttggagctgattgagttctttgaagatgacacaaggttttacttggtctttgagaaattgcaaggaggttccatcttagcccacatccagaagcaaaagcacttcaatgagcgagaagccagccgagtggtgcgggacgttgctgctgcccttgacttcctgcataccaaagacaaagtctctctctgtcacctaggctggagtgctatggcgccatcagggctcactgcagccccaacctccctgggctccagtgatcctcccacctcagcctcccaagtagctgggactacaggcattgctcatcgtgatctgaaaccagaaaatatattgtgtgaatctccagaaaaggtgtctccagtgaaaatctgtgactttgacttgggcagtgggatgaaactgaacaactcctgtacccccataaccacaccagagctgaccaccccatgtggctctgcagaatacatggcccctgaggtagtggaggtcttcacggaccaggccacattctacgacaagcgctgtgacctgtggagcctgggcgtggtcctctacatcatgctgagtggctacccacccttcgtgggtcactgcggggccgactgtggctgggaccggggcgaggtctgcagggtgtgccagaacaagctgtttgaaagcatccaggaaggcaagtatgagtttcctgacaaggactgggcacacatctccagtgaagccaaagacctcatctccaagctcctggtgcgagatgcaaagcagagacttagcgccgcccaagttctgcagcacccatgggtgcaggggcaagctccagaaaagggactccccacgccgcaagtcctccagaggaacagcagcacaatggacctgacgctcttcgcagctgaggccatcgcccttaaccgccagctatctcagcacgaagagaacgaactagcagaggagccagaggcactagctgatggcctctgctccatgaagctttcccctccctgcaagtcacgcctggcccggagacgggccctggcccaggcaggccgtggtgaagacaggagcccgcccacagcactctgaaatgctccagtcacaccttataggccctaggcctggccaggcattgtcccctggaaacctgtgtggctaaagtctgctgagcaggcagcagcctctgctctgtggctccattcaggctttttcatctacgaaggccctgaggttcccatcaacccccatttccctagggtcctggaggaaaaagctttttccaaaggggttgtctttgaaaaggaaagcaatcacttctcactttgcataattgcctgcagcaggaacatctcttcactgggctccacctgctcacccgcctgcagatctgggatccagcctgctctcaccgctgtagctgtggcggctggggctgcagcctgcagggagaagcaagaagcatcagttgacagaggctgccgacacgtgcctcttccctctcttctctgtcaccctcctctggcggtccttccaccttcctctgtcctccggatgtcctctttgcccgtcttctcccttggctgagcaaagccatcccctcaattcagggaagggcaaggagccttcctcattcaggaaatcaaatcagtcttccggtctgcagcacggaaaagcacataatctttctttgctgtgactgaaatgtatccctcgtttatcatcccctttgtttgtgattgctgctaaagtcagtagtatcgtttttttaaaaaaaaagtttggtgtttttaaccatgctgttccagcaaagatgataccttaaactcccactgcaagcccatgaacttcccagagagtggaacggcttgctcttctttctagaatgtccatgcacttgggttttaatcagcagttccctattattctgattttaagctgttcctgtgatgaacttagagacagcatcggtgtctgctgctgtgtccccaggtcttgtgtgggtggcacagatctgggcagttagatagtgctctgtgcctaaggtgaagccacactagggtgaagcctcacttccctgtttgagcaatgcagtgcctgctgcccgtgtgcatgaaggtacagccattcagataagtggaactattgagttacataaagaaaatagatttgcatttgtcaggcagacgtttatacaacaccacggtgcttttatacattgtgcttattttaataaaactgaaattctaaaaaaaaaaaaaaaaaa

SEQ ID NO: 2104 - DNA, 8298 bp, Homo Sapiens
  NM_003688
ccgttttcgaagccctccacgctgcggccgctatcccctccggaccatggccgacgacgacgtgctgttcgaggatgtgtacgagctgtgcgaggtgatcggaaagggtcccttcagtgttgtacgacgatgtatcaacagagaaactgggcaacaatttgctgtaaaaattgttgatgtagccaagttcacatcaagtccagggttaagtacagaagatctaaagcgggaagccagtatctgtcatatgctgaaacatccacacattgtagagttattggagacatatagctcagatggaatgctttacatggttttcgaatttatggatggagcagatctgtgttttgaaatcgtaaagcgagctgacgctggttttgtgtacagtgaagctgtagccagccattatatgagacagatactggaagctctacgctactgccatgataataacataattcacagggatgtgaagccccactgtgttctccttgcctcaaaagaaaactcggcacctgttaaacttggaggctttggggtagctattcaattaggggagtctggacttgtagctggaggacgtgttggaacacctcattttatggcaccagaagtggtcaaaagagagccttacggaaagcctgtagacgtctgggggtgcggtgtgatcctttttatcctgctcagtggttgtttgcctttttacggaaccaaggaaagattgtttgaaggcattattaaaggaaaatataagatgaatccaaggcagtggagccatatctctgaaagtgccaaagacctagtacgtcgcatgctgatgctggatccagctgaaaggatcactgtttatgaagcactgaatcacccatggcttaaggagcgggatcgttacgcctacaagattcatcttccagaaacagtagagcagctgaggaaattcaatgcaaggaggaaactaaagggtgcagtactagccgctgtgtcaagtcacaaattcaactcattctatggggatccccctgaagagttaccagatttctccgaagaccctacctcctcaggacttctagcagcagaaagagcagtctcacaggtgctggacagcctggaagagattcatgcgcttacagactgcagtgaaaaggacctagattttctacacagtgttttccaggatcagcatcttcacacactactagatctgtatgacaaaattaacacaaagtcttcaccacaaatcaggaatcctccaagcgatgcagtacagagagccaaagaggtattggaagaaatttcatgttaccctgagaataacgacgcaaaggaactaaagcgtattttaacacaacctcatttcatggccttacttcagactcacgacgtagtggcacatgaagtttacagtgatgaagcattgagggtcacacctcctcccacctctccctatttaaacggcgattctccagaaagtgctaacggagacatggatatggagaatgtgaccagagttcggctggtacagtttcaaaagaacacagatgaaccaatgggaatcactttaaaaatgaatgaactaaatcattgtattgttgcaagaattatgcatgggggcatgattcacaggcaaggtacacttcatgttggtgatgaaattcgagaaatcaatggcatcagtgtggctaaccaaacagtggaacaactgcaaaaaatgcttagggaaatgcgggggagtattaccttcaagattgtgccaagttaccgcactcagtcttcgtcctgtgagagagattccccttccacttccagacagtccccagctaatggtcatagcagcactaacaattctgtttcggacttgccatcaactacccaaccaaaaggacgacagatctatgtaagagcacaatttgaatatgatccagccaaggatgacctcatcccctgtaaagaagctggcattcgattcagagttggtgacatcatccagattattagtaaggatgatcataattggtggcagggtaaactggaaaactccaaaaatggaactgcaggtctcattccttctcctgaacttcaggaatggcgagtagcttgcattgccatggagaagaccaaacaggagcagcaggccagctgtacttggtttggcaagaaaaagaagcagtacaaagataaatatttggcaaagcacaatgcagatcttgtcacatatgaagaagtagtaaaactgccagcattcaagaggaaaacactagtcttattaggcgcacatggtgttgggagaagacacataaaaaacactctcatcacaaagcacccagaccggtttgcgtaccctattccacatacaaccagacctccaaagaaagacgaagaaaatggaaagaattattactttgtatctcatgaccaaatgatgcaagacatctctaataacgagtacttggagtacggcagccacgaggatgcgatgtatgggacaaaactggagaccatccggaagatccacgagcaggggctgattgcaatactggacgtggagcctcaggcactgaaggtcctgagaactgcagagtttgctccttttgttgttttcattgctgcaccaactattactccaggtttaaatgaggatgaatctcttcagcgtctgcagaaggagtctgacatcttacagagaacatatgcacactacttcgatctcacaattatcaacaatgaaattgatgagacaatcagacatctggaggaagctgttgagctcgtgtgcacagccccacagtgggtccctgtctcctgggtctattaggcctctccccagatatctgagcataactgggagcacctcatttgtggaaaagcctctttgttatcggccttgtgtcagcaggtcatggtccctagagactacctagttgtagtgtgacctacatttataattattgtcatgtccgaatagataggaggagaaaaacaattacacactaatttaaagagacagtatcttttttaatcagttctcctaaactttaataaaatgtatctttaaatgtatgtattattcaatcctttggaatgttatatttttggaaatcatagctttttatttccaaggcccctaaaaactgcacaaaatagatgctgctttctataatctattttaataataataaacaatgattctgttaccttgactgggggtggaacactacattctttttagagtctgattttatggattggaatattgggatatctttctttcctttatttatttgaaataattagtgtagtgattacaaaacagtcataaatttttaaaggccttttttctctctttttttttttttagaatagtatttttttttaagtcctttatgtaacatccagataatgtgatactgtctctttgaagcaccctgtaaaccttttagagatttgaagttgggtcttgactcttaatgcatgtggacagtcgcgagcgtttatgctgtcggtgtgtctgtgttggacaaaacaatctgtaatctacagcaaagtacattctacattccgttcatggggcacacccaggggaataagaataaaatgctattatgactaagttgtaaacctatgcacatcccttgcattttgggcaactttataaaaaaaaagaaactgatttttattaataataatcatgtagtgaaatgtgtttgtaattttgtctcaatttaatttgttgtaaggtggggtggggggaattgctggtttcaccatttcagatctgtgttgtctaagagtattaacgttttaattaagcaaagaaatgatttttaatctgtatgtaattgttttaaagcacccattttaagagaaaatactgtgcaatgaagaaaccagtttaggcatttgctataaactgaaatattccaaaagaatcatctataacagccctgtaaattcctttaaaatgataactaacaggacagtttgaccaattttttttaaatatacttccttttatgtgttcaataattaaatgcctttgggtccttcatttcattatagatttgttcaggcttccaagctgataatctttacaattgtataatttgttagatgctcattgaacctttgaaggcccaggagtgagtatcagttggcagggtgacaaagtagcctgccagagcacagctggaccacgtctgactcgcacagagccatgcgcccaagggccacgggtgtactggaggccacctgtggtctctccttcctcttgctgtatcccttggcacaggggaatcatctgtccttgttgctttagagacattaaccatctcataactcttccatgaagtcacattcttccaatacaggagattcgggctggggttctcagactctttgccagaggtcagtagaatgtttttcattagcatgtgagggtgtgaagtgcttatattaacctgtgatccttgaaaacataccatcattttttgcttcttgtaggttagatggccttgtcactttgtgccttggcaggatgtgcagggtgtgttctgagctgaacagctcctcttaaaggaccaaacagagaaggcattagtatacttcttttacattgtcaacaccatacccgcctccgccccccaccgcctattattaaatggtggcgatttttttttttctgatgttgttctttgccagtgaccagatgagtctgcaacttactaacaaggtattgagtgaactacttctgtatgggccccacagtggggtgaccaagccaccaaaccagagataagctcaacagtggtctcacactagatagagagagaaaccttcaaagagttgggtagggctgtgttagaactgattcgaatctgatagatgccaaggccagacagtcgttcctggtatggtactgaccacaatttcgggctcttagtgtgaaggtgcgcactctacctcttttctggtgaagcacaaagacaactacaactaacacatgggaaacagaaacttccctccctctagtggaaacccccacgcccccacttgccctttgagcccacatctccagagatgctgatgatgcctgtcttaagccatctgccatatttataaaggtggattaagcagaggaggagaaaagcaatgccaacttaaatgtctgtggccccacaattcacaagcactgtagcactcatcctcagtggctttatacgtcctctgagaagcacacaggcaggcatcattcttgccatcattccgatggtgaaatccctgcatgcagaactcattgacttctcaaagatgttacctgttccattccactaatacatgtcttctctaaagcagtgtctttatgacctagctgcatatacttacatttctgaattcagagtaatttcagtacattgctgctgctgctgctgctgctgctgctgctgctgctgctgctgctgctgctactgctacattacaattgtccactaagcaatcagagaaaattgctaaaagcttctttactgcttccattccatcagcagaacctttttttttctttctttcttttaaagaccagaatgaatgtttagagtactaaatcttattagtggtcaattgaagtattggagagccacattttgaaggttctctcccccacccaactccattccccacagcaagaaagggagtgtttttatatgttgaattctttgttaaaaagatgaaatgtcctgattttccagtcacaagacagtaattactttgcacatacagcatatcccattttaatgctaaaaagggaaatgtcactcaatttaattcatctggaagtttcccagtgtcaagataacattgtagcctttttaaatgcaattaaatgtatctcttgtcaggtgagatgatttaaaatctttgctcagagaggaaaacaaatggttgacctacttcttgctatttgcattcagaaggcatcgtcccagcccatcctattggtggcagaatatctaaagatgtcgcaaagtcccccactgcagtagaaatgcaggaggtgttcctgttccccgtccaattccttcttaggctgctagagacagccagtgggccaagccttcccctgtgctccaggcaggcctgggctgcagctactgttacctttttacagcctttgatctgatcgctgcagagttcttttgtttttaaatcacttgtatttgtctcttcattaaggcttcaagtttatttcttgaaaaagtttagtcaattgaaccaccctccaggaagattcccagcgtggaaactgcccctgaaaaacaaggcagcccaaagccagctctcttttgtcccccactgatgtcatgtcctttttttttttcatttcaggccagtttcttaacttggggcaaagagaatgtgttgctaaagctaccaagaaaactgcttgattaacaaattcttaatagaaatgcctcccacactgtctctttgaaaagagaaggcaccttggaatcggcattccaaaaccaagctccttgtcatcctcatccctcctccttcttgcttcctattatcaaactcgtgtgtgtttcttgttttctcagaactgaacacagcctcctaattccatcctcttgactagggcttacaatactgagagcgattacaggctgtaataagttaaaggtccctgagcgtggctttcttgttctgcgcctctaattaattcttctattaaaagatgctttccttctcactgcagcttacagaaaggctacaagctttaatcacagatcatttcatttgccagagcctttccttttctaactcctttagaaataagatttccctctctgtttggaatctctggatacaggactctcctccaagctcatggcttgattggctttgcctgtgcacacacacatcagtttgccttaaacttggagctatggggagtcccagattttccagcttagtgggtgaagtttagctgtcacctacatccaggaagtgggggaaaagggaaaaaaagaggatattcaccaccatgttcccatccggtctttcccctgccttgctttgtgcagcaggtgggcagacagagcccacagaaacagaagtagaaagagggccgcaccatctctggggccagcactcctaagtcttagctctttgtgggaatagaaaatcctgagctcccaccacctctcgtctgaccctccatcaactccctcgaacctgtgcaaatggactgagcaaaagaaaatggaaagagatgtttgtcaccacacaggagacctcctttctggccccaagcacaactccatctctgcgtatgctcagaaactcagaatttagctgctacttatgtgttagctccattctctctggtgtgtgactgagagaacacgccagtgttcttactgacagaggcttaggggtgaccctctctggacccagaggaagtacaacctctgtagcgagaattgtccttgggaacagaaacaggcattcctccacagtgagtggctccccctattttttttttatttggaagagaccaagaattgggggaattgatttccagtcttagctgtttcccggaatgtcatctgtgcaggcaggtaggcggctgccgggtgcagcaggcagcgtgactgatgtgaaggccgcccaatcctcacgtgctaagacccgagtatcgtgtttaattgcagtgtaggcacgtcgccattcaaactcagttctggggtggttttgcataaagttttgccaacgtgttcttttttctgtatgtattattgcctttttataaaaggtgttgaagtattgtctcagtgataaaaagagagagatgttaatggttgttgtatatttcaccgtatccaattgtaagtatttgcagggtacagcagagccttagcttgcaagagcgtttgtgcaggaggtgtccctcaacacccaggagctgaagggattggaaaggtttggattctttgtaaatgtcctgcttttctttctctctgtgtgtatctatttacatgccttagcacacgccctcccatcctgatccctttgccctgtcgccggaacaaccagaatgctggtgcgctgccggcacagtacaagttgatgaaaccctaatcagttatcttgtgtgacaggggaagaagagaaactccatagtattccttgtagaatatacatacctgtaggatgctgtgtaatgggaaaccatagaattgggcttttgtcatttcaaagttggagaaatgtatgaataaaatgtataaaacatgaaaa

SEQ ID NO: 2105 - DNA, 1377 bp, Homo Sapiens
  NM_003689
ccaacgcgcaggcgccgctgctatgctgagtgccgcgtctcgcgtagtctcccgcgccgccgtccactgcgcgcttcgctctccgccgcccgaggcccgcgcgctcgccatgtcccggccaccgccaccgcgggtcgcctcggtgctgggcaccatggagatggggcgccgcatggacgcgcccgccagcgccgcggccgtgcgcgcctttctggagcgcggccacaccgaactggacacggccttcatgtacagcgacggccagtccgagaccatcctgggcggcctggggctcgggctgggcggtggcgactgcagagtgaaaattgccaccaaggccaacccttgggatggaaaatcactaaagcctgacagtgtccggtcccagctggagacgtcattgaagaggctgcagtgtccccaagtggacctcttctacctacacgcacctgaccacggcaccccggtggaagagacgctgcatgcctgccagcggctgcaccaggagggcaagttcgtggagcttggcctctccaactatgctagctgggaagtggccgagatctgtaccctctgcaagagcaatggctggatcctgcccactgtgtaccagggcatgtacaacgccaccacccggcaggtggaaacggagctcttcccctgcctcaggcactttggactgaggttctatgcctacaaccctctggctgggggcctgctgactggcaagtacaagtatgaggacaaggacgggaaacagcctgtgggccgcttctttgggaatagctgggctgagacctacaggaatcgcttctggaaggagcaccacttcgaggccattgcgttggtggagaaggccctgcaggccgcatatggcgccagcgcccccagtgtgacctcggctgccctccggtggatgtaccaccactcacagctgcagggtgcccacggggacgcggtcatcctgggcatgtccagcctggagcagctggagcagaacttggcagcaacagaggaagggcccctggagccggctgtcgtggatgcctttaatcaagcctggcatttggttgctcacgaatgtcccaactacttccgctaggcccatcatggctcaggctgcccaaggcttttctgtcacctcttttgttctctcacactgaccagtcttggccttaagctgacttagaagggtttttctgaattgtctagatccatgcattatttttctagcttcctgccttgctccctattcactttacactgtgaaaggtggggggtgagtcccacttgagcgcttcctgttgaataaagcaggcacttgacctggctgtagcctaggtcttgagtgaaccccaaaaaaaaaaaaaaaaaaaa

SEQ ID NO: 2106 - DNA, 1826 bp, Homo Sapiens
  NM_003690
gcgagggggcgtagccggagctacggcaccaaggctccgcccccaccctgcctgccccctcgctggagcaacgcaagcaggaggcgggggagtcggaggaggtggcggcgctggagctcctcccggggaccagcgacccggggagcgagcacgtcgctccgcaccgctcttcctccagccgctgagccgtcccttctcgccatgtcccagagcaggcaccgcgccgaggccccgccgctggagcgcgaggacagtgggaccttcagtttggggaagatgataacagctaagccagggaaaacaccgattcaggtattacacgaatacggcatgaagaccaagaacatcccagtttatgaatgtgaaagatctgatgtgcaaatacacgtgcccactttcaccttcagagtaaccgttggtgacataacctgcacaggtgaaggtacaagtaagaagctggcgaaacatagagctgcagaggctgccataaacattttgaaagccaatgcaagtatttgctttgcagttcctgaccccttaatgcctgacccttccaagcaaccaaagaaccagcttaatcctattggttcattacaggaattggctattcatcatggctggagacttcctgaatataccctttcccaggagggaggacctgctcataagagagaatatactacaatttgcaggctagagtcatttatggaaactggaaagggggcatcaaaaaagcaagccaaaaggaatgctgctgagaaatttcttgccaaatttagtaatatttctccagagaaccacatttctttaacaaatgtagtaggacattctttaggatgtacttggcattccttgaggaattctcctggtgaaaagatcaacttactgaaaagaagcctccttagtattccaaatacagattacatccagctgcttagtgaaattgccaaggaacaaggttttaatataacatatttggatatagatgaactgagcgccaatggacaatatcaatgtcttgctgaactgtccaccagccccatcacagtctgtcatggctccggtatctcctgtggcaatgcacaaagtgatgcagctcacaatgctttgcagtatttaaagataatagcagaaagaaagtaaatctggagcaacttaaaaaatctttcagtagcacataaaaagttcccctctggccccttcccaagtaaaacttttaccgtagtgtttatgtcttgtttctaaatctcttcatagattccatcaacactccagatttaattatctcctcatagttgttattaagctctttttaatggcttcaactttgtatcagtatactgtatttataaactttgtaccacaagagagagtgtagcacccattttacagtgccatgcacatcagagaaagaaactgcatgtttgttgttgatgatgaaataaaaatgctagcgacagtctttcttactggtgcttaagctcttctttgcacaaagctttataaagggaattcaaaggaagccctttagaattagagtcttgagggacagcactaacaggcctttattaagtatgattgattgttaaatttcagggaacatgattggtctgctgtgtatttgaattcatgtaacaaagaactgttacgatgggattctgctcattttattaaaaagctactgacttgactgtcatcctgttcttgttagccattgtgaataagattttaatgttgataattctgttatttacatatctctaatttactttgaaattcaaaggtgaaaataaaaaatgatggcctaagtaaaatttacaaacata

SEQ ID NO: 2107 - DNA, 1682 bp, Homo Sapiens
  NM_003691
cttctctctggcccgagccaggtcagtccggcagtgcagatggcccatcccgggctctgggctcctagaccggggtgggccctgccaggagtgggcctgagcctcgcacgtcctctgaaactacgctatgctctgcttttgcggcgcgatgggcgtgggagcgggggctgcccaaagatgggctggggttggaggaagtggcccggtagccgctgtgtgtcctgaggccgtaaggcgcctgaccccacccctgaagctggcgacggagcagggcctgttttctctacactatagtcatgatccgctgggcccccagcgcatctcctggaagagcccactcaccctggacgagctcttcggtagcctcagaccgtccttgaagaggatgactgagacattatgggccacgcgctgtgtgtctgctctcggggaactgtcatcattgacaataagcgctacctcttcatccagaaactgggggagggtgggttcagctatgtggacctagtggaagggttacatgatggacacttctacgccctgaagcgaatcctgtgtcacgagcagcaggaccgggaggaggcccagcgagaagccgacatgcatcgcctcttcaatcaccccaacatccttcgcctcgtggcttactgtctgagggaacggggtgctaagcatgaggcctggctgctgctaccattcttcaagagaggtacgctgtggaatgagatagaaaggctgaaggacaaaggcaacttcctgaccgaggatcaaatcctttggctgctgctggggatctgcagaggccttgaggccattcatgccaagggttatgcccacagagacttgaagcccaccaatatattgcttggagatgaggggcagccagttttaatggacttgggttccatgaatcaagcatgcatccatgtggagggctcccgccaggctctgaccctgcaggactgggcagcccagcggtgcaccatctcctaccgagccccagagctcttctctgtgcagagtcactgtgtcatcgatgagcggactgatgtctggtccctaggctgcgtgctatatgccatgatgtttggggaaggcccttatgacatggtgttccaaaagggtgacagtgtggcccttgctgtgcagaaccaactcagcatcccacaaagccccaggcattcttcagcattgcggcagctcctgaactcgatgatgaccgtggacccgcatcagcgtcctcacattcctctcctcctcagtcagctggaggcgctgcagcccccagctcctggccaacatactacccaaatctgaaaaagcagcatgttgagaagatggccccttgtgccttggaaagaggttcccatccctcattggaatcaccacccattccatccaggacttctcttacacttgggggtagcggggtcaggacaatcatctcagtcctgcatcttttcttctgctttcttccctccaagagcaaaacctgggcaaggggacttactgagtgggggtgggtgggggttgggaaaagggaaactggtgggatatggaacatggctctgagcaggactgttgagctcacatagtgttctgactccaaatctgggagcaggagaatgtgtaaacaagaataaagtggaagcaggttggtgtagaaaaaaaaaaaaaaaaaa

SEQ ID NO: 2108 - DNA, 2939 bp, Homo Sapiens
  NM_003703
cacgtgtcttagggtagcgcgcgcctgtctctcttcgggtctcgggcccttgggcgcagcggggcgcgcgccatggcgaaggcgaagaaggtcggggcgcgaaggaaggcctccggggcgccggcgggagcgcgagggggcccggcgaaggccaactccaatccgttcgaggtgaaagttaacaggcagaagttccagatcctgggccggaagacgcgccacgacgtgggactgcccggggtgtctcgcgcacgggccctcaggaagcgtacacagactttactaaaagagtacaaagaaagggataaatccaatgtattcagagataaacgcttcggagaatacaacagcaacatgagccccgaggagaagatgatgaagaggtttgctctggaacagcagcgacatcatgagaaaaaaagcatctacaatctaaatgaagatgaagaattgactcattatggccagtctttggcagacatcgagaagcataatgacattgtggacagtgacagcgatgctgaggatcgaggaacgttgtctgctgagctgactgctgcccactttggaggaggcggtgggctccttcacaagaagactcaacaggaaggcgaggagcgggagaaaccgaagtcccggaaagagctgattgaagagctcattgccaagtcaaaacaagagaagagggagagacaagctcaacgagaagatgccctcgagctcacggagaagctagaccaagactggaaagaaattcagactctcctgtcccacaaaactcccaagtcagagaacagagacaaaaaggaaaaacccaagcccgatgcatatgacatgatggttcgcgagcttggctttgaaatgaaggcgcagccctctaacaggatgaagacggaggcagaattggcaaaggaagagcaggagcacctcaggaagctggaggctgagagacttcgaagaatgcttggaaaggatgaggatgaaaatgttaagaaaccaaaacatatgtcagcagatgatctgaatgatggcttcgtgctagataaagatgacaggcgtttgctttcctacaaagatggaaagatgaatgtcgaggaagatgtccaggaagagcaaagcaaggaagccagtgaccctgagagcaacgaggaagaaggtgacagttcaggcggggaggacacagaggagagcgacagcccagatagccacttggacctggaatccaacgtggagagtgaggaagaaaacgagaagccagcaaaagagcagaggcagactcctgggaaagggttgataagcggcaaggaaagagctggaaaagctaccagagacgagctgccctacacgttcgcagcccctgaatcctatgaggaactgagatctctgttgttaggaagatcgatggaagagcagcttttggtggtggagagaattcagaagtgcaaccacccgagtctcgcagaaggaaacaaagcaaaattagaaaaactgtttggctttcttttggaatacgttggcgatttggctacagatgacccaccagacctcacagtcattgataagttggttgtgcacttatatcatctttgccagatgtttcctgaatctgcaagtgacgctatcaaatttgttctccgagatgcgatgcatgagatggaagaaatgattgagaccaaaggccgggcggcattgccagggttggatgtgctcatttatttgaaaatcactgggctgctatttccaacttccgacttctggcacccagtggtgacccctgccctcgtgtgcctcagtcagctgctcaccaagtgccccatcctgtccctccaggacgtggtgaagggcctgttcgtgtgctgcctgttcctggagtatgtggctttgtcccagaggtttatacctgagcttattaattttcttcttgggattctttacatagcaactccaaacaaagcaagccaaggttccactctggtgcaccctttcagagcgcttgggaagaactcggaactgctcgtggtgtctgctagagaggatgtggccacgtggcagcagagcagcctctccctccgctgggcgagtagactgagggccccaacttcgacagaggccaatcacatccgactgtcctgcctggctgtgggcctggccctgctgaagcgctgcgtgctcatgtacgggtccctgccatccttccacgccatcatggggcctctccaagccctcctcacggatcacctggcggactgcagccacccgcaggagctccaggagctgtgtcagagcacactgaccgaaatggaaagccagaagcagctctgccggccgctgacctgtgagaagagcaagcctgtcccactgaagcttttcacaccccggctggtcaaagtcctcgagtttggaagaaaacaaggcagtagtaaggaggaacaggaaaggaagaggctgatccacaaacacaagcgtgaatttaaaggggccgttcgagaaatccgcaaggacaatcagttcctggcgaggatgcaactctcagaaatcatggaacgggatgcggaaagaaagcggaaagtaaagcagctttttaacagcctggctacacaggaaggcgaatggaaggctctgaagaggaaaaagttcaaaaaataaattacattttataaataagctccccccacccgctgcctgcggttttgtttctgttaaaacgtcacctgatgaaatagaatgaatcctgaaatgcacctctgggatcgggaatggtctgtgtgttatcagctgcgactggttcactgcgtctggacaagcctcatggggactggggattctggccagtgtaatttctgtcaaccacggacgtttgccttcatgtgtagaatttactgttgttatgcaaattatattttcaattataaatgaaaaaaaaaaaaaaaaaaaaaaaa

SEQ ID NO: 2109 - DNA, 1785 bp, Homo Sapiens
  NM_003707
ctttgcaaattgccctagtaacggccgcatggtaactcaggcgccgggcgcactgtcctagctgctggttttccacgctggttttagctcccggcgtctgcaaaatgaagattgaggaggtgaagagcactacgaagacgcagcgcatcgcctcccacagccacgtgaaagggctggggctggacgagagcggcttggccaagcaggcggcctcagggcttgtgggccaggagaacgcgcgagaggcatgtggcgtcatagtagaattaatcaaaagcaagaaaatggctggaagagctgtcttgttggcaggacctcctggaactggcaagacagctctggctctggctattgctcaggagctgggtagtaaggtccccttctgcccaatggtggggagtgaagtttactcaactgagatcaagaagacagaggtgctgatggagaacttccgcagggccattgggctgcgaataaaggagaccaaggaagtttatgaaggtgaagtcacagagctaactccgtgtgagacagagaatcccatgggaggatatggcaaaaccattagccatgtgatcataggactcaaaacagccaaaggaaccaaacagttgaaactggaccccagcatttttgaaagtttgcagaaagagcgagtagaagctggagatgtgatttacattgaagccaacagtggggccgtgaagaggcagggcaggtgtgatacctatgccacagaattcgaccttgaagctgaagagtatgtccccttgccaaaaggggatgtgcacaaaaagaaagaaatcatccaagatgtgaccttgcatgacttggatgtggctaatgcgcggccccaggggggacaagatatcctgtccatgatgggccagctaatgaagccaaagaagacagaaatcacagacaaacttcgaggggagattaataaggtggtgaacaagtacatcgaccagggcattgctgagctggtcccgggtgtgctgtttgttgatgaggtccacatgctggacattgagtgcttcacctacctgcaccgcgccctggagtcttctatcgctcccatcgtcatctttgcatccaaccgaggcaactgtgtcatcagaggcactgaggacatcacatcccctcacggcatccctcttgaccttctggaccgagtgatgataatccggaccatgctgtatactccacaggaaatgaaacagatcattaaaatccgtgcccagacggaaggaatcaacatcagtgaggaggcactgaaccacctgggggagattggcaccaagaccacactgaggtactcagtgcagctgctgaccccggccaacttgcttgctaaaatcaacgggaaggacagcattgagaaagagcatgtcgaagagatcagtgaacttttctatgatgccaagtcctccgccaaaatcctggctgaccagcaggataagtacatgaagtgagatggctgaggttttcagcagtaagagactccccaggtgtgcctggcctgggtccagcctgtgggcgcttgcccctgggcttggggctgccgtccccactcaggcgtggtctgcagcgctgtcagttcagtgtggaaagcatttctttttaagttatcgtaactgttcctgtggttgctttgaaagaacccttccttacctggtgtgttttctataaatcttcataggttattttgattctctctctctctctctctaagttttttaaaaataaacttttcagaacagttttaaaaaaaaaaaaaaaaaa

SEQ ID NO: 2110 - DNA, 1738 bp, Homo Sapiens
  NM_003708
aaatatgttgcagaaaggcagtcatcagggaggaaagtgaggattccctgccaaaatgcctgagggcttccctgcctaccacagccctctgtgttcttaaatcctcctgtctgaacagaggccagactctggtttcccccacagcctgtctgtgtctgtcctctgcaaagccatgtggctctacctggcggttttcgtgggcctgtactaccttctgcactggtaccgggagaggcaggtgctgagccacctgagagataagtatgtgttcatcacgggctgtgactctggcttcgggaaactgctggccagacagctggatgcacgaggcttgcgggtgctggctgcatgtctgacggagaaaggagccgagcagctgaggggccagacttcagacaggctggagacggtgaccctggatgttaccaagacagagagcgttgctgcagccgcccagtgggtgaaggagtgcgtgagagacaaaggactctggggcctggtgaataatgctggcatctccttgcccacggctcccaatgagttgctcaccaagcaggacttcgtgaccatactggacgtgaacttgttgggggtgattgatgtgactctgagcctgctgcccttagtgaggagggccaggggccgtgtggtcaacgtctccagtgtcatgggccgggtgtcactttttggtggaggctactgcatctccaagtatggcgtggaagccttctctgactccctcaggagggaactctcctactttggggtgaaggtggctatgattgaacctggctatttcaagactgctgtgaccagtaaggagagattcttaaagagcttcctggagatttgggaccggtccagtccagaggtcaaggaggcctatggcgagaagtttgttgcagactataagaaatcagctgaacaaatggagcagaagtgcacacaggatctgtcgttggtgaccaactgcatggagcatgcgctgattgcctgccacccccgtactcgctactcagctggctgggatgccaagcttctctacctccccatgagctacatgcccaccttcctggtggatgccattatgtactgggtctctccaagcccggccaaggctctatgaagctaaggttggatgcatggttgcatggatttggggtgtgctatgaggggtggtgtatccttgggagagatataaagtggagggagggagccgtccggtcagtagggcaccaatcccacctccttcattacctcctggccatgattctcctgggagataattctgctctctggagatgttggtaggaaagtttcaagttacgcagctgagaaacagggaccaaatagtgctcctgggtgcattgtcaccgtgggtggccactcaagggtccaagcctctagggccatccttgggctaacaactggggtgggtgtgagcaggtggaaggagcctcagcccatgccattacctcctgcttccttatcaggctgtgtgttaattctgggccagtctacaccctcccacggggtggaaatggcctggaggatgtgagggcacccctcctctgaagatccctgtacacgtggtgttgggactggaaccattatgcggccccataggcctcaggagtcatcccagaagcagtggctgggaggtggtgtcctaagtaaggatctgtgcagaggacaaataaatcagtttttgatttgtcttgaaaaaaaaaaaaaaaaa

SEQ ID NO: 2111 - DNA, 2436 bp, Homo Sapiens
  NM_003710
agtttcaccagaaaccagggggagaaggcggccgagccccagctctccgagcaccgggtcggaagccgcgacccgagccgcgcaggaagctgggaccggaacctcggcggacccggccccacccaactcacctgcgcaggtcaccagcaccctcggaacccagaggcccgcgctctgaaggtgacccccctggggaggaaggcgatggcccctgcgaggacgatggcccgcgcccgcctcgccccggccggcatccctgccgtcgccttgtggcttctgtgcacgctcggcctccagggcacccaggccgggccaccgcccgcgccccctgggctgcccgcgggagccgactgcctgaacagctttaccgccggggtgcctggcttcgtgctggacaccaacgcctcggtcagcaacggagctaccttcctggagtcccccaccgtgcgccggggctgggactgcgtgcgcgcctgctgcaccacccagaactgcaacttggcgctagtggagctgcagcccgaccgcggggaggacgccatcgccgcctgcttcctcatcaactgcctctacgagcagaacttcgtgtgcaagttcgcgcccagggagggcttcatcaactacctcacgagggaagtgtaccgctcctaccgccagctgcggacccagggctttggagggtctgggatccccaaggcctgggcaggcatagacttgaaggtacaaccccaggaacccctggtgctgaaggatgtggaaaacacagattggcgcctactgcggggtgacacggatgtcagggtagagaggaaagacccaaaccaggtggaactgtggggactcaaggaaggcacctacctgttccagctgacagtgactagctcagaccacccagaggacacggccaacgtcacagtcactgtgctgtccaccaagcagacagaagactactgcctcgcatccaacaaggtgggtcgctgccggggctctttcccacgctggtactatgaccccacggagcagatctgcaagagtttcgtttatggaggctgcttgggcaacaagaacaactaccttcgggaagaagagtgcattctagcctgtcggggtgtgcaaggcccctccatggaaaggcgccatccagtgtgctctggcacctgtcagcccacccagttccgctgcagcaatggctgctgcatcgacagtttcctggagtgtgacgacacccccaactgccccgacgcctccgacgaggctgcctgtgaaaaatacacgagtggctttgacgagctccagcgcatccatttccccagtgacaaagggcactgcgtggacctgccagacacaggactctgcaaggagagcatcccgcgctggtactacaaccccttcagcgaacactgcgcccgctttacctatggtggttgttacggcaacaagaacaactttgaggaagagcagcagtgcctcgagtcttgtcgcggcatctccaagaaggatgtgtttggcctgaggcgggaaatccccattcccagcacaggctctgtggagatggctgtcgcagtgttcctggtcatctgcattgtggtggtggtagccatcttgggttactgcttcttcaagaaccagagaaaggacttccacggacaccaccaccacccaccacccacccctgccagctccactgtctccactaccgaggacacggagcacctggtctataaccacaccacgcggcccctctgagcctgggtctcaccggctctcacctggccctgcttcctgcttgccaaggcagaggcctgggctgggaaaaactttggaaccagactcttgcctgtttcccaggcccactgtgcctcagagaccagggctccagcccctcttggagaagtctcagctaagctcacgtcctgagaaagctcaaaggtttggaaggagcagaaaacccttgggccagaagtaccagactagatggacctgcctgcataggagtttggaggaagttggagttttgtttcctctgttcaaagctgcctgtccctaccccatggtgctaggaagaggagtggggtggtgtcagaccctggaggccccaaccctgtcctcccgagctcctcttccatgctgtgcgcccagggctgggaggaaggacttccctgtgtagtttgtgctgtaaagagttgctttttgtttatttaatgctgtggcatgggtgaagaggaggggaagaggcctgtttggcctctctatcctctcttcctcttcccccaagattgagctctctgcccttgatcagccccaccctggcctagaccagcagacagagccaggagaagctcagctgcattccgcagcccccacccccaaggttctccaacatcacagcccagcccgcccactgggtaataaaagtggtttgtggaaaaaaaaaaa

SEQ ID NO: 2112 - DNA, 1638 bp, Homo Sapiens
  NM_003711
tcagcgggaggggctggaccccgcgttcctcctccctgccggtccccatccttaaagcgagagtctggacgccccgcctgtgggagagagcgccgggatccggacggggagcaaccggggcaggccgtgccggctgaggaggtcctgaggctacagagctgccgcggctggcacacgagcgcctcggcactaaccgagtgttcgcgggggctgtgaggggagggccccgggcgccattgctggcggtgggagcgccgcccggtctcagcccgccctcggctgctctcctcctccggctgggaggggccgtagctcggggccgtcgccagccccggcccgggctcgagaatcaagggcctcggccgccgtcccgcagctcagtccatcgcccttgccgggcagcccgggcagagaccatgtttgacaagacgcggctgccgtacgtggccctcgatgtgctctgcgtgttgctggctggattgccttttgcaattcttacttcaaggcatacccccttccaacgaggagtattctgtaatgatgagtccatcaagtacccttacaaagaagacaccataccttatgcgttattaggtggaataatcattccattcagtattatcgttattattcttggagaaaccctgtctgtttactgtaaccttttgcactcaaattcctttatcaggaataactacatagccactatttacaaagccattggaacctttttatttggtgcagctgctagtcagtccctgactgacattgccaagtattcaataggcagactgcggcctcacttcttggatgtttgtgatccagattggtcaaaaatcaactgcagcgatggttacattgaatactacatatgtcgagggaatgcagaaagagttaaggaaggcaggttgtccttctattcaggccactcttcgttttccatgtactgcatgctgtttgtggcactttatcttcaagccaggatgaagggagactgggcaagactcttacgccccacactgcaatttggtcttgttgccgtatccatttatgtgggcctttctcgagtttctgattataaacaccactggagcgatgtgttgactggactcattcagggagctctggttgcaatattagttgctgtatatgtatcggatttcttcaaagaaagaacttcttttaaagaaagaaaagaggaggactctcatacaactctgcatgaaacaccaacaactgggaatcactatccgagcaatcaccagccttgaaaggcagcagggtgcccaggtgaagctggcctgttttctaaaggaaaatgattgccacaaggcaagaggatgcatctttcttcctggtgtacaagcctttaaagacttctgctgctgctatgcctcttggatgcacactttgtgtgtacatagttacctttaactcagtggttatctaatagctctaaactcattaaaaaaactccaagccttccaccaaaacagtgccccacctgtatacatttttattaaaaaaatgtaatgcttatgtataaacatgtatgtaatatgctttctatgaatgatgtttgatttaaatataatacatattaaaatgtatgggagaaccaaaaaaaaaaaaaaaaaa

SEQ ID NO: 2113 - DNA, 3324 bp, Homo Sapiens
  NM_003713
gacctcgtgaaataaaagtgcagaaaacaaacccaggcgatcacagcagcagccgccgcggcagcagcaccaacagcaggaggagcaggaggagccggaggaggaggaggaggaggaggcaaagttagagttggggctggcgctccggagttgctgggctcagcgcagctcccattcattaaggaaccagctgcggaggaaggtggccgagcgcccgcgctgcccactcgctcgctcgcgcactcagacgcgcgccacaacagcgcgccccaagctgcgcagctctgcaaaagtttctgctcgggatctggctctcttccccttggactttagaacgatttagggttgacagaggaaagcagaggcgcgcaggaggagcagaaaacaccaccttctgcagttggaggcaggcagccccggctgcactctagccgccgcgcccggagccggggccgacccgccactatccgcagcagcctcggccaggaggcgacccgggcgcctgggtgtgtggctgctgttgcgggacgtcttcgcggggcgggaggctcgcgccgcagccagcgccatgcaaaactacaagtacgacaaagcgatcgtcccggagagcaagaacggcggcagcccggcgctcaacaacaacccgaggaggagcggcagcaagcgggtgctgctcatctgcctcgacctcttctgcctcttcatggcgggcctccccttcctcatcatcgagacaagcaccatcaagccttaccaccgagggttttactgcaatgatgagagcatcaagtacccactgaaaactggtgagacaataaatgacgctgtgctctgtgccgtggggatcgtcattgccatcctcgcgatcatcacgggggaattctaccggatctattacctgaagaagtcgcggtcgacgattcagaacccctacgtggcagcactctataagcaagtgggctgcttcctctttggctgtgccatcagccagtctttcacagacattgccaaagtgtccatagggcgcctgcgtcctcacttcttgagtgtctgcaaccctgatttcagccagatcaactgctctgaaggctacattcagaactacagatgcagaggtgatgacagcaaagtccaggaagccaggaagtccttcttctctggccatgcctccttctccatgtacactatgctgtatttggtgctatacctgcaggcccgcttcacttggcgaggagcccgcctgctccggcccctcctgcagttcaccttgatcatgatggccttctacacgggactgtctcgcgtatcagaccacaagcaccatcccagtgatgttctggcaggatttgctcaaggagccctggtggcctgctgcatagttttcttcgtgtctgacctcttcaagactaagacgacgctctccctgcctgcccctgctatccggaaggaaatcctttcacctgtggacattattgacaggaacaatcaccacaacatgatgtaggtgccacccacctcctgagctgtttttgtaaaatgactgctgacagcaagttcttgctgctctccaatctcatcagacagtagaatgtagggaaaaacttttgcccgactgatttttaaaaaggaaaaaaaaaatgttttactatgtggccttccaaaataggtagtgtttgcctatgtggaaacaacagcaaactaacaccaagtgccagagtcctggatgtgcaattggtttaagtgttcatgttctagtgaacacagcttgttcaggaacaaacactaaaacgatttgagtagaggctgctggtcaccttttgtgacctgaggaatcccaggcctgtgagaaaagcaaaaattcacattgcagcacatgatgccagaaatagcactgaatcaagaaaatagccattgcggagctgccctcttgagtctttctgtccatcccattctattctgtactgtgactttagttcaggaagttttgttttgtgttttaaataaaaggaaagagcaagtttgctcagtcaagtgatcagatcccgaatctagattcccagttctaaggccttatcacctcccctgcccataggccaacaaccatagttcctcacattagtgattagcagactctttgtggacgagtgaatttcacaaacagcacaatttcagaagaaatcgagggcacaggccctcacttttcttcttttgacgcatcatcctgtgatgttgaaatgtcaattgcaggatgctgatgttgtgcacgtcaatcaccgggcacttgcatactcttagaaacagttcgacttcggttactgccttctcccttgaaatccttgctgcgtgcccaccaggatttcctgtgagggcccaggaatgagcaaggcatggtctgccaccagctgacggaaagcagccttctgtacaacagatgggagggtgaagggggcagaatgaaaatcgaaccaaccttttagctgttgcaaatcagaaggagccagagaagcaggcagtctcatgcatgagaggttacccttcaggatgacagagctgagggtctttgtaggagttgctcttgctgtgtaaagcactattgtcttggggttgagccctagggcagttcttggtaggttctgctgggcagaacatatgggttaaatctcggtagagagtttccctcatcctctatccgtaagtgtccttccatgcaaggtcccactctaggtgatagacagggaccccttctactgaacctttgaggaaaggaggaaggaagaaatgcgtttagatcttggatgcagacctttcaaagggttaaatgtaaccatatggatcaaccacatgcacatccttactacagaatccgtcctttcatttcaacttatagcaagctatgatttttatatataaatattatataaataatgtataaaacattaaaagttaactatgtaagatattatttctgaaacaatttagctatatccactatgattataaactgtgtctcgacctgtgttatttacattagctgcttaaaaaagcattgagttaatttttttaaatatcaactaaaatatcatagttctgtggtagacattgttttataatgaaataactgcaactagagaaaactgtataaaaacattaaattgtcagtatttttgtaaggttccattttgtaaagagaataatattcaaagacttttgtagcatacaaagtgaaaacttgtatctgcgaaactatacttgtattaaatgtgctttttaaataaaagctcgtaacacaactaattaaggacttgcaaaaaaaaaaaaaaaaaa

SEQ ID NO: 2114 - DNA, 6985 bp, Homo Sapiens
  NM_003718
gcatctggtgttttcgctgccgaggataggacgacgagcgcaatcgggagctccgccgcccggattcctgcttccctggggcccggaggctgctgcgtaccccactgtgacctggaacccagggacccgagtcccgacccggattatcgtggcgcttttcccggccggctctggtgctcggtgtccctccgccgccgctcccgtttccggcgggggagatggccaggatctgacccgggaggaggccgcacccgcgccgcgctctgcggctggctctaggcgatgccgagcagctcggacacggcgctggggggaggcgggggcctgagctgggcggagaagaagttggaggaacgccgcaagcggaggcgattcctgtcccctcagcagccgccgctgctgttgccgctcctgcagccgcagctcctgcaaccgccgccgcccccgccgcctctgctcttcctggctgctcccggcacggccgccgccgcagccgccgccgccgcggcctcctcctcttgcttcagcccgggcccccctctggaggtcaagcggctggcgagaggcaagaggcgcgcaggagggcggcagaagcggcgtcgcgggccccgcgccgggcaggaggcggagaagcgtcgggtcttctcgctgccccagccgcagcaggacggcggtggcggtgctagtagcggcgggggtgtgaccccgctggtggaatacgaggatgtgagctcccagtccgagcaggggctgctgctggggggggccagcgcggcaacggcggcgacggctgccgggggaacggggggcagcggcgggagtccggcctcctcctccggcacccagcggcgcggggaggggtcggagcgcaggccccgccgggaccgccgcagcagcagtggccgcagcaaggagcgccaccgcgagcaccggcggcgggatgggcagcgcggtggcagcgaggcctccaagtcccgcagccgccacagccacagcggcgaggaacgggccgaggtcgccaagagcggcagcagcagcagcagcggcggccgccggaaaagcgcttcggccacatccagcagcagtagcagccgcaaggaccgggactcgaaggcccaccgcagccggactaagtcgtccaaggagccgccttcggcctacaaggaaccgcccaaggcctaccgggaggacaagaccgagcctaaggcctacaggcggcggcggtccctcagcccactgggaggccgggacgacagcccggtgtcccacagggcctctcagagcctgaggagccgcaagtcccccagcccggcaggaggtggcagcagcccctattctcggcggctgccgcgctccccgagcccctacagtcgccgccgctcccccagctacagccgccacagctcctacgagcggggcggcgacgtgtcccctagtccctacagcagcagcagctggcgccgctctcgcagtccctacagccctgtgctcagacggtctggaaaatcccgaagcagaagcccgtattcatctaggcattcaagatctcgtagcaggcacagattgtctagatccagaagtcgtcattctagtatttctcctagcacactaactctgaagagtagcctggcagctgaattgaacaagaataaaaaagcacgagcagcagaggcagcaagagccgcagaagcagcgaaagctgcagaagcaactaaggctgctgaggctgctgccaaggctgcaaaagcttcaaacacttctacacctaccaaggggaacacggaaactagtgccagtgcatcacaaacaaaccatgtgaaggatgtgaagaaaattaaaattgaacatgcaccttctccctcaagtggtggaactttaaaaaatgacaaagcaaaaacaaagccacctcttcaggtaacgaaggtggaaaataatttgattgtagataaagccaccaagaaagcagtcatagttggaaaggagagtaaatctgctgctacaaaggaggaatcagtatctcttaaagagaaaaccaaaccacttacaccaagcataggagccaaggagaaggagcaacatgtagctttagtcacctctacattaccaccgttacctttgcctcccatgctgcctgaagataaagaagctgatagcttacgaggaaatatttcagtaaaagcagttaaaaaagaagtagaaaagaaactccgatgtcttcttgctgatttaccgctgccccctgagctaccaggaggagatgatctttcaaagagtccagaggaaaagaaaacagcaacacagttacatagtaaaaggaggcctaaaatatgtgggcctcgctatggtgaaaccaaagaaaaagatattgactggggaaaacgctgcgtggataaatttgatatcatcggaattattggagaaggtacttacggacaagtttacaaagccagggataaagacactggagaaatggtagccttaaaaaaagtacgtctggataatgaaaaggaaggctttccaattacagcaattcgagaaattaaaattctccggcagcttacccatcagagtattatcaatatgaaggaaatagtgactgataaagaagatgctttggatttcaagaaggacaaaggtgcattttatctggtgtttgaatatatggaccatgatctgatgggactactggaatcaggcttggttcattttaatgaaaatcacataaagtcatttatgagacagctcatggagggtctggattattgtcataagaagaactttttgcatagagatattaaatgttccaatatccttctaaataatagagggcagataaaacttgcagactttggacttgctcgattgtatagctcagaagaaagtcggccgtatactaacaaggtaattactttatggtaccgtccacctgaactgctactgggagaagaacgatacacaccagccattgatgtatggagctgtggctgtatccttggcgaactcttcactaaaaaacctatatttcaagcaaatcaggaacttgcacaactagaattaataagccgaatatgtgggagtccatgtcctgcagtgtggcctgatgtaatcaaactaccatatttcaacaccatgaaaccaaagaagcaatatcgtcgaaagttaagagaagaatttgtttttattcctgcagctgcgctagacttatttgattacatgcttgccttggatcctagtaagcgctgcactgctgaacaggctcttcagtgcgagttcctccgagatgtggaaccctcaaaaatgcctccaccagatctccctttatggcaagattgtcatgagttatggagtaaaaagcgaagaagacagaagcagatgggcatgactgatgatgtttccacaattaaagcccccaggaaggacttgtctctgggcttggatgacagcagaaccaacacaccccagggtgtgctgccatcttcacagctgaaatctcagggcagctcaaatgtggcacctgtaaaaacaggccctggacagcacttaaaccacagtgaattggcaattctactaaacctactacaatctaaaacaagtgttaatatggctgattttgtccaagtgttgaacattaaggtaaactctgagactcaacagcagctaaataaaataaaccttcctgctggaattttggcaacaggtgaaaaacagacagatccatcaacaccacaacaggagtcttcgaaaccgttgggaggaattcagccttcttctcagaccatccagcctaaagtggagactgatgctgcccaggcggctgtgcagagtgcatttgcagttctgttgactcagttaataaaggctcagcagtcaaagcagaaagatgtgctactagaagagagggaaaatggatcgggacatgaagcgtcattacaactcaggccacctccagaacctagcactccggtgtcgggacaagatgacctcatccagcatcaagatatgaggatcttggagctaacgccagaaccagaccggcctcgaattctgcctcctgaccaacgacctcccgagcctcctgaaccaccaccagtcactgaggaagatctagattatcggacagaaaaccagcatgtacccaccaccagttcttcattaactgaccctcatgccggagtgaaggcagccctgttacagctgcttgctcagcatcagccccaggatgaccccaaaagagaaggtgggattgattatcaagcaggagacacttacgtgtccacttcagactacaaggacaactttggatcctcttctttctcttctgctccttatgttagcaatgatggtctaggaagcagttctgctccaccactagaacgacgtagtttcattggaaattcagatattcagtctttggataactacagtactgcttcatctcattctggtggtccacctcagccttctgccttttctgagtcatttcccagttcagtagctggatatggagacatttacctcaatgctggtcccatgttgtttagtggagacaaggaccatagatttgaatatagccatggtcctattgcagtcctggcaaacagcagtgacccttccacggggccagagagtactcatcctttgccagcaaagatgcacaactataactatggtggtaacttacaggaaaatccgagtggccccagcctcatgcatggacagacctggacttctcctgcccaaggacctggatattcacaaggatacaggggacatattagcacatcaactggcagaggcagaggcagagggttaccatactgagtatctgtttttcctcaggcacatcatttttatctggaaagacttttctagctgcaatttaaggcagcaatccaagagacttgaataataataattcaacaacagctttatttttatgtggagaagggtcttgcatacaatagtttaaaaaagacaaaaaaaacctttgcttaaattcatgctgttctaaaaactagatcgattgtacatcttcacaaattctagttaacaattttattttgtattcttgcagttttaagtggatgctaattttaggggcataagccttttatggccctcttgcagatcttctgaactatgcacatttgtgctttttttgtaagtttggaccaacttttatgtaacaaacagcccctccccacctccagttttacaacaatcagaaagggcactgatttatttggtatttttctttttacaaagctacctttagtcaaaggtcactgtcagtctttgcacctgctttcagtgttattgtgaaaggtgtactttgtgctcatttcagaaaataaaacacaacctttctcttgatgcaacagttttataaaaaaaaaaatggtcaacgttatttttgttttgttttgcagattatcaaagcctagcaaaatgcatttaaatgaaatagtgggttttatatgaaaactatgggtggggtggggagggaaagtaagtgccttaacaggtaagcttaaggtctgaaaaaaatagttaacttttacccccatttgtcttttaaagggaatcaatgcattaaaaaggcaagaaactctgaagtttcaggggctgcctgttcagttcctgttaggtccattccctctgcttgtcacactttctccttttctgcctgtctttgggctgtgttgcctttcactaccaccttctcttgataggggagtgagagcaaagaaagggagtagaactgcaatcagtacatattgtttgagaagttctacaaagttttgtcatttaaatggttgaaagtaatagctccaggagaattttagagtaccattttctttcaggctgccatattatccctgtttccatttgccatggataattggagggtcatggtatagaagcaagagttaataacagaacttgcctaaatgtgttaaagttcatgggggaggggtggcaaataccgtattttaagttatgcaattgcccttttaagaaagtcaattctattcacttgttaactagaaacattgcttagattgaatttattgaagcaaaaagaaaaggcaatgagagagaacttttatcttccttcctgtcacattctgtaaagttgattatgacttctgccagacttagagcaacaactttagttcattttaacatttttttttaatgaagagcatcaaagaatggagtagtccttatttaaactgtaatggtgtcaagtctcactgtgtgcacactctcacacatacacacacaattatactaattctagaaaggaaccaaaggtaaataaccagtgtttccattatcactaaatggaaaaattgactggaagttagagttgtgccaattaatcattttgttcatcaactgttctggtaacttatttttttttattggaatcttaaattggaacaactgttacagaatgtatattgctccagttctaaagccagttaaccctgtgccctctaacttatgaaccttcatttcaaaacagtatgtgggaagtcctgtagtttgataagagtaaaattattttaaagaggataatttaccattttactactataaaataagttgatatcagttgaccattttattttttgatggactctttttgttgggagaaagaaatgaatggaagaaaaaaatatgttgcttttatttgaatattgattactaacaacttataaactacattgcaggaaatgaagaaatattttgaaattagcaaaatagcaacagtattcaagtatctgaaattttaatatggtgagtcttagagctttagactttcctataagtgacagtatctaagttattcttaatagtcacacttgataattctgctgaccataagcagctaacctacagttgaagatatttatgtgacatgaatagcctgtgttttaaaaattaaatattttatataaaattgaaaaaaaaaaaa

SEQ ID NO: 2115 - DNA, 1438 bp, Homo Sapiens
  NM_003721
ccggacgccgcacggctcctgttccggtgtcagagggcccgccctccccgctcctcagtctttgcggacaagaaaggggctgtgtgagacgcagggaaggaggcacacccgggggtggcgcagtgaggagggggcgcgacggccaggaggctggtggagcgacacccaggcaggagagggggaagaactctctccctttctgaacccccttttccttgagagacgagttgggggagtcctccacgcattacccactcgggccgcaaaaactcccttctttagccctctgcccccgcccttgcttataagcctttgagaccgcagaagggaccttgttgtggaacgggacggccaagaggaagccagatcgctgagggtccggtctccagtttgcctcctgctatatccattggaagagaaaagtttgtgacttgggcccccaagttttgagagaactgggctttcggcgcggggggacagaggaggctcgtggggagctttccccatggagcttacccagcctgcagaagacctcatccagacccagcagacccctgcctcagaacttggggaccctgaagaccccggagaggaggctgcagatggctcagacactgtggtcctcagtctctttccctgcacccctgagcctgtgaatcctgaaccggatgccagtgtttcctctccacaggcaggcagctccctgaagcactccaccactctcaccaaccggcagcgagggaacgaggtgtcagctctgccggccaccctagactccctgtccatccaccagctcgcagcacagggggagctggaccagctgaaggagcatttgcggaaaggtgacaacctcgtcaacaagccagacgagcgcggcttcacccccctcatctgggcctccgcctttggagagattgagaccgttcgcttcctgctggagtggggtgccgacccccacatcctggcaaaagagcgagagagcgccctgtcgctggccagcacaggcggctacacagacattgtggggctgctgctggagcgtgacgtggacatcaacatctatgattggaatggagggacgccactgctgtacgctgtgcgcgggaaccacgtgaaatgcgttgaggccttgctggcccgaggcgctgacctcaccaccgaagccgactctggctacaccccgatggaccttgccgtggccctgggataccggaaagtgcaacaggtgatcgagaaccacatcctcaagctcttccagagcaacctggtgcccgctgaccctgagtgaaggccgcctgccggggactcagacactcagggaacaaaatggtcagccagagctggggaaacccagaactgacttcaaaggcagcttctggacaggtggtgggaggggacccttcccaagaggaaccaataaaccttctgtgcagaatga

SEQ ID NO: 2116 - DNA, 9116 bp, Homo Sapiens
  NM_003724
gaaccgagtggccggcacttccggccggcggcggctgctccgggtgagcaggcccctgaagtgctgtgcctggagataccattgtggaccctggagaggcacctgctgcttatgcggtaaaacctctaccaccccaaacctggtcagtttgaggggagccgctgccatagtatccacagagaaggccggagttccagccgtgtggagcagcagaggggagtctgacagggtcacctcctacacagagagaattggcagctgactgcactgccaggagccaaggcctaggtgtgtggagcctggaagaccagggatacctgaggcaggaggtgcagcgtgtggagtgagaaacccgagagggactggggcctgtgctcaggatcagcagagcaggcaggcagagtggagagggagagacggagccccagaaggggagcaggaggagagggaagtagtggcagcagcccaggccaggcgtgtgtcctgcaagtgctaggaccagccacccctccccatggcctccaagccggctgccgggaagagcagaggggagaagcggaagagggtggtgctgacactgaaggagaagattgacatctgcacgcgcctggagaagggcgagagccggaaggcactgatgcaggagtacaatgtgggcatgtccaccctctacgacatcagggcccacaaggcgcagctgctccggttcttcgccagctcggactccaacaaggcgctggagcagcggcgcacgctgcacacgcccaagctggagcacctggaccgcgtcctgtacgagtggttcctggggaagcgctccgagggcgtccccgtgtcaggccccatgctcatcgagaaggccaaggacttctacgagcagatgcagctcactgagccctgcgtgttctccggagggtggctttggcgctttaaggccagacacggcattaaaaagctagatgcatccagtgaaaagcagtcagccgaccaccaggccgcggagcagttctgtgcgtttttcaggagcttggctgctgagcacgggctgtccgccgagcaggtttacaacgctgatgagaccggccttttctggcggtgcctgccaaatcccactccggaaggcggggctgtgcctggccccaagcagggcaaggaccggctgaccgtgctgatgtgtgccaacgccacgggctcccacaggctcaagcccttggccatcgggaagtgcagcggtcccagggctttcaaaggcatccagcacctgcccgtcgcctataaggcccaggggaatgcctgggtggacaaggagattttttccgattggttccatcatatctttgtgccctcggtgagagagcacttcagaaccataggtttgccggaagacagcaaagccgttctcttgctggacagctcccgggctcacccgcaggaggccgagctggtgtccagtaacgttttcaccatcttcctgcctgccagcgtggcctcattggtgcagcccatggagcagggcattcggagagatttcatgaggaacttcattaaccctccggtccccctgcagggcccccatgcccgctacaacatgaacgatgccatattcagcgtggcctgtgcctggaacgcagtccctagccacgtcttcaggcgggcctggaggaagctgtggccgtcggttgcgtttgccgaaggctcctcctctgaggaggagttggaggcagagtgcttcccagtgaagccccacaacaagtcctttgcacacatcctggagcttgtgaaggaaggctcctcctgcccgggccagcttcgccagcgccaggccgccagctggggggtagcgggaagggaggcagaagggggacggccccctgctgccacgtcgccagcagaggttgtgtggagttcagaaaagactccaaaagctgaccaggacggcggaggagatcctggtgagggcgaggaggtggcctgggagcaggcggccgtggcctttgacgcagtcctgcgctttgcggagcggcagccatgcttcagtgcgcaggaagtggggcagctgcgggcgctgcgtgccgtgttccggagccagcagcaggtgaggaggcggcgtggtgccctcggggctgtggtcaaggttgaagccctccaggagggccctggtggctgtggggccacagctcagtctcccttgccctgctcatccacagcaggtgacaactgatggcttctctgccctgccctggccactggccctgtttctccccacaccctggagtggcatggtcctgtgccccgaccccacctgaggcaggagggcatgtgcagacactcaagagcccttccaggagtgggtcgcccacgggtgtggctcgggtgcccaggacggtctgtgcccgaggttcctgtcaatacaggttttattttatcacttgccgtgtcatccgaaagtgaggaaatgttttggaagggtccaccctagcctagaacaagccagagccgcaccctggctggaatgggggccaggctgagccgatctggtctcgtgttcgctggctgatcattgcagtatcagagggtggagatgtcagtctgtccacgtggagagaagttgccctccaggccgacaggaggccatgcccaccgcccctggacaggcttcgtctcagaaggctctatctgctgggctggcggccatccccgtgttgggtggaccccgagcacggttgcctgaggtccgatggcccgagagctgggactcagttcttggcctgctagcggctgaacaggccgcacatctcacttcagttgtggcctcattcagcagaatgactctggaaccatcctctgttacccgcagatcctgtcccatgggctctggccccaagatgttggggggccccacggagagttgacttggtagagttcctttctgggaagaaagtaggagtggctgaccaggccctgctcatcacccggatagaggacacggaccctgtgtggtattttggcattttggctcagagtccaatgtaccatgttgcccagaatttcatacttacggcctttacatgaatacgtcttgatcagacattcagagattagtcttaggtttccacgtaagtcactgaaaacagtaaaacaggctgcttagatttctagcagtatgtgtgctcttatccccagctgttagcacgttagtaatacttttggggaggagttgtctgtcctggtcagttttcacagaggcggttgtaagaggatgtggttattttctccatgtctgtagttgctttgcggcatctccatttcacgggcaacactcactgcctgcagctgagattccagaacgccctgtgtccacagtgattagcctcgtctttcagcgagcataaaataggtgcattgtccttttcttttcttgaggcagggtctcactctgttgaccaggctggagtgaagtggtgtgatcccagctcactgcagcctcgacctccctggcttgagtgatcctcccgccccagcctcctgagtagctgggactagaggcacgcaccaccgcgcctacctttttattttttttgtagagacagggtctcactgtgttgcccaggctggtcttgaactcttggcctcaagcgatcctccttcctcatccttctaaagtgctgggattacaggtgtgagccacagcactcggcctaaataggtttttcttgctatgttattttcagtgctttgcccttgaattcttttcctctcttaaattcatatcatttggccgagtcagcacgtagtttgcattccagcgtctgctgttgattccactgaaacctctgttctcatgaaggagaggatttggctcgctgtggtttctcgtactttcacatctctgtagatacaggggcaaaagtcattgctgacagagccctatctatgtcctggaagtgtgtgtttcttgctttgaatgcatgtgtgaagattataaaagccaaatagtttttaaagatctcggtgctgaacgacagtcccagttcccatttgtgtcccattgtctttgtggtgtcacccgcactgtttgcttcattgtctggggaacttctgcacatccatgtactttgtgccatttctgggctcacgtgtcactcctaatagagcctcttaaccaagactgctggattgcagctgcttgaggcaacacaggaggttagaacatgtcccgagggctctgaaacagtaggacatcctgggtgggtggagctggggagggcatgggcaggccagctggccgagctcctggctggctctcctgagtcctctggacatggcttgtccctgtgagactgtagctcttcaggacctgagctcttcccgttcttgacctgctcttgtgctgactgtgctgggctgatgggtaggcgcttgtccccagtgagtggctgtgtcctcagggtgcccctcttccagaccaactgcagcaaggcctggagcctgactctaggtgcagcccttgtggctggaatcccttgtgccacccaggggactcgggccctgctcctcctgcagcccctcctcacctgggctcgctgctggagtgaggtttttagggagcccagagcgtactcatctctgagctgctgggcccagctgcctggtgcatacctcttgcctcggtcctgtcccccagaacgctttatggagactgccgtgtcctccgagcactttgttttcacttcctgacccgtctcagaagctcaagtggttgaatgttttagcctcagaatctttttccccaagccctctcaggtggagccccgctgtaccagacaccacagcacagctctgtgaggctgtgtctcttcactctgtttctggggctgctgaggcccctgggaagccctggagcttgccagagcagagcgagaaagtctctggtcctgtttaaatgcctccgcgttttatctgtgagcaccaggctggagccactccctgtcttctcacagtgcccctgcaagttgcagcctcagttttccagtggctcgtggggtagcaggtgctgcgtcatatggtttgggacctctgtggctgcttccagcctgctaatagaacctctttccaccactgccttcatctttggggtggcacccctgagtgctcaggcctgagggcgctcctgtgtcctcactcgggacaggcagcctccactctgggagctcccatccctcgggatgcccaggagaggccatactttcagggtggcatggtgaattcaggggttaggatgggtaggtggtctttcagccccttctgcgttggggttggtttacagaacacctgtcctgcctgtgccagcctggccttctgcgagcaccccaggcacgctgtcctggaagttgtctgtctcctgcataggagggtctagagcagaccttgccctgggcctgtctgtgcgtgacttccatatgcttcattcgtgctcagccatggctgagcatgcgatggagagcacctggaccgcccctgacgtcgcaggccactgttcttatccagtgggccaagtgattgattgctagtggtggggttgattggaagaaaggaagtcgcagcccctgcccacggcttccccagctcgctggggttggaggactgtcatcagttgtccccagttaaagtccatttggaggaggttcagggtcccagtggctggatgtgcttgtggagggacacggtttgaggcaggggtttgcagaaggtgtagactgcatccattcttgggaggctgtggcacagggcagtgacaacttgggacaaatcaagacccgtccacactgcacctcagggacctcacctcacgccccacataaatgtgcttattggggggccgggtgtggtggcttctgcctgaaatcccagtactctggaaggccacggcaggaggatcactttagttcaggagtttgaaaccagcctgggcaacatagggagaccccatctctacagaaagtaaaagaaaatgagccaggtgtggtggcatgtgcctgtaaccccagctactcaggaggccgaggcgggaggatccccaagcccaggagtttgaggctgcagtgagttatggcctctgcactccagcctgggtgacagagtgagagacctaatctctaaaaacaaaaaataacaaaatgtgctttggggtcaggtgtggagatcagggtcggggaggtcatgaggtaggtaggggtcaggatgtggacagtcatgggctggtgggtgtggcagccgtgaggggtgggtggtggcctgggaggcagggcctgggcagggcttctgcacttctgctgcttacccagccccctctgggttcgaggactctccttgacaagggctgagctctcgggcactgcgttggactcagctgcctactgggaggctggggagaatggacctgtgagaccttgtttgtcctcttccctgcccagctcttgtagaccccaggcctggctgtccgcagggccaggagctgcagccatggcagccaccagcctcccacatgagccccagctcccagccccacacgcccactcctttgcccatgtggtgtcagctctggcctccgcttccacacatggaccctcagaccttgcacatctgttgtttcccttgcagggcagtgatgatgacatgaaatgaggtggggtcactcctgtttagggatgagactggggcccagggaggggcaggtgtgaagttgctgagggcagagggagacccagggctacctgctcctaatgaccagcctcacgttctccactgctcactccctgccgttcaccagctgcatgaccttgagcagtgcactcaactgtaaacagaggtgaaaacactcctttaccaactgttttaggggccactcttgtttgaggccttgaacctcctttcagttccgtggtggtcctgagcctctgaatctgggtatggcccctgctgggtcctggtctcttaggcagcacgatggcctccctgctcaaggccctgcacccaggggcagattgtgggaggcccactggccatggctgggccctatcgcagagagcctgtcagcacggccatttccacacccaggctggctgggaagcaagctacgaggtgctcaaaggccctctatgtctgcaggtagccccgtcccacacaggcgaggatcgttgggcctccttagtagccaaaggaactgaggtccagagcagggaatgtgttgcccagtgtcagcatggtctgctctggggtcaggcgtcttgccctggtcctaagccaccccaagccaaggcatgtccctgggcccatttcctctctcgaggtcttgggttccctatttctgatgtgtgtgaaaggaaggcctgtcttctggggtgaccatgaggctcagtgggaggagctgccaggcttgagctgggacttggcacctggccagccttttttctatttcattgtaccttgatgggctgtcagttctgaagagaaaaaatacactaggaatccattcttcctccaccattctccctggcagagggaagtgactacacccctatggtgtggacatactgacgctcctccatgaagcagcaaagttctgttgtttcaggagactgtgggccttgaggatgtggtagtgacctcaccagaggagttggcaattcctaagtgctgcctggaggcctctacagagacataatgttggagaacttctgccacatggcagtgctgggtaagacccctctgtccccaccagtgcccttgaggttatgggtgttggtaggtctgtggcctccatttccatgacgatggtgttaaggactgcatgtttgtgtccccccccaaagtttatatgttgaaaccctgacccccaggagggtggtattaggaggtggggcctttgggaggtgactaggcttaggtgagatcgtgagggtggggctcgccgatgagatcgagtccttataagaaaaggaaggaactagagcgaggtcactttgtgctgtgtgagcatacaagaaaactgccatcttcaagctgggtgcagtggctcacgcctgtaatcccagcactggaaggccaaggcattaggattgcatgagtccaggagttcgagaccagcctaggcatgataagaccttattgctaaaaaaaaaaaaaggaaataaaatagaaaattgccatctgcaaatgagaaagccttcagccgacaccagactgccagtgcctttgattttggactttcagtccccagatctgtgaaaaattaatttatgttgtttaagacacctagcctgtggtattttgttatcgcaatccaaactgactgagacaggcagtaaggagagaacagaggttccagcctgcttcaggtccaggcagttctgccattgcccctaactcctcagtgccagtcatgggccaggcccctgggggacttggaatgagtaaaacatgcacctattgttaaggttcacctggtccagaaggggaggcagacccacctgcccaccatgacccggacagaggcgataaatacggagcacctcatggccagggcctggaggattcccaccataccctacccagcgccaataacagagggaccctggagttgtgtacacaagatagcagttcagtgcttgcacacatactagttgagaagggaaatcagggctaatgaaacagctcaactgtctggcagagccaggctccttctgccatgatacagtttggatgtttgtccctttctaatcttatatggaaatttgatccccagtgttgaaggtggggcctggtgggagatgttcctgttatcgggatggatccttcatgaatagcctggtgccatctttgtggtaacaagtgagttctcacttgattagtttctgtgagaactgtttgttaaaaagagcctggtggcacctccctcccttcttcctccttctcttgctatgtgatgctgctgccctttgccttccgtcatgagtggaagctccctgaagcccccaccagaagcaaatgctggcaccatgctgcttgtacagcctgcagaactgtgagccaaataaacctcttttctttataaatta

SEQ ID NO: 2117 - DNA, 1601 bp, Homo Sapiens
  NM_003726
ggcgaccgcggctgaggtacaggtgcctcgcggtgcagccgggtcgccttccagcccgtccgcctcccgaccagggcccgcgccccgtcccgcctctctcccgcccagccaaatgcaggccgccgccctccctgaggagatccgttggctcctggaagatgctgaagagtttctggcagaaggtttgcggaatgagaacctcagcgctgttgcaagggatcacagagaccatattctacggggctttcagcaaatcaaagccaggtactattgggattttcagccccaagggggagacattggacaggacagctctgatgataatcacagcgggactcttggcctgtccctcacatccgatgcaccctttttgtcagattatcaggatgagggaatggaagacatcgtaaaaggagctcaagaacttgataacgtaatcaagcaaggatacttggagaagaaaagcaaagatcatagtttctttggatcggagtggcagaagcgatggtgtgttgtcagcagaggtctcttctactactatgctaatgagaagagcaagcagcccaaagggaccttcctcattaagggctacggtgtacggatggccccccacctgcgaagagattccaagaaagaatcctgctttgaactgacctcccaggataggcgcagctatgagtttacagctactagtccagcagaagccagagactgggtggatcaaataagtttcttgttaaaggatctgagctccttaaccattccatatgaagaggatgaggaggaagaagaaaaagaagagacatatgatgatattgatggttttgactccccaagttgtggttcccagtgcagacccactatcttgcctgggagtgtggggataaaagagcctacagaggagaaagaagaagaagatatttatgaagtcttgccagatgaagagcatgatctagaagaggatgagagtggcactcgacgaaaaggagtagactatgccagttactaccagggcctatgggattgccatggtgaccagccagatgaactgtccttccaacggggtgacctcatccgtattctgagcaaggagtataacatgtatggctggtgggtgggagaactgaacagcctcgttgggattgttccaaaggagtatctcaccactgcctttgaagtggaagaaagatgaaacccaggaaatatattcttccctctctcctgcctttatgaggaaactgatcatcaaaagttcccactccctacttctgccaccccaccaacgccttggactcctctctttgctgaagagacccaagtctcttgacacctcagagtgactgtaagctaccagtaagacaagtgggaagaggcacgttcatcaaacctgttactaaaccagcctagtcatagctcatccccatctctaaatgtgtccacacaaccacatctgccttttccacaagcttttcacaaagaaggtgagagagaaggaaaccttgggaggaggacattactggttgttctggctggtttgaaaagcacaaataaacttgggatgtggttccttgccatgaaaaaaaaaaaaaaaaaaaaaaaaa

SEQ ID NO: 2118 - DNA, 2595 bp, Homo Sapiens
  NM_003729
gcgcatgcgcactgactgcggaactgggcgaacccgggggttcgtttctgctgactccagtgtcccgagaggcgccgcttcttccgctttctcgtcaggctcctgcgccccaggcatgaaccaaggtttctgaactactgggcgggagccaacgtctcttctttctcccgctctggcggaggctttgtcgctgcgggctgggccccagggtgtcccccatggcggggccgcgggtggaggtcgatggcagcatcatggaagggggcggccagatcctgagagtctctacggccttgagctgtctcctaggcctccccttgcgggtgcagaagatccgagccggccggagcacgccaggcctgaggcctcaacatttatctggactggaaatgattcgagatttgtgtgatgggcaactggagggggcagaaattggctcaacagaaataacctttacaccagagaagatcaaaggtggaatccacacagcagataccaagacagcagggagtgtgtgcctcttgatgcaggtctcaatgccgtgtgttctctttgctgcttctccatcagaacttcatttgaaaggtggaactaatgctgaaatggcaccacagatcgattatacagtgatggtcttcaagccaattgttgaaaaatttggtttcatatttaattgtgacattaaaacaaggggatattacccaaaagggggtggtgaagtgattgttcgaatgtcaccagttaaacaattgaaccctataaatttaactgagcgtggctgtgtgactaagatatatggaagagctttcgttgctggtgttttgccatttaaagtagcaaaagatatggcagcggcagcagttagatgcatcagaaaggagatccgggatttgtatgttaacatccagcctgttcaagaacctaaagaccaagcatttggcaatggaaatggaataataattattgctgagacctccactggctgtttgtttgctggatcatcgcttggtaaacgaggtgtaaatgcagacaaagttggaattgaagctgccgaaatgctattagcaaatcttagacatggtggtactgtggatgagtatctgcaagaccagctgattgttttcatggcattagccaatggagtttccagaataaaaacaggaccagttacactccatacgcaaaccgcgatacattttgctgaacaaatagcaaaggctaaatttattgtgaagaaatcagaagatgaagaagacgccgctaaagatacttatattattgaatgccaaggaattgggatgacaaatccaaatctatagagtatttgcctcttaaatgatacctcattgatatattgcactatttcataaatactataaaataatgactaggaagtaacttattaaaggctatgacttaaatttgaagatgaagtacagtgttctaggtttgctgagaaggcttcattaaattaatctcactttgaatatctcctgagagatggacaatgaaatatcagttggtggatatgtgtgatagctgatttcaatattgaagtattgaaataaaatattctttacacctgaagtaaatacatttttcttttttatgtaattaattaaatcagggatatagatttgatctgtaatttgggtataattctaatctttgctgaaatcacatctcaagtataatgaggcaactttatgcaaatgtacttgttgtgacaacaataacattttccttttttttttttttttttgagacagtctcgttctgtcacccaggctggggtgctgtggtgtgatcttggctcactgcaacctctgcctcccgggttcaagcaattctactgcctcagcttcctgagtagttggtattacaccaccatgcccagctaatttttgtatttttagtagagacagggtttcaccatattggtcaggctggtttcgaactcctgacctcgtgatctgcccgcctcggcctcccaaagtggtgggattacaggcgtgagccagtgcacccggcaacaataacatttaataggcattgtctcattctaatgatatataccttctacctagtgggcactttgtacatatttattttttattttatttattcattttttttgagacagagtctcactctgtcaccaagttggagtgcagtggcacaatctcagctcactgcaacctccgccttccaggttgaagtgattctccagcctcagcctcccgagtagctgggactccaggcacgtaccaccatacccagataatttttgcatttttagtagagacggggtttcaccatgttggctaggatggtctccatctcctgacctcgtgatccgcccaccttggcctcccaaagtgctgggattacaggcatgagccaccacagctggtcgtaaatattttttgaatttgaatctgttttggaagccaaatatgttttggaagccaaacaattaagagaagtaaaattttaaccctagtaggtttcgcagattcatccccagatatgtttttgtttggcttgtgttattaacaaataaatgagtgtctttcaaatggaaaaaaaaaaaaa

SEQ ID NO: 2119 - DNA, 728 bp, Homo Sapiens
  NM_003732
ccgcctcagactcagagctgcgctcctcgacctcaacgccaggcggttactttgctgctcctcccgctcgctatgtcaacgtccactagctgcccgattcccgggggccgggaccagctgcccgactgctacagcaccacgccggggggcacgctatacgccactacccccggaggcaccaggatcatctacgaccgaaagttcctgctggagtgcaagaactcacccattgcccggacacccccctgctgcctccctcagattcccggggtcacaactcctccaacagcccctctctccaagctggaggagctgaaggagcaggagacagaggaagagatacccgatgacgcacaatttgaaatggacatctaatccagtgcagatgacctggcatgtggagttacagagggatccctcatgccactgctgccaccacctcttcctggggcatccaaaggccagctggcctcatctaatctggaagggagtgacttgttagttccaggcctcctttagttctgaggcagctagaccagggataggagtgggcaacttgccaagcccttaactctacttcctcttcagtctgtggtactcctcctaaccctaaaccctctatgctcaggggctggaactggggaatggagtaagtcaccttctgactgcttagtaaacattcaaagaaatgaaaaaaaaaaaaaaaaaaaaaaaaaaaaaaaaaaaaa

SEQ ID NO: 2120 - DNA, 1224 bp, Homo Sapiens
  NM_003739
gcccattgtttttgtaatctctgaggagaagcagcagcaaacatttgctagtcagacaagtgacagggaatggattccaaacaccagtgtgtaaagctaaatgatggccacttcatgcctgtattgggatttggcacctatgcacctccagaggttccgagaagtaaagctttggaggtcacaaaattagcaatagaagctgggttccgccatatagattctgctcatttatacaataatgaggagcaggttggactggccatccgaagcaagattgcagatggcagtgtgaagagagaagacatattctacacttcaaagctttggtccacttttcatcgaccagagttggtccgaccagccttggaaaactcactgaagaaagctcaattggactatgttgacctctatcttattcattctccaatgtctctaaagccaggtgaggaactttcaccaacagatgaaaatggaaaagtaatatttgacatagtggatctctgtaccacctgggaggccatggagaagtgtaaggatgcaggattggccaagtccattggggtgtcaaacttcaaccgcaggcagctggagatgatcctcaacaagccaggactcaagtacaagcctgtctgcaaccaggtagaatgtcatccgtatttcaaccggagtaaattgctagatttctgcaagtcgaaagatattgttctggttgcctatagtgctctgggatctcaacgagacaaacgatgggtggacccgaactccccggtgctcttggaggacccagtcctttgtgccttggcaaaaaagcacaagcgaaccccagccctgattgccctgcgctaccagctgcagcgtggggttgtggtcctggccaagagctacaatgagcagcgcatcagacagaacgtgcaggtttttgagttccagttgactgcagaggacatgaaagccatagatggcctagacagaaatctccactattttaacagtgatagttttgctagccaccctaattatccatattcagatgaatattaacatggagggctttgcctgatgtctaccagaagccctgtgtgtggatggtgacgcagaggacgtctctatgccggtgactggacatatcacctctacttaaatccgtcctgtttagcgacttcagtcaactacagctgagtccataggccagaaagacaataaatttttatcattttgaaataa
